United States Patent Application Publication US 2011/0014706 A2 - sequence listing, part 8

SEQ ID NO: 14340 - DNA, 796 bp, Arabidopsis thaliana landsberg
  unsure (1)..(796): unsure at all n locations
agtagaccagtaccccttaaactgtctgagtctctaagcgaaaaaagcaccgaacgcatgatgaatcctctctttgaatcttcgatttacatgtctttcgcaaacattaagccttgaactccaatttttcatgtttatagttactacaagagtcacagagaaatcaattatacaaaatatgtctaatgaaaattctgtaatgtcattgatagatcgcatctctggtcatctctgtcttcaagatgtatcaattgcgttgttaggtttattccttttcggttgcttgcaagcgaagttaaccaacaaagccggaccagtacaatggcctgtgtttgggataactcccgagttcttccttcatgttcacgatatgtttggatgggtcacccgatgtttgacgaaaagacgaggaacgtttccttaccaaggaatctggtttagtggatcttacggagccatgactagtgtttctgcttacatcgaatacatgctcaaaaccgatttcaagaattttcctaaaggagagttttacaaagagagattccgtgacttactcgaagatggtattttcaatgcggatgatgaatcttggaaagaacagagacggatcatcataacagaaatgcattccactcgcttcgtggnnnnnnnnnnnnnnnnnnnnnnngatttgatagagaggaagcttttaaaagtgatggagagtttctccaagtcacaagaagcttttgatcttcaagagattcttttacggttaacatttgataatatctgcttcgcgggtcttggagatgat

SEQ ID NO: 14341 - DNA, 533 bp, Arabidopsis thaliana landsberg
ggttgccgatagagttaggtatagtcacctggaaaaagaagtgttgtaaatgctcaactttatcttagagttgtggctaagaaaattgggaagactgccttctatattcagattgtggtccaagctaatggattctaggtttggtatgagaagaacactgtttggaaatcttcctaagaggttgcagcccttaagagtaagtgatcttagagaccacatgtatgaaaactcaatggggattgctgaagaaatgtctacggagctcatatctagctctctaaggttcatgaagttcagtgcaagtagatggagaaataatggtttttcaatggacaaagaacttggagaatacggaaaagaagaagaaagatcaagagacaccaaattggttagctgaagaagtttgattgaaatatgacctgaaaatgaagaccgcgagaggttaagtctttctaacctcatgaatttgctgaactcagctgggatgggagagttggtgaaattgttgtaagcaaggttcacactttggagat

SEQ ID NO: 14342 - DNA, 415 bp, Arabidopsis thaliana landsberg
ttctcgatcggaagaagaaacttctcccctgctctcttgtgacccacttccctcgccggtgcttttatcatcttcatcgtcttcagaactgacttcggctaagtttaataactcgagggctctctggcaatcattgagcaaagcttgcaaagttttccgcttgacacgaatattatccttatcgattcgttttcctttgcgctcgctattgttatccatggcattgggtattacccaatcctcagagaggatacaatcgaagctcttgcggcatagaatcctttgaagaacaagatctgagaagacgacgactgatcgatcgttgttgtcgcgcaaattctcttcctttgttttggtttgattttgtttttcacgttataaaaaaaaaatggagttttgttttattatgtgtgag

SEQ ID NO: 14343 - DNA, 545 bp, Arabidopsis thaliana landsberg
atacttatttttaaatatactttcatttttatatatacttacaatataataatttaaaactatgatatttgatttgttatattttttatgatctagacctgcataataatttcatacatatttatttgttaattatgtttgattgtagataactataaattgttatcttaaaaatctgtgagttatttcagcaaacccaatattgatttatgattggggccattaaaaccttttttatttggttatttatcttctaaacttactaattaaaatttgtaaaactacaaacgtttaaatagtttcatacacatttttaatattaattacataacattaatagtattgatgatgaacaaagatttgatgcactaagaccataaatattttttaaagataaagttttaacttaatgtgaatatatacttaaattggtctagaaagaacacgtatgcatctagatttgctgaaataactcacaaaaatgtgcaatatttacattacagttttttaatcgtcatacaacacatcattaatatattattatc

SEQ ID NO: 14344 - DNA, 628 bp, Arabidopsis thaliana landsberg
atatatagagtataatttttgtatagtattcataatttcatacaaagttcttttctcactttatttattcaataaaaaagacaaccatattaccactgcttcttacaactttaaatataaccactctattacccatccgaatcatgttcttgggtgtcttttgagatttgaacgtcacatccacgaggaaacatgagcatatagcttcgagttactgtgacctctgctttcattgaccacctacaaataatatatatagaagtaacgacttagactatatagtaacaaataaattgaatcatgagtcattaggtgataaaaaacaaacctatatctacacaaatggtggataaaaatggccatcaacaacttagcaaagtaagccccaacacaaagtctaggaccagccccaaagggaatgtaattcgtggagacgatcgcgtccaagtcgtttccctgttaataaatttagatatatattagaactttcagaatttgattagtgatatagggagataataacttaaggatgagtataaaattttaaatcaccttccaacgccatggattaaattctaaaggatcctcatactttgttggatcaaaatgggcactaggatagcccatg

SEQ ID NO: 14345 - DNA, 1016 bp, Arabidopsis thaliana landsberg
tattttttcagataaaaagtatcaaatccaaacagataccaataaattttcggttctaaaccggttcttattttagataatagaatcgattcaaatccaaaaaaatcagaaccgaaaccataccgaaattttaaaaatacccgaaatggaaccaaaatttatttatgatcttaataaccatttaaaggaaagcattatcccatcaagtataaaacaatctttaattataaagcatatatatcatccaaaacattattttttcgtcactgaacctttctagaaaatgtcacactgcctcagccatatatcttatgtctgctagcccatctaccatagtgttaagaaataatcgtgagaactactcactactgagtagaaattaatggctattctcctacacatgcatgtatatatatggtttaagaaaaagatgaatattaactcagcaatatatatttttttacttatttgtgttgatgatatttaaaatttttggttagcgcggcaaatctgaatactaacgaggcaaattaaatttgttagcgaggcaaatctaagccagttataatttaatactatttattaaacctaaaaaaacgtggtatatatatactgttagcgaggcaaatctgaatatgcagtgataaagaaaagctaaagcaacaaaaagataatagataggtatttgatatttccatgaagagatcacgagaagaatctcaaggtggcggcaaccataacagatttgttgatgaggtatatcgtctactttgctcaattctctctgtttctactccataatatgaagtattccgaaatttgtttttttcaaaatcccatcaatttataccaaattgatagaacaaaagccaaactctacaattttttctctgaaattaacaattctcaaataccacaagttaaagtttaatcataataatacaaagtgtaataggtggggataagtatgtgcattttagatcgggttatcaaactctactgtacatgatatgaac

SEQ ID NO: 14346 - DNA, 515 bp, Arabidopsis thaliana landsberg
cataactatcctaaatctacatgaatgtgattctgtgacacgacaggtacctgctacatatgtctataatctctcttatatgttttattgttacaaatatgtcatacagattccatgctcgagaatacactgcttgatggttgtccagcccctcttttgaagatctgagatataggctactccaaggtcattcattcattcattagactctttttcttcatttgtttcaattctggttcccattattacttgggacttgatctcataagtcatatgtttccatttcttcttgtgcagtcatctctgcttcactctagacctaaatcaactgttggtactccagcttatatcgcacctgaagttctttcccgaagagaatatgacggaaaggtaatgttactcatgtcttcttcaatggtctgatccttatttgtcacttgttaatggaactctttggtgtttgtgttatgtagcatccggatgtttggtcctgtggtgtgactctttatgtgatg

SEQ ID NO: 14347 - DNA, 568 bp, Arabidopsis thaliana landsberg
tctaatatgtacgtgaggctagcccttgactacgttattgatatatctccgggcatctcaactaatctatctgatggttttctatttggccaacccttcacagtgacatctcttacaacaatttctcatggacgtctagctgccaagaaaagaggtgtgaacatgaatccttgatacacaagctactcatattgaagtttcagttttcactttctgctgaatcagtaatattaacacataccggagctcatatttgaagacaaatttgtaagtacactcttctgctttttattttggaacaatcaagaaccaagaacatatataacttcaaatatggcaatggaaatggtttaaatttgttgagatgatgaagtgcataactattttggtagtcttgttatacagaagtgggcttcttccatgcgctggtccaataagatgcactagttgtaagtacataatgagataatctaacttattactgatctctgcttagtcagttaagtctcattttgttgatggttataatcattatggattgtagatcagcgatttctacatataaatt

SEQ ID NO: 14348 - DNA, 566 bp, Arabidopsis thaliana landsberg
caatccctcctcctacatggaccaaagtgttaacaccttcatttcctttgtattcttgtagaaccttcttcatggccattgtggaagattccgacatggcgcggtgaaacaactcagagaactggtcatccgaactaatgtattcgaaaagtctcatgtcgtgggcagagctgaatgcatcttttccttctagtatcacatccttgagatttgtcctatatatggaattttttcaaaaaaaatatcttcaaatgttcatttacgttttatgttcacttaccaagttttgagaatgacttggctatggagcaacaataacaaggacgagagagaaccagagccgtcactatctttcaagaaatacttgcaaatcggttcagctgcatatactctctcgatctttccggtttgaccattttctctgctttcaaccatacaacacttcaagatcgagtggcttacaagtaatcgcagcatccggtccagtaataccggcgcctccgggttagtgggtttgtttgggagactaacggctatttcagacggtgagagccacgtgcccttgg

SEQ ID NO: 14349 - DNA, 648 bp, Arabidopsis thaliana landsberg
ctggaaacatatagtgattaaaatataatatcttcgcatgtgaagaacaaaccctagttcatcaacacatacacacatataagcataacaaatattggagatcaattataactttttgatatatatatatataagagtttgacctgcagatttggcgagagagttccaaacaccttcaccatgattggcgatataattgatgagaatcaaatcttcttccatcgtccatggcccttttctcacctctgcatctcctgatccagacccaccactactttctcttttctccatttttatgaaatgaatctaaataagtactctatataattgatagatgatgatatttttctagagagagaaatagaaagggagagttgtgaaagtgagagagagagttgatattttgaggtggtgggcaggtagctactgcttttatagagaagggttttcaagattttaaggcattgttaataacctttaatccaaaatcttaaatgtcttttagatactaattagccacacatattgtcgtgtttactttattttataaattttcataacacatggggagctagtacagcttcaagacctaactatgatcatattatatagttctattttctttctacatgcatataatttaacatg

SEQ ID NO: 14350 - DNA, 601 bp, Arabidopsis thaliana landsberg
  unsure (1)..(601): unsure at all n locations
attatactcttacctatggggaagaaaactggaatcaccaggttatatttgtttgctggtgatcattatcaggaagccaagacatggagtgagcttcttgcatactactattacctcccatcgccataggcaactgtatcccgctgtgaaactgcagtaaaaggctttggcctggctaagaatatgtcctgaggagagacaaagagaaagagaggggaaaggcgacaaaatggttataacctgtgttgttgcacattctattggcaagagttggttctttctgtaatgttcctgcaaaatgaatggaaacatcttttgtaaacaaaatttatatgggttcaggaaactgaaatgaatcctgagtcttaggtctatatgatcgagaaaaagaaaatatgataacgcaccttgtgaatctggattctttcaatggatttcctcaatgattcttccaataaatcgaggtgctcattgntttctattctatcgatgttcgtccaacaactgaaaacagccattagaagaaaaagactcanatatgattgaaactatatttcaaanagcanaaactttataactcaagatactataaattttcaca

SEQ ID NO: 14351 - DNA, 743 bp, Arabidopsis thaliana landsberg
tcttgtgtgatacaatgctagcttgtcaacacgatttgctgttaagtttcattgaactgaagagtatagcttgggcgatacattcaaatgcaaaatttgacacttgttatattttaggtttgacgaaacaaagtaaacaaaaacataatcagacatatatttgagaatcagctatttcttaaacatgtaagtgatagctgatccgataggatatataaaatcacaattacttccacttgctcttttgttggaggaacttgggaatgcccatttaatgaattgcattctctggattaaacgcaaacccttttcttcagctagagcctttaaatcccatttgttaaatgggtttagtgtgtttagagtgatatgaatctctccatcttcgtctttcatcatctctcttgcactctccataaatcctccaaataccttattgcgtttcctgtgaattgcacactcaaatgttgaatatacattcatatgaataatatatatatatataatcataataaatattatacatatatatttttaaaagtatatatatgaaagtggttccaaacatatatggatgtatcaggaatccaagatcttgttatgaatttccaaatatcaaacttttgatatataagatctgaaacaagctcatcaaaaaccaaaccctgcatgagaaaaattaaagatgattatgtcgtaatgagctaagcgatcgtctgatttcatggagtgtacattaacac

SEQ ID NO: 14352 - DNA, 493 bp, Arabidopsis thaliana landsberg
  unsure (1)..(493): unsure at all n locations
tattatattcgaacttcatacctcaacttaagaaaaagtacaaaattcagagtcaaagtaacgggtgttagtcaactccgtgaagatgataagtcagcagacacatggaaaatatgtgtctataacgacgtcgttttacgttatgaacgtttaaaatgttaaatttgttgggtagtttcatatctaaaccgcatatttattttaatttaaaaaaaagattgctaggtaaacaaagtataagagaatacatggtcacacatacctactatacattgtatatccagctacacgaagtagacacgaagtagatgtattacatgaccatangngacgtcatgtggttaacaccattgacatacaattccggtaaaccggtcagttgactcaggctttgactagtgttgaccggcgttgaccaacaaaaaaatttaaaattatttttaatactcaaaaatacgaaaatattcttttcttttatatattcaaaaacata

SEQ ID NO: 14353 - DNA, 939 bp, Arabidopsis thaliana landsberg
  unsure (1)..(939): unsure at all n locations
aagaccactcaaacctcatagtcttcatattaagactctcactcttgctttcatagattaagagaaatttgggttcttgggtttcctaataaagtcaaaatctctccttgaaagacttcgactctatcgtacacctccagtgtttagacacgctttgaaatccaattagggttttcacgggaagtctcaccattatttcttctaacacaatgttattgatgagtatcatctcaatatatatgatggatttgtctctgtcaaactacgaattacaaaccctaaatcctgaaagggtcacacctttttaccacgcaaaacaatgtcctgaatataaagtccaaataatatatttaagcccatcaattttattatcatatgatataattttatcatcatttccacgtatatgattgagtaaaaatgtaggaaaatccgttgagttcaaacaaaatattgttttaaggatcacccttttttatatattatcttgtaattttaaatattgtagtataagatagaaaatctatatacatttactgaataacgatagatcgtagagaattagatcgttcattactatgcgaaatagaagtagtagaagaagatggaagttcttgtgatgtcggcgaaacatttcttatctcttgtgcttcattgtccataaagacaaagtctactcgagcttgaggtgatatcagagtagtagcagcagcaataggaaggtttggttcctctgctgcttttcggaagctaagtttttcagaaacttttgaagctgaaaaggataaaagataaataagagcagactatacaaaggattatattatgtatgtgattataaaaataacacaaagaagtccgattatgtaacctcatgcatttttggacctttcaccttagttttattgaaatgatgtgagagacttgtntagaaagttg

SEQ ID NO: 14354 - DNA, 703 bp, Arabidopsis thaliana landsberg
tgattcttttgacagcctcttcaccgcaggttctgatccgtcttgaagaacaccctacaaaaaaaagatgcagtactcatagaatagatcacgccacatatatatgttaatgcatacagttgttcagataattaaaaaatctctggaagtagaaaaagttttaccttgaaaacttctccaaatccaccttgaccaagcatgtttctcttcgaaaatgcaagtgttgcagcttcaattgtcttaagatcatattgcagtgaactttgagttataattttatctgcaacacggaagtgtcgtaatattctttgcaacataaaggaacacacaaatcgaaaccataatgatatttctttgtttacacgttaaaacgttttcagtcatccatcagtgcattttataagtccttcacatatagctaatagaagtttgcacagacacagacaattaaacagggaaaagtgttccttttcaaattccttgaccccacatcatagtgtattttctgattgagtattcattcattttctgagtaagacacaaaacaactaacctggaagttcggtttttctccttctacaaacaagtattgctactgcagcagacagtacagagatggcaactccaatgggaacaacatacgccatgatcattccttttgagattttttttgcactctggctataccaaaatccacaggtaa

SEQ ID NO: 14355 - DNA, 599 bp, Arabidopsis thaliana landsberg
cgagttataattaaacacgtgtcatagctctcttgttccattgtacgttgttgagttcttcttcttcgtcttccatctctctaccaactccacgatcaacgaaaccaaagatctctcttcaaagcttccaccatgtttctccgatcactcaatctctgtacaatactactcttcctagcgatttcatcacaagtttctcaatctctccacttcgaattgcaatctggtcgaacaaaatgtatatcggaagacataaaaagcaattcaatgaccgtcgggaagtacaccgtcgttaaccctaacgaagctcatccttctcctcaatctcacaagatctccatcagagtactactctcttaaaaatccgagattttcataactttgattattattgattgttgatttgaaaacatgaatttacgcaggtgacatcgagttacgggaacacgtatcatcacgcggaagatgtagaatcgggacaattcgcgttcacggcggtggagtctggagattacatggcttgttacacagctgttgatcataaacctgaggttacattgagtattgatttcgattggagaactggtgttcaatctaaa

SEQ ID NO: 14356 - DNA, 531 bp, Arabidopsis thaliana landsberg
acatgtacatttatacgacatgcatattatttacgtcatttacgttttcacacaggtgacatgtcttcttcataattcctagtaaataaatcttggggagtcaattttaaaaaacaaaacaaaataacgattaagtgcatagtagcgcaatttcgactaattaattaagtgttgactatgaataaacttttcaactaataacatatggctcgcagagtacttgaacgatccagaagccacttcagcaacaatagacgaagaaggttggcttcacacaggagacattggatatgttgatgaagatgatgagattttcattgttgatcgacttaaagaagtcatcaagttcaaaggctttcaggcaagtccattcatattcattgttctttttatttttaacaagtgtttacacctaaaaaagatttacataatgatatagaaaattaatgatataatactattacttagttcaaaagataagatcatttcgaaatcgcggtatgatgatgatgaaatgtgaaagaacaggtc

SEQ ID NO: 14357 - DNA, 192 bp, Arabidopsis thaliana landsberg
cattgcaattgaagatcccgtgacaagaagatcattgtctattcaggatgctagtgcgttgcttatgtgcgggcgaaaatttggagagccatattgacgagaaacaggtacttgttgccatggaaatctactgccaagggcatgtgggatgatgctaagtattcatgagagctatatgagcggtgagtgctg

SEQ ID NO: 14358 - DNA, 315 bp, Arabidopsis thaliana landsberg
aaaagggtaaacttattttctttgttacttccgtttacttgtaacaaactgattcttcagctaaatactgcagtaagtaattgtgtctagggttcttagagaaatcttcttggttctatacattatttctgcaaaattgtcacctttatgtttacctcttcattgttatgagatttatgttcgtttacattcagatttttgaaaattgcagcagtttctgttatccatgatgccaaactggtctcagctcccggaagagctactcaaccttatctccaagaatctagacaactgttttgatgtcgctcatgctcg

SEQ ID NO: 14359 - DNA, 435 bp, Arabidopsis thaliana landsberg
tttaactggataagattaattataatctacattttttgaggtttttagtataattgcaaagatctgcgatttggaagttctttttacacaaaccccttgttataacatccaagttggatggagtttgaattttttgaaaatgacaagaaaattttgttcacgaatttaatcttaaaataaaagcgctcaaattgaacattacttggaatggaaaacacaagatacaaacttttagtaaacaatacaaattaaagctttgaggactctataactttagtctttagaggtagaggccacttttacgtccatgaaagaggaacttagacagataggctgagcgaagtgtgtcaaaccaaagctgaaaatgcaacaccacaaatgagagagctcgtgggagaagccacgttaactaagaggattaagcttcatttaggt

SEQ ID NO: 14360 - DNA, 562 bp, Arabidopsis thaliana landsberg
gctgccggtcgtccaaagcaaacacactagggttgctctgatttttgttatttattttttattttcctttttcttgacttcctgttctcatttcaattgcggagacctcgctcacgctacggacttcaagctcaacctcctgctgctataaaaagtaccaagaaaaccaacaagagcataaagagatcatgatttgcataaaccaataatgggttgcaaaaacacatgcctcatcatttcattttgcaaagattctgacctagctccatcgtccagcttccccgtcccgctgagcaaagaatttgactaagacacaaaaatacaatatagaaggagagaagtcagaaatgatcttggaagagaaaagaacctagtttcaaaagacagtacaagtatgcaataatacagaataaaatcatggcagaaaaaaagcataaaattgatcacttaagcagcacaacattctaatttaagtttgttacctcgtatttcttgattctaaaaattaagcacaagagcacccttcaacatgtcatgcggtgggtgtgtcactcacaagtca

SEQ ID NO: 14361 - DNA, 625 bp, Arabidopsis thaliana landsberg
atccctagtgcttttagcaggaagctcctctcctacaaaagcaatcagtcttttaatactcattgttttttcaaagcctaagtagttgtgtgatgaacaaagaaggtgcgaagcttacactttcggagaactgtggacttggtataccgtctgccaaagatctgaacaatggcgtgacctgaataggcgagctgaacttttcttcgcccgagatgggcatattctcatcaggatttttcgggacgagcaactcctctccaacttgcttatgttctgtctgagtatctgctgagaatggttgtgttttatcaccagactgatccaccatgatggttgatccggaactatactcagagctagctggtgagtcatgaagatcaggttgcctaaagaacatcaaatgaaatggttatacaatcaaaaccttaagatgaacacaaaatttttgtggtgatgaaaagctacctccaagataattgattgtcttcataaccactcctcaaatcctctataaggtccttaaattcctcgatcttaaaatctatatcaggtattccatatctgaataaatcattaaaccttgcctttattcaagaagtcctgaagaaccagtatatatgcatac

SEQ ID NO: 14362 - DNA, 504 bp, Arabidopsis thaliana landsberg
gagtaaagattcttcttttttaaatgtgagtgaaaatttaatcaagagatttagtccaatttaagttgtaggccacatcatttgtacaatctgtccataaccatccatcacattcacatatttgttacatactataaagaattttatctatggtgaagctttgtaaaaattgtggttgagaagtggatgttttcgactgcataaataggcataatattatcctatatatagaaagttatccacgccatcgtcttgttaaccaaaacttaactagcaagtcaaaatacttgacaatcttataaaaaatcaaactaaactttagaattttaatgacattttaaaagttcatatttttcttcgtcccaaatttagaacatctgatttttctcgacattttcccttataaatattatatcactaatcgtatatagatatgatatttatctgtcaatgaacataaataagagtatcaactttaagttaccggaacacacaaacaaaatt

SEQ ID NO: 14363 - DNA, 903 bp, Arabidopsis thaliana landsberg
aatatataaatttacccattcgacgagactttcttcacccaaaggttgagaggtatcaacaggttttttaccggtgatgagttcgagaagcacaactccaaatgaaaacacatctgatctatccgttagctttccgcttgacgcatattctggtgctagatacctgcattgcattatgttatgtaatgttgttaatatcgtatcgtaacattttattaaaaaaaaacaaataagagaagtgacagtacccgaatgtgcccatgacacgcgttgatatgtgtgactgtgcagtatcgttcagtctagcgagtccgaaatctgcaacctgtacgtaacaaatcaaatgctctcagtgacgaaaatgatcataatgatttctacgatctcccactaatcattttattactaaaacagcaaaatattaaaattaatttaaataatgactttgcctgagcttcgaattcatcatccagcagaatgtttgacgatttgatgtccctatggataatctttgggtggcctatgaaattcattaaagccaaattagcctaatccttgattatatagttttacaccaaggaaatatatatttcatgttcaagaagaaaataaagaaataaatgtgatggagtgtatatatactcacaatcttcatgtagataagcaagtcctttggctgcgcctattgcaatcctgactcttctactccattccaaaaccggtaagtttttgcctgacaacaacgtaagaaaatatctggtttaattgtagcatataagtatattagtccccaatactatcaatattcataaaacaaattaaaatgtcaacacatatattctatatagaatcctaatttagtaacaaagagagactgtaaaaagaagtacgtaccatgtaaat

SEQ ID NO: 14364 - DNA, 617 bp, Arabidopsis thaliana landsberg
ggacacaggtaaaataacaatattatcattattattgaatacctttagccaagagggtacgttgcttttgtagccagttgctaatataatggcgtcaaatctctctgtttttccgttatcgaactcaacttcatgtcgttttaaccttcttatccccgaacacacctttttaccattaacaaaatcaactatcacaatcagtaaactggtttttagtatgtattcatatcatatattctttgattagattatacactaccttaatgtctccggttttgattttggctagcgtgccaacgtcgagaaccggagttttaccggagatatttttgagctcgagtggacctaaccggggcctgttaagacctaaaagggtagtatccccgaggatgaaccgggaaacaaccaaaaggaaacggtcaacaagccggatgggcagccatttcagtaagaacatggacagcccaaaagttgaagtacccaacatctctcgtggtaggacgtgcaccttcacaagtaaaaagaaaacataattagcaatacagcagataaataatttggatgagaaaatcatattattatctattagtttatcatgaattataatattaagagac

SEQ ID NO: 14365 - DNA, 671 bp, Arabidopsis thaliana landsberg
atattttgtagaattaatggatcagtttcttatattattgatcgtatgtatcattttttttgtccattactcttaaatcatttttcatgtaatgattttgacccttaagttactctcaagtctctacaatccaaaattttcactcgtccttttttttttttgaagaaactttttaatgcccactaagttgtataagacgaagcgtctaagtaacgtagatagaatatcactgttcgatcattcgtaaaccctctaggttgatgttagtttaaccatgttcggtggtggagagataaagaacctcgatcgtccattgacattttaggataaatctctttttcaaaaatgcaggaatacatttgtaatcctggtaggtgaatcggtggagcttctctccctagacgggcagatatattagttcagcagctggagaatctcggcactcaccttaatccgcggctacagattcttcctcatcgaaccaccaagaaaatgttgccatcttcatcctcgaaatgttgagacttgctttgtcaatgttttttcatagagcataagaattgttagagtactgatgaaacttgcttatttggtatcaatactctaaagaattgtgtgcttattaatttataatatattggagaaaaagtaaaaaaactgttatagaaaag

SEQ ID NO: 14366 - DNA, 509 bp, Arabidopsis thaliana landsberg
cgtttacatgtcccttgttaaagcatatgcatcatgcggacagtttgaaaaggcaaattatgtaagcatgcgtattatatgttctttcaaaagttctcgaatgattatattcatgatttagtgtaagagctcaagcttctttgttactttaggtgctcatggacctggaagttccggctaaggatcacaatgagctgaaaagtgtacttatatctgctctggcatcaaatggaaatataacagaggctttaagtatttatgaagaaattgaagaaactccgctgccccgtagagccaaaagctatcttatctcttatagtaagtttgaagtttgtttttcagtcatatttttttctcgttaattagccgactagtagagaattaataataacataacgtgatgcaatgacctcaaattatttttctgtaggagaactctgattcaaacgcagagctgggaacgttggttgaactcactcatgagctgcgtgattctaaatttggataga

SEQ ID NO: 14367 - DNA, 530 bp, Arabidopsis thaliana landsberg
gcatgggtccatgtatcacattatcacggatcgacatactgtaaagaaaaaaatcatattttctaaacgaattataaaatccagataataatactattttttataactaagcttctttttttgttgttttttttagaaaaaagttttatcaatggccaaaccagtcttggtaagaaacacagaagaaatgatgatgaacttagactttcctacgtacatcaaagttgctgaattgggttgttcttcgggacaaaactcttttttggctatctttgagatcatcaacaccattaatgtgttgtgccaacatgtgaacaaaaactcaccagagatcgattgttgtctaaacgatctcccggaaaatgatttcaacacgacctttaagttcgtacctttcttcaacaaggagctcatgatcacaaacaaatcatcatgtttcgtctatggagctccaggttccttctattccaggctcttctctcgcaatagcctccatttaatacattcctcttatgcactccattggctct

SEQ ID NO: 14368 - DNA, 678 bp, Arabidopsis thaliana landsberg
acaaaatttacaaaccattttcaacattaatgtagcatactgcaactacccaaaatcaataaaacatggttctgaaaagccaggtcataattttagtgttctcagggtcagcattttgttcttatttactgcttaacttgcataatattgcattagacgaatgattcagtttgaacaattgaaattgttttatgaatttggttttagatttctgcagcaaaccttttagcctatttcaattaattttttagaaaatgattttggctttaccatgttaacatgagttttgaggatgcacaatgtaatcttccgagaatacggtttctcagggtagaagattttgttctggcttgcttaaaactgcatctgtttttagacaaatgcaacaaatccatgtcattcaagtggtataacgtcaagagtttggatacattacgtgaaatattgtgtatacgcgtacatacaaaaattgacaacgatttatagtttccaaaaaatacccgcggcatagctaccaaatttcctttcactaaataacaattctttgaatgccaatctaaaaccataacgatcgttacctttaattaatggttgtgcgtgcgaacatcagtaaatgaaaaagactactccaaaaccaaaaactccctggaagataggataatcaataatccataaaag

SEQ ID NO: 14369 - DNA, 744 bp, Arabidopsis thaliana landsberg
aaagcggactaaacgtattgttcagtttcatatagcaataaactaattcttgcaattgtccgcttctagtgaaacacataggttgagggttagtgttctatcacctcttggtaaattcttattgtttgtcaaaggtattgtaattatatatatttcattgtttttttttatctaacttatatcattattttgtaagaggtgagaatgtcttaatgagtgaattttgttgttcacatctgtacatcgatccaaccttccctgagatagatatcccaaaatacatgtaaatccataaacattttgtattttttctgcagtaaccataacattaatgactaactatatgttctgaattttgtgttttccagccgcagtatcaaaggtgagaatgatgctctagagaacgtaaagccgatccgtgaattttaaaattacgtgatgaacttatttctattttatttatactttttttatatttctggttgttttattttgaactatgcttagtatttgaacttacaatatttctaaaactttattgcatctacgatacttcttttaatttttatattttataatgtttctttaatatatatattgttttcgaattatcaatgtttgtttttctgaagatgatagcttgaagcacaagttaatcttaagtgtcaaactcacaaaagttgaagactaaccaaaggtgatataaatcaaaccttggttgaattacttttgggaccacactca

SEQ ID NO: 14370 - DNA, 845 bp, Arabidopsis thaliana landsberg
aaactttcactcgaatttgataatttaagatcgacccatttattcgtttgcacgcatgaacttgcatttgttgctagcaccactgttcaccgattcttaattctccaattctaaagctttaatctctttttcttcagtttttaagacttggatctgagtttagatttttttagttcagatttgagaatttctcattcaaatcgttcagaggttacttttttttagctctgcatctgttgtgttaaggttctcatgtttaacatattgtttattctctatctggcaggaacctggaagattcttcagcttttctagactttgttgtgctcttcgtggtgttgatatgaagacttatatcttcttattagtgattgttcccacatgtgtactcgctggctatgtccacggtcagaagatttcttactttctccggcctttatgggaatcaccacctaaaccttttcatgacattcctcattactaccacgagaacgcttctatggagactctttgtaaactccatggctggggtgttcgagactaccctagacgagtttatgatgcggttttgttcagtaacgagcttgatatcctcgctgttcgttggagagaattgtttccttacatcactcagtttgtcctccttgaatcaaacacgacgttcactggcttgcctaagcctcttgtctttgctgctcaccgagatgagttcaagtttattgagtcacgcttgacttatggtactgttggtggaagatttgtcaaagggcagaatccgttttacgaagaggcgtatcagcgggtagctcttgatcagcttctgagaatcgctgggattactgatg

SEQ ID NO: 14371 - DNA, 526 bp, Arabidopsis thaliana landsberg
tatcgggaaagtccacatactgtgaggtttcagagtggtataaacatggcttgtgtcaatcctgagaatggagtggtaagcttttgaactaacaatattagtaataagaggatcttgttttgcaaaatattcatgttggttaaactgagcgatcaggttgatccgagtcgcttccttatgctttccaactggagaagagaattcacaatggaggatctactgattcagcttaaaaaagaaatgatgtcatcgcagaaccgcaagttagctcaacccttggaaggtaattttctttagtttagctatatgggattacactttcctaacccggtttagccgcactggctatgctctgagcaaagagccacatatcatagtttttctaaccaaaactgaatgtatcatcaggtaatgaggaaggcaggacagacccaaagggactagtggtgaaatgttgcgtgatgtgaaaagaggtaatgaggaatttataagaatttaagagaccaagcaatgtatataaacagca

SEQ ID NO: 14372 - DNA, 674 bp, Arabidopsis thaliana landsberg
ttggtcaaatatccatttttatattcttttgtccagatatcgttaaaacgtcgtcgttacaaagtgggccgaagaacccaacaagtatgattttgcccaaatttacgtggaaaccctaaacgctcgttttctcactaagaagtctcataaaccctaatatataaaagcgatttctgattcttccatcgtttctctcttgcaaaactctgtgtgtaggcggaactacagaaccaagagcctctttctaatcggagttactttaatccccttgaaccatggtaagcctcttctgcgaaaagttttcatcttttctccgattatctcagattggtttgagaatacatatgtagattttggttgttccattgtttcttcgagtcttttggagttaagaaaatatctatctttctttgttttggatcctgtagctgttgtttaattggatttgtgagaaaatgccatttttattgtctaagcttgtaatctgaatttgctatgattattagattatcattgagttcgatttgaagtgatattagagattgggtttatgaatcatgcgttaatgtaattcttgaagcgtaatgtaattgagtgttaatgtgtattttgtatagtcaaagagaaagactaaagagccaaaggtcgatgttgtgactcttggaccatctgtt

SEQ ID NO: 14373 - DNA, 619 bp, Arabidopsis thaliana landsberg
gtagttaaaaccctagcccagtctattaaaagattcaccgagtagtcttctagtcctgcgtatacttcttcttcttcgtttacacttagaagatgaattgtgcaagtaaggcactctttcttctctatttaccgatttagggttttattttgctttgtttctgtcggtaacactgtggtcttttctcctctacagtttccggcgaagttccgcaggagcctgtggtttctaagaagtcgggtttgctttacgacaagcggctaatccagacgcatatatccgtaagcaagttcttttcttttctccctcgttcgactcttatctagggttttcagctgtttagcctcttgcacctctctatttgctgcagatattttcttaatacagactttgttgtgataatttatagattgcttttggtaccttgtaggattatgggaaatgcccggttactggtgagccacatactcttgatgacattgttcccatcaaaactgggaaggtaatgcaaccactggagttatttgtcacacagcattgtttgtagacacttatttaagcgtgattcgatcgccgggaccattctgcagatcgtaaagccgaaaccattacaccgagc

SEQ ID NO: 14374 - DNA, 3054 bp, Arabidopsis thaliana landsberg
gctatttcatttcaatcatacaaatcacctttgctttcacctttggctggagcaggtgctacaggtcgtcgggttcccttgtaatcaagggaaggtgcgaaatcaacctcgcaatcagtttcaatgatgctaataccattagaaggctttgcctccactatgtctatgaagtatttcttattgttgtatgggaccataatgctatctccgaccgttagacatgaatagttcctcaatgcggtctccaagctgcagcagaaacacaggaaccggttcaatatacacagagtacggtattcgcaaagaattcaaagtctagatggagacaaaaatacaagagggggaggagtaagtcggaattacatggctttcgggttagctatatcgagaaagtctgttgtgtggggttgcagtttcacgtaggttccctttggaagagtgacatttctaactctcaccatgtctccttcttgcaacagcaaattctgcatcatctgcaaaagcaaacaatcgattttaagtcacaagatatcgagtatcttgtattggtgataaaaacaagctactgtttgttacccagtagggaatgtaaatcacgccttcttctgcgatgaactcaaggactccgcagtgagaaaaactatctgttgaagcattacgaagctcaaagagcattggataatcaatctgcaaagaagctgtaaacagtgatggatgtaagtggctctggataatcaaatgaaatccgaaaaagaagctggaatcattaagcaaaggaagaaaatgtacctagacgatcaagggctgatggtggcattataactgaaaatagatatcaaagaaatcaaattacaaaacttgagcattataaagagtaacataaacttggaaagacacattatttgtaagattaaagacttactcttgtcaccactttcaatttgaggctatgaaaagaaaaaagaaaaaagaaaagagatgttagaattggggttgtaaacattgcacaagttctccaattttacatatataagcatataaaataataagtaaggaactttgaaatcaaaccttatcaataaaggatgagggataacaccggtaagtctgctcaaaggtagttccatgataagcgtatccatcgtaaaactgcaattgcagggacactaacacatgagatggaagaacagttactagatagattgaaattactgatttaagagaaaagttaccatctttcaactggtagataaacaagagttaacgccaactgtcaaaaaggaagaccaaattaatagtcatttagcacaagtaagcagacgtataagcaagatcatctacaactcgcgtcgaaacgcacaaaacccaacctttcgattcctaaacgagtactccacaattctaacgaaacgaatctaccatggtgacacccaaacgtacaaatccgacctaattgggcttaaagcgcgaaccaaaacggaaacctagaattggaagcttccttctcgcgagaattgacaatcggagaaaacagagatagagagagagagtacctgcttgtgagaagaagaatcaattggtcgcgtgattcccgcaaggtaagtcgtatcgtcttcacgtctatctccttctttatataccgtatacggcgtcttacattaatatgggcttgggcttaagttctaattcggcattgggctttgaattattaacgacaaatgtgtgcgataaggaatgagaaactttgtagttaaccagacgcatgttaaaaatgatagttaacagacacatccacatgttcaaaatatatatatacgataggagtttgggcttctttcatcatctgtacagcccaatgggctctgttcattttaacgaaattaaactggtcgacaaatatatatatatatatatacacgataaaacccaaaaacaaaacagaaaaatattcaaaaaagtttcataaacaagatcaaatcgagtttttctggaattttattaggaaaatgataaacgatataaatagggtgtctcccacagttatcttactgggaacagaagaatccgcaacggtctcattacaaacataacagaagggtgaaaacggaacaacacttttgatgatgatgtgtggtttttgtttcgagaagacatgccacaaggaacaaaaccactgtgtctctctactaacctgacaaacaatataagaagatcccggctctatgaagagaccggtgaaaaggggaagaaagaatcatgcggacttcaagaaccacactcttttctcattcggctctggactgaccagctcgggaggacaaaatgatcccgacgatgagaccgtatagagcaagagcttcagcgaaaatgaggataagaatcataccaacgaaaagctttggctgttgagcattggccctgtcatcaaaccacaaatttgcgtatcaaaatgatataacaggggatagacactcacaattgaattgatatttcttccattatatttcatcctagagaaatacgccatggcacaagacatctcacagaagcatgtaatgaactgatatttcttccattatagattcaacagtcagtgaatagcacatattccctaccaaattttcatcaagttgaattgtgacactaaactcatgatattctgattcataagggagatatacttgtataaaattgagtcttttagcaaattaggctataagagtgaatctgcaaagaaggacacagaggatcgtacctgacaccagcatcgccaacgatacctatggccattccagctgaaagaccagctagcccacaagcaagaccagaagagagatgagcatatccgtcgaagaggtagtaggatttagccttggggttaatcccggtactgatgataacagcaataatcaaaccatagatacccaacacaccagccataacaactgggacaatagacttcatcaccaactccggcctcatcacacccatagatgccactcccacaccactctttgctgtcccgtacgcagctcccatacctttgtataacac

SEQ ID NO: 14375 - DNA, 527 bp, Arabidopsis thaliana landsberg
ctgattgctaacagttacgcttctatttatgtccattagaatattctgatttactatcttttgagcagccctagttattgctacgtgtatatattcatctatgtattataatgaaatcatcccttccacatttaccactagtaactagttaagtgcagaaatttcaaattcacaagcggatggactaaacatgccaataggaatgagcatcgtgaccaacagttttcgcagaatattgtaaaaccaactcgtttcggtaagaaaactcaaaggacgccgattccatctccattacgtacacctgacttttcataagggaacttcccacgatagctctctcccatgcaaggtttctatctcatcgtccaacgtgtgagatcaaatgcaatttccatgttttatgagaagaatattcacaaatcttgtcaaccaactttagtctttgattaccaagctaagtcagcaactctctttggctcctcacatcaaccgctacatctttaccacatttacttgttcataagtta

SEQ ID NO: 14376 - DNA, 964 bp, Arabidopsis thaliana landsberg
ataacctcgctattattcggaatttacgattaaatcaccatcttctagatatcgatcaaacaggcacaactaaattcaattatctcattagcttcttccaattcgaaaccctaacaaaagccctaatttacgaaatacgccgaatcgttgacgagaatggagtttgacgaatacgagtacctggagaagacggttgaggaaggagctgggtcgaataagaaaaaggaagagagtgggaacgagaggagcgagaggagttacagaaagagagaaggaggagagaggcagggcgaagaaggaggtgaagaagagcgggttagcagtcggagtaagaagtctcgcggagacggcgaagagaacggtggtggtaagagggatcgggagagagagaggcataggagcagcagagacaaggatagggagagggataaggttagagaaggatcgagagataaagagagcgatcgagagaggagtagcaaggagagagataggagcgatagagacaaaccccgagacagagagagaagagagagggagaagaggagcagcagtagatctcggagggaagagaaggaacccgaagtagtggacagaggaagcaggtttgttaaatttctctttcttctttacatgggcaagtgtttgaggaatgatacaaagttccgatgagctttctttagtcgtttaagaacggttttaaatgatttcacgattgcagaagacacagggacaagaaagatgagcctgaagcagatccagagagagatcaaagaactgtttttgcatatcaggtaagttcttaaacatttgggtttaataattaggggaagacataacccacattgttaagtttactgattacgttaaagttaaatcttgttttattattgaacagatgcctcttaaagctacggagagagatgtttatgagttcttctccaaagcgggcaaggtcagttac

SEQ ID NO: 14377 - DNA, 901 bp, Arabidopsis thaliana landsberg
  unsure (1)..(901): unsure at all n locations
tatctctttactatactattaacactctgcaagtcatactttatatgataatttaatttagagatttatacatttatttaaatacattaagaattaactaaaactaagaatatataaaatgagatctgtaataccatttcaataaggtgatttatctagttaaagtcttaactcttaacttctctataggatgtaggatgtatttattactttcatactaactacactcacgcacaaccgaatcttatatgtttatatatcagtttttcgacctaattaataatctaaacatgtgtttggctcggatcatcatctaaactcaaaattaagttaaatttgcaatggaaacaatagattgtgaaatcagcttacttgtggatcctgagacttgcagtatatgtttcaatgatgatttcaaatctgagcaaatgtattatgttgctttatgcaatcataaattctgtttggaatgcatgaaacgggtatagaagtgaggcttctagagggaactgtaccgatatgtccttattatcaatgtgagtctaagctgactcttaaaagttgttttcatattttgacatctaaactaaaagcgatgtgggaacaaaagattgaagaggaatccattccagtaacggagannnnnnnnnnnnnnnnnnnnnnnnnnnnnnnnnnnnnnnnnaaaatcgagctctctaaatctaccttagaagatggatttgtgagatgcttccaatgcggggagcgcttttgcattaactgcaaagtttcatggcaaagtaacttgtcatgtgacaattgcaagaaattgggtaataatcgtacatcagatgataagatgctaaaagttcttgcaaatgagaaaaagtggcgccaatgtgaaaagtgccaacatatgatc

SEQ ID NO: 14378 - DNA, 1022 bp, Arabidopsis thaliana landsberg
ctttcttcggtcatatctttaatggggtctgaagagagaatgatgataagttcttcttcagttctagacgaagagtatgaatatacagatgatgggtttcattacgagacaaggcaaaacagtttgtctagattatctatctgcacaaactccttccacgaagacgaccaagatcatccttcagaattgggtaatttcttctctacgttgtcgttagagagcttcaacgacgacgtcggagccgaagctgacgtagaaatctccgatgacggtggcgaatcggattccgacaaagactcttccggattttactctctaccgacgatcacatctcgccggagaagaaaactcacagtttccggcggtttagaaacgagcaaagagagtgagacgaaagtcgatgggagtaagtgtaatatagttagtcaacggagggtattaagggaaaagagtaaaagagggaatcagtacggtcactggtttaacggcgtggagagagacagtgacggcggaggagagttgacggtgttaacgaaggtgaggggagggaagaagaagtcaatgaagatggggtttgaagaagtcaaagcttgtagagatctcggcttcgaactggatgttccgggtcgggtttcagggtcaaaccgtgaaactagtagtggcggcaactctcccattgccaactggcgtatctcaagtcctggtaatttattatctaatctcacatttacttttaattttcttctctaaaaagagaaaatattattaattgtgtgattaatatatgattaggggatgatccgaaagaggttaaggcgagattaaagatgtgggcacaagcagtagctttagcttctgcgtcacgttaagcttcttattattactctgttctgctctgttagggtttgtctttcaaaattttagctttttgttcctcaagtcttttcttgtatcggtaactcgtttaatgggtttgttgtaaatatgaatgaatatatgatcagctacacattacttgtaaa

SEQ ID NO: 14379 - DNA, 576 bp, Arabidopsis thaliana landsberg
acttttacatcattccttgaatgtctaaaatgaagaaacatcatcatcaccaatttaatgagttatccttacccagttattaaaactcatctcacatgcccaatgatcaaatcaaacaaaaaaaactagctaacgaaaaatttatcttctctatcacccatctctggttatttttttaagaagaaaaggtggctagtaaaaacttcatccaaatgtgttattttgtctgtacctagcaatagatttacatccaagctaggattaagtttccgacataacagagagaaaaataaacgtatttcacgatgatgttttgacaaagatcatgcaattaccaacatagcaaccacgtttaatggaaatttcttacatttattatagattgcatagcaaagaaattgctaataagtaccatcaggaagatacaactggttgttccagcaattcaacttgaatcttcattttcttgttctcgttcatcatcaacatcattctttttttctttgccacaactatataaacttaaaaaattccttataagaaccgcttagacattgacagtagatggtttttttt

SEQ ID NO: 14380 - DNA, 509 bp, Arabidopsis thaliana landsberg
tttacttttacttatacacaaggcctggctacttttcactgccattatgactatgacgtcaacaatgtccttcccgcgcaaaaatactacactcgggttgaaaattttttggattccaaagatccagatgcttcttatgatggtttaatcagcttcacagagattggcaacacttttacatcattccttgaatgtctaaaatgaagaaacatcgtcatcaccaatttaatgagttagccttacccaataattaaaactcatcttacatatgcccaatgatcaaaatcaaacaaaaaaacctagctaaagtaaattttactttctctagctatttttttcaccatcataactcaagacgacgtacatcaacaatgtcttactctcacaacaatgcccctctcattgtgggttagtcagcttcccacttaagaattcttagagattggaaacattcctagtattttaattacatgtaaactttcacttttctacaattacaatcaaattta

SEQ ID NO: 14381 - DNA, 780 bp, Arabidopsis thaliana landsberg
ttttttataatgaaaactcattcttctattaatgaattaatatcacaaagatcatcttactaaaataaaaaattcaatggatcaatcagaatttcctttcaatatcgaagcttataaaagataatttcatattgaagtgaggtatatcatcaactggattaaagtgtgtcacaaaaaaattgaagaagattatcttagagctccacctcaagacaacctgcaaagaattctgcgtgttagcgagttgtgggggttttcaaggatgattgggagtattgattgcatgcactgggaatagaaaatatttcatacagcgtgggaagaccaatttactcagggagataagggaaccaccattgttatttttgaagcagttgcatcccatgatcaaaagatctggcatgccttttttaagtgtccaggcacattgaatgatataattaaatgttttagatcgttcacctaatgctcaacattgcatattgcataatatgattgttaatgatgaacgagagacatatgctcaacattggtccgattataatcaatctgaggcaagtggttctagtacaccagaaccattctcaattgaggtgttaccagaatttgcaagtcatgtgcatgctagatccgagttacgtgattcaaatttacatcatgaattgcaagcaggtctagtaaaatacatctggacgaaattcaaaaatttatgagattaaaaagatttttatgtctctaaatcatttattttatttcataatggtgatatttttttttttc

SEQ ID NO: 14382 - DNA, 821 bp, Arabidopsis thaliana landsberg
tttagaaatcataaagacagagagatttgtatcagaataaaaaagagataactcttgtgtttatagtagattctgtatatgaacaaaaggaaaatagtataaatcaatttataagacttttacatgataaatcatcaatgttgactttgactagagtcaacaaaaatgacgatgcctatacaaagaacaagggacgagtagacaagagccgtctctttaactgtctccggcattataatgacgatattaccctttctcgccgccgtattcgtcctccaactcctctcaactctcacggtcgcggagatcaagtctttcactatctccaacgattctcggccagtgattctcttggagaaattcggtattattgagattggtcatgtaaccgtctctgtttcctctgtttcagtatcgtctccgattctagactcgtcgaaattagggttctttgttctatcagaagaatctcttcctcatgtactcctcgagctccagcaaaactttagcttctgcgttcttgattcacactacatacttcatttcttcaccttcgtcgatctctctcctcctcctcgctcccagttcagtaaatcttatccgataacgtctccaaacgattactctctgttcttcgctaattgcgtaccagaaactagggtttcgatgaaggtccacacggagatttatcacgatctatatccaaacgggtcaagagattacttactagccgggtcagcccagttaccgggtttgtatctcgtcttttttctctgttacttgagtttcctctgtttctggctctgtttctgctggaatca

SEQ ID NO: 14383 - DNA, 809 bp, Arabidopsis thaliana landsberg
  unsure (1)..(809): unsure at all n locations
cgttccaaaaacgaaactattatttcccatataggtgtcttgcaaagcaagcaatcagtctaagaaattctttgcgctaaggagtggaaaaaattcatgaatacatgataaatagtaccttcaagttcattgattatcgatatgtctcttgaaataagcagccagtttatcaagatccccaaacattcttttcctgaacttgaatcccttagggtatagaccgatgtactcgtggtgcggatttgcggatcgtatgtaagacaatataaagctccctggatgttcatgagaaacaccaaaactgtaaactaccattttcggattcacacccttctcaacccgaagaagatcatctatttccgattttgtcccagtccgaaatttccggtggtttagcattgtcataagatgagttaccaaaggatcaacataccgatccattacctgaaatattgaaaacgcataagtattttcacttgtaccaaaactgaaattttgtaagaatataaagacgaacctcatctagatcctcgaaggtttcattcccaattttcagtgttttcccaatacgttgtaagctcactatatctttgttctccttctcaccttcgattatctccttgttagcatacacattatcagaaatcttgatcatcaaagtcaaatgattcagtcnctcgtgagcttggacgaacaatgctttctccaatattcttatcagacaaatacactgttgcttgctcagcagtgatgttctgaaaccgaggatgaacaatcattcgagacttaaactgcttcttttctttagg

SEQ ID NO: 14384 - DNA, 725 bp, Arabidopsis thaliana landsberg
aaaaagtgaccgtaaatatttataatttgaatatatgtttcaaatttaatataactgttaaactttaaattatgcaaaaggcaatttatttacatatataacaaaaaagtagctaatataccaactactttttccgtctgataaatgcgaaattagataacataacttaaatgccgacacatttaatcaagagcgaaagaaaaacacagtaactcagtataagaaccaagtgtggctaaaggcaaagttggagagtaatcatgtatactatgaaaaagggaaaagacatggtgaaagaggagcaagaaacagcggtaatagagccacttagcccggtttcacagatgtttgtttcgccgagtctctactgcttcattattttcactttagggttccaaactagatgcaacccatccaccattgttgaaggtgtcaagaacacatggatcaagctccctcgcttctctagcaaagtggtaaagcttatatatttccaattgctttgattgttacatgtaagaacgttaaacgtacaagagaatcttaagaatatccataactatgattaaaaaaaaatagacttgaatatacctacctaatacaatatttccttaataatactcttactcttgatggtgattgtcctttttaatattcctgtcaacagtatacattatataccaggtgtaaatcggaaacagtcttagctatataacaatgtcttt

SEQ ID NO: 14385 - DNA, 930 bp, Arabidopsis thaliana landsberg
aggtcggtgaaagaagtggaagacatgatggtctttaataaaggagacaacttttttatttctaaaacagaggattcgctaaaaaaggaaacttttttatgaaattgatctgtgaaatgaaaaagaggataaaactaataaagaacagaggcttttagattgggttaaagacgacgacggtggcgtattgagcaagtttttttttgtttctctctcttcttgtctctttctactttggcctaaatatcatttttgattttaatatttctataaaatggttgaccagtaagatattcttttttgatgagtcgtctcctaatttgtgataaatcgtcaagtgtgaaaccgcgtttcaagggtctctttcaatgattaaaccaaaaccggattaatccgttaaccaatagaaccgttggttggttatacacaccaggtttggttggtccagtactatcgtcttaaaggacaacaaacaaacaaaaacaagactcttatcatttcttggcgaaagagatgaccattggattctggggagtgattttgaaaccttgaagaggttgcatagctatggaagcttgaacatcatcttcgtactctacaaacgcgattcctggttttgcgtcgatcattcttatctctttgaatccaaggtactgttcgaagagaagctgtagcatcatgcttgttgtctcgtgtgggagattctgaatgaagagtatgttgtttgatggcattgtttcttgcccgctcggctggaacgaaggctgcattaagaagagcagagataaaacgcaaaacatcagcatcatctccaaataacaatagtttggttcacatgatccaacaatggaagatttttttgaagatgaaggtgagaacaagaacacttaccgcagggactccgttattggcacttggaccattagcact

SEQ ID NO: 14386 - DNA, 655 bp, Arabidopsis thaliana landsberg
aaatctaagtaaatgggtagaaactgttaacatacaattatgagtttggggaactaataattttttttcttgttcttttaatactttaactagcgatagattttatgacaacaacgatcatgtgattctagtccccaacagtattcttctatattagtaacttaaatttcatatttttgtatgtgtggtaagtttagtaaagcacagtaattaataaaggggtgtaaaaaaataggaaaaaagaaaaaaattaaaaattaagggagtgtattgtagaaagaatttggagtgatttgagttttattgagttttgaaattattttagtgaattcgaaaatttgttattaaaactgtttaaaatctacctcaaactatgagacagggaatgtttgaatttttaaaaattcattgaaatttcacccaaaatctctcaagtcaattcaaatccactatttaaaatatttctaataacagcagatttgattctagattttaaaattattaatccaataacacttgattttagaaagctttttagaattcatgtttgaataaaatatatttttcatcttaatacaaatcattccaaatgctatattgaatacatcctcctaaatgtgaagggatttggtgttaatttggttgacaaggtgag

SEQ ID NO: 14387 - DNA, 391 bp, Arabidopsis thaliana landsberg
ttcgcctcactcctcggtaatgtctagcatctacttcttcttcgaacctctctgcctttttcacactttgatcagtctcatatgttgatgacgatgaattcagctctggtgatgatgatgatgatgattccccttccacttgcaagaactcgttgacgaaagaatccggatcaagaactggagaatcaggttcttgtttaggaacgtgtggttctatacaccaaagtcctgagacaaaagaagcatcgaagtcaaaatctcccatgaaaccatcacaaaccaacaagtcttctaagagatggctctgtatagcttccaaatcagagctttcctcaaaactcgccatttttacgaaagagagaaagaatctgcaagtgatgatggaacaaaa

SEQ ID NO: 14388 - DNA, 807 bp, Arabidopsis thaliana landsberg
ccccctttttttgccttacctaggagggatgaacttttttttctgtggggttccttaaaggtgaattgatcccagttttaatagcagcgaaaagtttccagttttgagcttaagactttggatctgaaagaactagaaggtctttctttgctcaaagaagtagaattgccctgaaaacaccttggtcttgtagagagagtaaaaataaaacaggaaattgcaatgtaacagaaatgattttgatgcatttacctcatcaggagcaaccactgacttcaagttctccactttaccagtttcatctattacagaaattgatggaacaacagagtccgcctcattactagacacctctctactcaccgctagtggtacttctgaatcaacgagaatatccttaggtatatcagaaacaatctcaacactatctttaacctttgcttgttcaatcctcttcgtctgtgttgctgctttccctgaagctcggttcttgaaatgagcttcaaagaaagctttcttctctgctacagaaccaggtttagtaaacctctcaacctcttccaagtaacgattctgagtaaaagctgaccatctcgcccacgctagtgtttcattcgcatatctaccaaacgatactgattccgtaagcactcgattcggtaccacctgccaaaaaccaaaaaccaaatctcaaattctcttcagcttcatcaaacaacacactatacacgaaatttcactagcaaaatcaatctctaatatcaaaaccctaaatccaagattgtagatttagaaatcttaagcact

SEQ ID NO: 14389 - DNA, 127 bp, Arabidopsis thaliana landsberg
gcagattctattcttcagctgcggttgatagcccatcctaactctcttgtttagtgtgcacggtcccagtggtatatggtctggggcaaagtacctagcactaccatgtcaaataagagatcaattg

SEQ ID NO: 14390 - DNA, 731 bp, Arabidopsis thaliana landsberg
  unsure (1)..(731): unsure at all n locations
aaaaaaaaaaaaaaaaaaggaaaaccagagaaattttgtttactgaccattcaccgggtgcgtatggggtatatatatatacgatgcacatgtaattatatgaatataaaaataattatatgaatatatctaaacgaagaaaggttgactaaacatatagacttacttatctaaaaaaagatattgtaatcaactaaatcttgcttgttctataatttatggttcaacggcaattttaagcaaaaacggttaacacattttaatttgtaagattaacattataaattttatattggtgaatcgtcatcactaacaactacagaactacagagacataaatgagagagcaagatagcagaaacacggcgtgatatagtactcaactactcacaagcaaaatagaaaccaaccatcaaaactttgaaggtgcaaaagaaaataaagactaagtaaacatatataagcgtatcgatttctattggagttgaaaataggattgaaatgtcactctacaggattcaaacgtgggggttgttgcctgtcggttttttttttttatatagaatttggatgatacgttgggtgtcatgtttcttggattgagacanactcggaagcatcttcatgaaattggaaaaccagtaagaaacaactggtagagttagaaaccttaattngcttatgtgatatataagaacttcaaagaattaaaacaaagaggacttgtgtga

SEQ ID NO: 14391 - DNA, 594 bp, Arabidopsis thaliana landsberg
tatatcatttcttgttttcgaacatctttctgtcgcttatatatatactacctttaaagttagagagacatattagaaaaattgtgtaaaattttgttttaattcgtttcgttgtacaataatgtagaggagacgcaagagacattgagagatgcccatgggaagtgtgtgacagcaacaacaatttcatctacgctgttttctacctcatacggtttgacaaacaatggtaattaacaaattccgttacattaatacatggtcgatctcacactgaatattaactcactcctcctttatgtttcgaatattcaacggcgcattaggtattacattcaccggctatccggtcattggaagccaaaatcgcatgatgtcgtcaggatcatgtctagatggtctggaagataaattgacctcagcttgtgcatgggactcacgtgttaaaggcgtattttatcatcaaacaacgttcagtattcctctcacacaagttaaaagtttcatcaacgacatcaaatctcttctcaagatcgattcaaaatctctatgcgggcttgaactctactatggcatcctaatgcgtatgtcaca

SEQ ID NO: 14392 - DNA, 832 bp, Arabidopsis thaliana landsberg
aagcttgtatatgggaattttggcgacaaaacattatatcctttacgtatctacttgaatttgcacgcaactgggttcacaaatccaaaaacttaacagaaaattgggggaaaaagactgttagcaacatgagatggagcagtcatcgctacacttttgctctgtacagagaatatcccctcagagtttcataagtcgagttgtatcctctgctatccatcttagtaatacttgagagcttccttaactttgcaagttgcaactcaacctgcccaaataaaaaaaaagataatgatttttgcactgttctcattgaaaagggtgaaagaaaacagattcattagcatataatacaataccttgcagagattgcctctggcaacattgtgattcctttcctgaaagaaccaactgtttgggccctttggctttgacagaagcggcctcagtttcccattccacaacacaaacctgggaatgggaaacaatatctacctgaattacgcacacaacgacaaatgtaaatccactaaaccaaaaacagagcttctaccaaaactcttctagtaaacttgcaaacaacgacaaggcttaaatccactaaaccaagacagagcattctactaaaactcttttagtgaatttcaaaccactaaactatcagatacaagacaatttgttctgtagataactaatttttgctttcgaaatcatatacattggctcaatttaacgcttcatgtaacaaaatcgaattaagcgaattcgatcgaaaccacaataggaaaagggaaaaaaaaaaacattttttctcgcgtgtcaagatacatac

SEQ ID NO: 14393 - DNA, 959 bp, Arabidopsis thaliana landsberg
attgacattcagttatgggttgtgtatttggccgagaggcggcgacaacaacaacagctgaagctaaacaagctaagagcgctgaggctagtagtggagtagtagtagtaggagagagtagtgtgactaagagtaatggagttattgctgatgatgtagagaagaagaagaatgaggaggcaaatggtgataaagaaaggaaatcatccaaaggagatcgaagaaggtcgacaaagccgaatccgcggttgagtaatccttccaagcattggcgtggtgaacaggttgctgctggttggccttcttggctttctgatgcttgtggtgaagctttaaatggttgggttcctagaaaggctgatacttttgagaaaattgataaggtgattcatgaaaagactcttactttgttctttctgtttttgttttgggtgtttttgaagtttctcatttggagatatcttgtttttgatgtggtagattggacaaggaacatatagtaatgtgtacaaagctaaggatatgttgaccggtaaaatcgttgcgttgaataaggttcggtttgataacttggagccggaaagtgtgaagtttatggcgagagagattcttgtgttgcggagacttgatcattctaatgttgtgaagttggaaggtttggatacgtcaagaatgtcttgtagcttataccttgtatttcaatacatggatcatgatttggctggtcttgcttcaagtcctgttgttaagttctcagaatcagaggttagttaggcgttttagtatctcgcattctaaatttataggctaataatattcaggcgttttttaagatcagattactcttttacggtgcaggttaaatgttagatgcgtcagctgatatctggtttggagcattgtcatagtgcgtggtgtactacatcgtgacatcaaaagatcaaaatttcttattgatg

SEQ ID NO: 14394 - DNA, 689 bp, Arabidopsis thaliana landsberg
gttatagtttgactgaggcatgtgttttaacccaaaacatcttgccccgtgtattccttctagttagttacaattttctcgtttctttacaggtcaagattcaagaagatcaatttaaaaaagaaagtaaaaagcgtgcagctcttcttgcagaccctggagttgaggtgaggtttttataaagtagaaaaagaaattgccatcacatgccttgactatttaaaaacttttcttagtctagttaactattatttatgtgatttctggtaccattttgttttagtgagtagacaacttgtgtatggtgtctgggagtacatgatatctgcctatctgagtttgaatttgtctgttgtaaaacttacttcatcaagtaccctgtgtaaggaaaactaaatggagttcacaagtgaagggtagctaaattcatctcagttatgtgcgtctgtgatggctctccatgctgtcttgtttgttaattttattaaaatgtgaatgggatccaacgacttgtaagcttggtgggagttatgctttcgttctaatgcttactgagacactagccagataatcaccaggcgaacttggtggatatcatgcatgttgttaccttcatttatcataaagggaaataccatgtgcatgcttggtagtcttatatttgaccatggcaggacgtatataaaact

SEQ ID NO: 14395 - DNA, 756 bp, Arabidopsis thaliana landsberg
  unsure (1)..(756): unsure at all n locations
ccactaaagaaccgttgtgccgtttttgctttgggtgagaggatacaaattataaaggtattcatcatttatccagtgattatattttttcagaccattgagcatgatttggcgaattcgttagttccacgttcacttgatattttcctgtatttcttatcgttgactcggaggtattatatcgcaagagtttgttaaaagacttaagtttcactatgtatgatgtaggaaattgatcaacctgctttgatcccgcacatagcagaagccagctctctcaagtatccttatgaagtgctcttcaggagcttgcannnnnnnnnnnnnnnnnnnnnnnnttctgagttctgttgatctttcctcttttctatttgcgttattgtttctcaccacccacccccttgttaacgtcatttgttttcatttgacaggtatatcttttgtgaagatttctttggtgaacagtctatattttatgaaatatttgcgggtaagttttaatctttcctcctttttctataccaaactttgtagtcagaatagttgttacaaatttttatatggtacttgagtagtgtgtaagaaatattgtcttacgcaattttttcttggataaattctgaattctccatgacacaggcccattctctgttatctatgagcacttggattccgtcctctcaagctgatatgatgctatcggtttgctgcttataaaacgcattatacaccaccaccaggtaacccaattattag

SEQ ID NO: 14396 - DNA, 881 bp, Arabidopsis thaliana landsberg
aatttgacaaatttgaaagggggagcgatatgcaattagaactttagacaacgattaatattctacattttatggatttgttatacatgttatcatatattctaaaatactttttgaacttagggcctcccaagcataaaaagcaagagtactactacaatacaaggctattgaaaacttgaaataaaatgcatggtatacatgatttccttatttttttatttttttaaaaaaatatggaagttcaaactcaaataccttacatctctccgatggaggacccacatcaagttaaattcatatcttttgaagaagagatccctcccaacgtatctcgaactcaatacttccacgtaggaggagattttaccaataggtcaacagcacggtggtttcaatttcttttttgctaaacaagataagataaacttttattttataactttagtatagaagatgctttcgttttacaatgtcgaacaataaaacatgttggtggtcgctatcgctattgctaactattgttgtgaagcgaagacgacctaattaaaaccacataaaccaaagtaccaaagctactacagcctgtctggaaaacaactaagacggcgtcgttttccgagttaaaatcgtaaaaacggcgagaaaacggctggtcgtcacttcacgatgcgttggcacttaaccgttaaaacgagtcacgtttgcaaaccccacgcgtcaagtaaacttcaaccgtaggatttctttacttaaaaatccaacggcttcaacgcgtttctaaaatctgaaacgctgaaacggaaagtttcttcgtaaagtcccgattctaattttttttcctgtggagaaacattaaaacgaaatctagtgtttattta

SEQ ID NO: 14397 - DNA, 563 bp, Arabidopsis thaliana landsberg
tctttgatgtgattattcgctgtaatttgttacttcttttgtttatgtatttatcgacgtaattaataacttttagtcaaaataatccaataaagaaaagtttgaacgtttgtttcggaaactaatattattcttttccttgtttaactaaatgactacgttctccaaatctctgagtataaatgcattatctcttccaaaaaggaaatactacaaacctaaaacgtttacgttttgtaagtcattcattataacattttaaaacaaattcttcctattgactgatgagatctaatctacatttttaagttttaactcattataatatctattctatttttgaatttcaaacatttcttcataatacatgtatctcatcagtcaataggaagaatttatagattaagttataaccggtaacatcttaactaaccagctagttccgtgctaaacggtaggaagatcaaaggatcttaaacttttccggcaaatatgtttactaataacaagaatgatcattaatctgcttctccacctaatatctatgtctttctaatggactg

SEQ ID NO: 14398 - DNA, 506 bp, Arabidopsis thaliana landsberg
aactttatgcaaaaaacctacccgttcttcatttgcttcatctcatcttcaacattgctatgcatatatgtttttgtgttctcctggatcaacctgattagacaacctgggaagctatggaggacaatgtctgatgatatagtgtctgtcattcttattgtatatacatttgtcgctgtctggttcgttggtggccttaccattttccacttctatctcatgtctacaaaccaggtacattccttacctttatcataggaccacaactaaatctttttagcttgctttagccttctgagttttcttgtgttgtgtctgttttgcagacaacatatgagaatttccggtaccgttatgataagaaagaaaatccttacaagagagggttactgaagaatgttaaagaagtactatttgccaagatcccgccttcgcaactagatctcagagcaatggtcccggaagaagatgacatgactatagcatctaacgattccgagtatgag

SEQ ID NO: 14399 - DNA, 751 bp, Arabidopsis thaliana landsberg
aatcttggtatttttttttttgaatctaatgttcagttatattcatagaaaaaataactagtgcatcgtgtatttgataaaaaaattaaatagacttgctaactttctcgaaaaaatttaaaatgaatcaaacgcgagctcagagccaattttggaaagttgtatcataacgtctatccctcatgcctctaatggtggtgatctgatttttcacttgcttatcgatccagctgatcaattgagccgaggagtttggtggttctccatttcttcgttcgttacgttctctctagacagtgtatactgtagcttgaaacgcgtagaggagaaggaagccttctacacgatcaagatggggagctgagacatgagccaaaatctggggccagcttgtcgtgaatctcgacttccataaacctttcgctagggcagcccaacagtttctaattcaccttcttcctcagccataaaaagagtaccctctcgaaatcttgatatttcataaataccacttaagtttttattttctataaaataccttaaactctaaccatattccctaaaaatataccgtaaatctaaaacagtcaaccctaatctaaaactttatattctcaacttttctgtttgtggtatttttggaaaccacataattaaaatcctctttcaagctgcaattttcgaatcatgctaacaagtggacatgtgtcgaactatgtatattcattcaaaactaaaatttgaatcttgg

SEQ ID NO: 14400 - DNA, 652 bp, Arabidopsis thaliana landsberg
atagtaatatatataagctatttagactgcattgactcatgatcattgtctaattgttctacctcagaggcaggctcatcttcttcatcaaacccatcaattccgtaggctccatgaccattcccaaaagccttgatgtgatctttgagagatctcttgtgcttgaaatcagatccacatatgcaataccaaagtttgccacaattcttctcatgtgttctccagtcccctcggactgcgaaagcctttccacatttcctacacatgaaaggtttgatcccatgttttctcttgtaatgtgtttgaagggttctgaagtctttgagaggctttgcccttggatggtcaatgttgttgcgacagcctggggcgcagcaatagcacggaagccttagcattcctgttggttgtgttccccttagagattcaggtccttttctgtattgtgatccatgtccccacatatgcatctgtaaacaaaatcatgcatgtatatatgatcatcatgtagggtttggataacttatagtatatgttcgaaaagttctaaaagtgtgagtcttgaaactttagcttatgatatgtgcattagcagggtgaatagggtgtgtcttctatatgaccacgtgaacactttggcctgcatacatag

SEQ ID NO: 14401 - DNA, 609 bp, Arabidopsis thaliana landsberg
ataccaaaacgagattaaaacaaaatcacacattgtcgtcaacaagttgtatgagtccacaaaaagaaatggttgactaactatgttaaagttaatgtggtttcctgctcaaatttaatagtctaagtagtttatttgaatttttttagccttttagttcaacactaggtgattaagtgtaaaaataagaaatctacacaaaagaaatcaagtactcctaaccaaaacaaagatgatggacaagttttgaaaaagtttatgtaacacttttttggtgaatgtaatattactcttatgtaatattgatgatttgtgaaatataaaattatatatataaatatatatatttttaagtaaatatattctacaaaacgtggttatatatatatatatagtgataaaaatcaaattagatatatttattcaacgaaaaaaattacaaaatagcaacatcattaaacatgtgttaagagaaaatatatgaatatatgaaagcatttgattagctttataattaccccacgtatgattgcatgtaacaaatattctcttgtctaggttacaaaatgccgctaatagtgtttacaaaaatgctattaaataccttgt

SEQ ID NO: 14402 - DNA, 704 bp, Arabidopsis thaliana landsberg
ctgtaagtcggcctatctttcatcaaaagtaaaaaagtaaaaaagctagtcgttagatttaacatgtcaaaatcacttaagatgtgattatataaaccagtaactaacgattcaggttcagtggtattggcacaacagaaacatttcagttttactaaaagaaatccatagattaccatctttatagcttgttcaggttttaattcgccattgagaagtcgtgtagctagcactcttgaattctgtaaacaaataataagagatcacaactaaagactcaaattaaacgagtaataaatgaagaaactaaaagcttatttcaatggtaaagaaactgagaacatctataaacaatttattggagacaagaatattagtgtacaacttacttggatcatgtaattaatgtgaaccaaaatactattgatgtaagtatatatacaatatagtcatatatatggtgtatttagcttattttaaaatatatttttataatcattaattcgttagatatctcttagaccatcctcatcgcacataaaaaaaggaggtctttaaataaaaaaagaattaaaaataatgaaaatgattatttagtacacaaacaggaagacccgtgtctctaagtaaacattaaagacattatctttagtgaggaggtctccatgtgtcaactgttgaatagataaaaatttcaatcaaat

SEQ ID NO: 14403 - DNA, 465 bp, Arabidopsis thaliana landsberg
agcatcgagcaacgtagactcaaacaatctggctaccaattcctagtcttagtggtaggaaagtataggacacgaacgagccgtagtagaatgaggcaaacaaaatttaggtttgaagcatcgggtaaattcatttttcatagttcatcattagagttatgtttgtgttttcattcagatgatcttacgtaatgttgtcgtaatttcaatgtaccaattattgtatctgatttaatatcaatgaatgaaatagatgtaacaaaaaataagatacattgactaaaacaaaatattcttaattggaagaaataacatgatgaaaataattcctcccttagtggtattggatggattgttggttctgacctacgtttgtttaatcatggattaaagagccttcgacagtgtttatctcattatcatacggagtatgaggctatcttgtgggcaatgagatcccttaca

SEQ ID NO: 14404 - DNA, 651 bp, Arabidopsis thaliana landsberg
  unsure (1)..(651): unsure at all n locations
gttactataataagttatggaccaacggtattgtcatgtatcataatatactatgtagcatacgtgtattgtatcaattaatgaagcaatagagagataacatactgaaacgtccacatctcgtttacaaaaatatcgtctacatgcttctctttggctggacatcccaacttttctcaccgtaaccagtgaaattgtatcatttagtaataattacagatcgagttagatttattttgttttacgtgtgtgtacaaatcaatacttatacaatttttacgtgtataacggcacgcctcatggcttttgctaataaggtccaagtagtggacagaaaagaacttgtgattgaatagtgttttgcattgaaaggttaaaacgtgtttccaaatggatttaaccaaattccaacatgttcagtgtcgtatatgcgaaaacattattgagtaaaatcagttccagtatactttgattttgtattgattccatagagtagaaatatgtgctttatagcttatagttaaacactatcttcaaaggggtaatgctggatttgaagtatttaattagtccggttcgaccaaagcaaagttcaatcaattttgaaaaacaatcatttgggtatagctgcaaacttcccaaaccncaagt

SEQ ID NO: 14405 - DNA, 1147 bp, Arabidopsis thaliana landsberg
  unsure (1)..(1147): unsure at all n locations
acaatgagcatcatatattgtgcatagtaactttatttgttggttgtgatatttatattttatctacaaaattaaaaaaaaaatacgaagagtggttaaaaattttaaagataaaaaaacgtaagtcagaagaagattttcaaaacaataatggtgaaggaaagtgattagaaagaatgaacaaggtggttagtcataggccctagctattgtccgcaaagcttagtatttatgggccacccaataaaagcctttaaaagcccactatcaaaacgcagacgcagcagcataaaactttcttagaacctgtcacatgataattcttggttggtggataatagatttagctccgtcccggagaaccatggcgtcgctttgctctgcgaggttccttccttgtccatcgctcgatattttatctacgaagacgaagatatcctccgactcgcgctcgcttggttgctcttcgtcgcgtgtctttgctttctcttccgttcaccgttcttcttcgcgtcgcaatcggaatcagctgcaagttgtgtctatggctcctgaggaagaaaagctcactcgtcggaaccctgtcgattgtccaattgtaagttcccgggtcgagtcggttttatttcggatcttttaatttccagtttcacatttctattcgctgtggtaatagctccgattgagaataaataggttttggtttagagtttgtgatttgttctacatttctatgttcctgctgtttatgctttctttatgaatctacatgtgttaacagtcaaatcaattgatacaagtgtagagaaaagctttgtattcatggcttcaaagtgatttggtagctcctcatgtgttttgtttgcattaggtgggattagtgatcattgtttctttatagaatatgaatacccgagaatctacttagaatcataatgctttcccttgttatgttctttacgagtctcgcgatgttaattatgttgtgatctacttgttaggagtgggaaagaccaaaacctgggaggaggcctgacattttccccaagtttagtcctatgaagacaccattgccaccaccgatgccttatgatcctnncgnagaagatgaagaagaggaagagaagaaagaagagggagaagaaaa

SEQ ID NO: 14406 - DNA, 985 bp, Arabidopsis thaliana landsberg
  unsure (1)..(985): unsure at all n locations
cgaaagaaaaaaagatatattgacctttggttagtttaaattggcttatggtttgatcttaagttggcggtagtcacaaataactttaataataacacgttggattttaataaacaatttttctccatcgtagatttctaagtttctaatatagatcttttggattcaccattgaataagaacacatattcagacaaatcaaaccaaaaaccaattagactgttttttcatatgtgcctcttttgaaccttttttcttaaatgaacaagtctaggctatacatcccctaaccagggaccataaaattttatttcaattagactatttatcttgttgagctttcatttttgaacattgattttatatatttagtgttagaagagttactaatgttctcttatgtttttgtatcattggataatatcaatattatgaaagatgacgtgattgaatgtgtacaaattgtactaatgagtattgcctaagtaaactttttttttattgtcgatgtaagtattttttatattgacagataaacaacaaattaaatatcaaaataataaaaaatgttagaaaagagtttatagaaaaacttataccaataagtcaacctagcgttactagattcaagctcattagcaacataaagaatgggagcaatctcaacaacaagcgaaaaagaaacaagtccacttttgaggtaaaagaatttcataataatccatgaaaataacaattgaatacatcatagttttcaaatatttcgcaaatttgaaatttcagagcaaatttgaaacacacagcaacaacaaaaaaaagattttggttctcatatttgattttgacattacatcgaggttagttagacttcttttagactaacaatgataaataacttgtgaatcacatgcaagatcaacagttagatgaactagaanattggcatgaaaccatcaaaaagagatacttaactatatcaataaaa

SEQ ID NO: 14407 - DNA, 980 bp, Arabidopsis thaliana landsberg
gtaaaaacatattcacaataccaaaagaaatcaaatcgtaatgaaataactctacatgatctaatccaaaggtatatctcgaccagtaaacccatatgcgttttggagtaatcgtattccggtcattcttaatccaacagacggtttggagtatttggactaatcttatcatctaaatgggaagaaatactagtcgttgtcaacttgtcattatgtttggttaaatatataaaaatgcgtagcatatgaaacaacacctgttatagaataaaaaaaatcccacaagattcatcatatcttgatctatacacaaaaatgctcacaataaatttctagtttaatataatttaaaatttttacatttaatattgctttaatttaaatttcaaaattaattaattattttcgaaacaattaattaattaatgatcagatataattgacatatataaaataatcatttattgatatatatttttttaattagaagtcctacaaaattacaatttaacaatttcgtatatggagccaaccctttttttttgtttgagcaaacttaatttccattataattcagattgtgcaaatatatgaattatggtatattttatttttttctttgctgcggtgtcaaccctcttagtttataggatgattggagtcaataattttaaacagatatataataatatgaactatatcctcgaatgaacatatttatattattgaattatacattagcctcgacggacttaacatatatgtactcatcgattatttgagattaattagttcggtagactgcagagaacgaattaatgatggcgatgctgtgtcaacatcaaacatgcaactacatattaatattatacaagtcaaactcgttacgtttttgacctctcatcaggcgctgtatcatctggttcgttgcatgttatcttcccatgtatttgattttaaaggaacgcaaaacatacatg

SEQ ID NO: 14408 - DNA, 502 bp, Arabidopsis thaliana landsberg
ttactatttcaaatctgattttagttatgaaaaataaactcgtccatcggactggtacttatctagtaattaagaaactaacgtttgtgttagtgtcttttgcaaatgaacttttttaatgtagggtaaaggtaagataaataccaaattgttttttatcaataaactagtgcagctactatttctatcattaaccctcctctaacgacgatagtacggatccgtatggacgttagcgagatgttgtgttttgatttccggcaacagttctgaactcctcttgtcttccacttctctcccatcatattctctctcttggagttatacaaattgaacctagatctgcaattttttttcccttttttctcttttgccaacaaaagcttagatctctttaaaagttcttgttctttgaggagatcttaccattttacggtcacttctttctgtaatattttttaattagacttttttcttctttggtaaatgtttaattaattta

SEQ ID NO: 14409 - DNA, 633 bp, Arabidopsis thaliana landsberg
attatacatgcatgaattgtcgtttaaatgatgaaaaatttgttcccgcctgcatcttttgtttttttctgtctgcttttctttttgtagtcttttcttccctttaaggttctttagtcttattcctataaacccttctcttattttgacgtaggcaacagcttttcagccacaaataatccatgacgtatacataggaagatggagaaaggtgcagatgctccgttcagcgagtggaacaacacccgcaatgaaaacatatcttgacctgccgataaaattccagaaaggagagatctcttttggaattggatatgaaccagtacttgctgatatcagctatgccttcactgtggctcttcgtagagctaatctcagtctcaagggtcctggtcttcttcagcctcctaaaaaggagaaaagtttaccatggtgggatgaaatgagaaattacgtccatggaaatgtaaccttgtccttttctgagacaaagtggattgttcttggtagtccagatccctatgagaagcttgacaagctccacatgacctctggctctgtggaaattcagcaatatgatggtcgtgtgcacttctctgctgaggacataaagatttttctttagcagttttg

SEQ ID NO: 14410 - DNA, 625 bp, Arabidopsis thaliana landsberg
aacaatgtaactaccttaattttaacaaaagtggatagtagatactcatataatgacacatttttcttattattcttaatataaattataagtaattaaaatcctaaatggtacgtattttgattagaatgagagtaatatttcaataagttactttgagaaaattaagtttataaaagtattatttttgtttgactaatttatatatgattctgatgtgcagatgcgtttgatgtcataccccgaaggatcaaaaattaaaaaacagacacatattaacaaaacatttggtcacttttggaagaatggcgtaggttgtcctattggtacagttcctatacttttagtcagcaaagaagctcttttgaaaatgaaatcttttgatggtgataattctaatccccaaagttcgtggagtaaaacctataaacctacgtcttttatggaggtcatcatgtaagtgctttcttatagcatttatttttcgagtaaaaaatttcaaacatatagtatataatcgaacgtcgcaataatgagattgatagaatggtttgaaactatagagtattgatgaatatgtttgcacataattcttaattaaaaaaaaaattacaatgctctcttt

SEQ ID NO: 14411 - DNA, 604 bp, Arabidopsis thaliana landsberg
gtcaaagggcaaaagctgtttccggctccgtgttttgacaaaaaccttatcaactggttgatgatcctggcgcggaatcatgtggtttcttggggtgatgatgatactacttttgtcgtttggcgtcccccggagtttgctcgagatcttcttcctaattactttaaacataacaacttctctagcttcgtccgtcagctcaatacttatgtatgtagaataaagctctcctttctctctaaagttacgatttttattaccaaaacgatttgggtctttgagattttggtctgttatacgttttttgtgattacccatctcttaaagttccaatctttataccaaaaacagaagaaaaaatgtgttcttgagatttggggtttttgagttttttgtcttcttctacaagaaatctgatgttatgatctttgattttgttagggtttcagaaagattgtaccagatcgatgggagttcgcgaacgagtttttcaagagaggagagaaacatttactctgcgaaatccaccgccgtaaaacatctcaaatgataccacaacaacactctccgttcatgtcacaccaccacgctccgccgcagattc

SEQ ID NO: 14412 - DNA, 542 bp, Arabidopsis thaliana landsberg
cgatcaattgatgcgtgagtatagagctcagctagatgctttttgggttatgaagctctctaagggaaggaaggattctagtgacatatccaggaaaggtatacacttacaataaatttaagcagatggaatgtcatacaatccgcagttcgagtcttgcttttctaatatgccatttgatcttacagataggaaggagagagagctcacagatagaaagtgcagagattccaagaggaagaaaagcaaaaagagaaaggtgcttacataacaactgcatcgagtttagtttgaacatcttctataattctgttggcttgaagcttttagcttacattgtgtttattgatttgcagcattcgaaaaggcgatcatcagactcaagctcatcttctgaatcttcaagtagtgacaaagacgaatctaggaagtcaaggtcaagttctaagaggccaaagagggagaggaaacacaagtctagaggcagacactcaaaaccaaagtaaagatgaggctgatggtcctgcaccacaatcaaaatt

SEQ ID NO: 14413 - DNA, 491 bp, Arabidopsis thaliana landsberg
taatagccaccaaattgattctctctccaatacaaacgaactgctttgattaaaatttgttaaccatgttagcgcaacagctgacgtcattagagaaaaaattaaaaaaagtatctttaaaaaaatagaaaacctttaaaaaaaatgcctactccctctaaaatgctctaaatgagcttaaaaatttgtaaaatgtttcatcataacaaaatctctaaattttaacataattattaatactctcattttgtcaatttgttcttgacctgctgcccattctaatttctataaagcgattgtataatgtatagtcaaccatatcgatttttttgtcttttacaacggagttatgtgaaatcttcaagtgtaaatttttattattctatttaaattcttttgcctccattttactactttttgtcaggtttttattaactaaagaaatgttttattagttttggataaaatttgtatgtgtggtcttttaaagt

SEQ ID NO: 14414 - DNA, 565 bp, Arabidopsis thaliana landsberg
atcctatagtgaatcaacacaatcccaacatttaattattaaatttgacgcatggagaagtaactgactaaacagagaagctatcaaattagacattagttgatccatacctcaaaggggtgggcatattgtcttactaggcactacaagtgaacaaacagaacgactatcttaccttcatccactttcctatcttctttagtagctctccatagtttttcatatgctaatcacaatcccaagccaaagctaagatataaacctctgatctttaacaggcaaaaatataatgaaataaaaaccaatccaaacctcgaacatttcgatggagaatatccgatcgtatgtcccttcatgctcaaaagggctaatatccgcagcaatgatttcgacattctgaagcccgagtttccttcaaatatgacatgtaaaacaaaccattttagattaaatttaagttccacttacactagctagaacttgaagcttataagaagtaatgagaaacttagttaccggcatttctaatcgataaatgctttctgcgtattggagttgcagatac

SEQ ID NO: 14415 - DNA, 600 bp, Arabidopsis thaliana landsberg
caattgatcataatctactgaatcatacacaagttataatgtatattacttggaaatataggagaagatctgctgatggcattgttcctccgctgaagaagtgtcttgtgatccagtcatcgtcattcacatcctatagtgaatcaacacaatctcaagattccattattgccaagaaaacaagaagctatcaagttagacattgatccatacctcaaagtggtaagcaaatgtcttatggcagaaatagtgaacaaacagaagactatcttccttcatccactttcctatcttctttagtagctctccatagtttttcatatgctaatcacaatcccaagccaaagctaagatataaacctctgatctttgacaggcaaaaatataatgaagcacagtacttaaagaaacaaatccaaacctcaaacatctcgatggagaatatccgatcgtatgcccttcatgctcaaaagtgctaatatccgcgacaatgatttcgatattctgaagcccgagtttccttcaaaccatttgagattatattaagttccatttgtagcagctagaactcgaagcttaagatgtatgagaacttagtta

SEQ ID NO: 14416 - DNA, 523 bp, Arabidopsis thaliana landsberg
tccttttccactttgtcatcctcggcatcttcttcatcacaatcattttcggaagaagaagaggaactcggccgcctaactatttcactatcaggagcaaaatgagtaaggatatcccaagatgatcccggaagatcaactggaggtagcttcatcacaggaggaggcttaagtaccgatggtcttacccccttaataccaccaccaataccacgtccattctctaccataccaccatcaacaaattccttatctgccggaaggtttagtactggtggtgttacccgcttaatcacaccaccaacagccaccacatcattggaaacaagatacccttttgtcttcaccaaaatagttggtttccgttcaatactgctcttgctctccacctttccaccatcaacaacttccttatccgcacgaggaacgtttaatactggtggtcttaacccttaattccacaccaacacccacttcatcattgtgaacaagatacctctcgacttcccaaaatagtcagttt

SEQ ID NO: 14417 - DNA, 676 bp, Arabidopsis thaliana landsberg
tatttagatattcaaactttaaaatcaaattataaaactcaggctgattcactgcaaaaaatcttggaaaacagaaacaaacatattatttgttctttactctcataacttattaatattcttactacacaacacaagagttcccagatctctcgggtacttttcatcaacttatttggtatttggtttagataaattatgtgtcgatgtatgatgacaaaagacgttgtaaatattttaaataaaaacctgtgaggagatgtgtaggcaaaatcaacccagccgagatcatcgccgcgccacttgagaatacggccgtccacgaccgcagcataaggaccttctccttttgggtcaaactcaatgctctccggtccagcgacaggaattggtatggtcttagccattgtcaatacatttttggcgccctctaaattttccggcacaattaaggtttgatacgagattacggacaagacagcaaaaacagccggaacggcaaaccaagtcggaattttctgattaatgggcatttttccgccggaacaagagatattgttgactgttggtatgtatgagtaaatgttgctagctcacatataggtaaagcaattttatataacatccaaaaataagggttatatttttcttattgtttatgtggatgcatatatat

SEQ ID NO: 14418 - DNA, 483 bp, Arabidopsis thaliana landsberg
atattgaaatattgaccgagatatgtgaatattaattcttgtatatttagagagattatttctttcctgactaaaatttatcgctgttatatattgattgagttttgtgtgtacaaattacaacaactcaataagacaacaagaacttacaacactttttttctttcaaaacaagaattttaacacaacacatttctttgagatagccaaaaccatgaaatcatcacatatagctttgctctgtatagtcgtgctttctctcttcgctctgcatgaatgtaagtataaacttttcttataatatatatctacacataaattagaatttcttttagattttttattcattctcaaagtttaaaatcaaatgaatcatgtaggtgtgagcaaggaggtcagagacactcccaaaaggttaatgaagcgtgtgttcctggcccatgtcatcctttggtaccacatttgtggtgctgcgaacattta

SEQ ID NO: 14419 - DNA, 920 bp, Arabidopsis thaliana landsberg
tttacgacgtcattaccttgttcaaatctcttgttagcaatacaaatatattcattttctagttttaaaagaacaaatttctctaagctatgatttttaactataccgtatatactaccgttcgaaggaaagttgtatattcaaaaaaaaaaaatctattatacaattcttagaaatttgaccaacacaattatatattagagatcaaaacaaaataaaataaaatgaggttaaagaacttccaatcttacattcttactcaatctaaaatccaaaaacgtgaatttttttattttcctaatcattatttcaacgggaaacaaggaaaataaaaacgatctaagacaaaaatcaacaatgtgattgaacctcggtgtgactgttactgctagtggccctaaaagccctacttccaaaaatcataaaccctaatccaaaaccagccatcgcagccacgaagactcctccattgaacgacatcacagccagcatgaccaaataagacaaagcagccctcacggtgtaaaccgcagtctgtaatagcccgcctcccaagctagccggaccggatttcatgaaaccgcaccgcgatagacactcggagaaagcggaaataacaaaaatgacggcgagacagacccaatacattttcagactggtccctggccatccgtcgaatagaacctccgtgttttttcccaaaagaaagtcatatgcatcataccaccgtgacggtggcgatgttggaagaacgatgatggtgaaggagccggagcgccggagaagatcactcatgccgttcattgtataaagatattttttacgtgcaatgtgaagattttgctgttgtgtaacttgtgtgtgtgatttataagggtttgctcatcgggtggagttggtgtgtagtcaatgtacatttt

SEQ ID NO: 14420 - DNA, 547 bp, Arabidopsis thaliana landsberg
caacggcatgcataatgctaacacttatgtctgaggacgtttttaggtcgtcattattaatttctttgtttgggtgatttggcagtcgaggcaaaaggctatggctgatctgcagcaagcgcagatgcagaatgtaagacttgttatgttctttagaattttgcttctttctgaatctcttcgtctattcatctcagtgagttactgaattataaagttcaacgttcacaaatgtttcctggtcttaaaacccgcactgcgccgttgttctgctttttaagtatttcatttgtctgtttataaagcatcggcatatgcatttgaaactattgtgtttattcatgggtgggaggttctgatggtagaaaatattttgagaagtataacgttttggctggttctaatatattctgctatctatatttgactcatctcaatttctgccagcttgagaagcttagtgataaacagtgcacaccagagtctcagctcaaattcattttagaagcttggcttcaggttagcaaataaaagtgttgactaagcg

SEQ ID NO: 14421 - DNA, 927 bp, Arabidopsis thaliana landsberg
tgaatgggttaaatgaatttttcaacttattcatctcagatggtacgaaatgagatgaatgattattcaactctttcaacttcttattttgagacaaaacatttgcaccatagtttgttcttcaatttaaaagattcacagcagaccaactcctttaatttagagtttgtttggtccattatttgcatgtcaaatggttttcagagttggatcaactaaatttatgtatagcacaaaaattttaatgataaatagtagatcataaagtgaattcaaataaattaaaaggctcgtattgacaagtaaaaaaaataaatttggttagattatagattaaccggaacaaaacaataacaaaatcaaaacccaaacgaatcccatgtataaaaaaaattgcagaaattagcgtataaattattattctttttataagacacttattagactcaaaaagaaggttcaggatgaacagcagaagcagctgcgttattaacgtgaagagctctttgaagtttccggtgatcgaacacttcaactccaacgttaaaaatcgaagtcaccggccggtgatcggacattcttatctccgatctcttataacattcttggcttattccttttcctaaccagaatatcctatcacacctattaataacaccaacaagataaacaagttaagaatcacccaaatgtttcgttaatttaaagataaccacataattttcaaatgtgcaattgagtcacgtaccaagcaggagctctcttcttctccccttctctcaagtttgctccggcgtaacgatcagaatcgaattcgtattataggttggagggaatttaatcgggcttctcgccatcgcacaaaacaagccgtttcttaagctctaacagcggggaacaaattgaaacttgtttaagacttacata

SEQ ID NO: 14422 - DNA, 798 bp, Arabidopsis thaliana landsberg
aatcagaaaataggaatttattagagttgcaaggacttttaggaaatttgggtctgctgatgtcatcatattttgaaattttaacgtttgttacttgtttagtgaatggtcataaaaaaatccacacctatcggctgggactagatcatccgttgctaccttttccaagttacaaaaatatgttctgtcttttttatttttggttaaattctttttttttttcttagttttttagagcttatttatacaagaaaccccatatcacttccttataaagattttcactaaaaactaatgaattttgtaagaagttgtccatagctttcaaattctttgggagctttggagagcttccaaattcgctcggaacattcataatgaagaaagtagttgcgaccaaactaccttctaagttttatcttatcaaattcattaccaatcattaggattgaacctacaagacaaaaacttttttcaagttcttaaacattatactataatttatcaccgttttcttatcaaaattatttagcccaacagtttttctaaattatcatttactttttcagtttataatcagttaatcaccaatctttcttttcattcctatcattttatcttaactccttaaatattgaattcttcaagtttgtcaattgttcccaaaatggattttctttactaatataagcattggtttaaaggaaataaaaacctaagcattggtttgtattaaactgaaagtttaaaaaaaaaattccatacgtcacatttgggactttattaaatccgtctttg

SEQ ID NO: 14423 - DNA, 941 bp, Arabidopsis thaliana landsberg
cttgcatgccatgcaggtcgactctagaggatccccttcaaaatgatatcaaaaatggtaatcaccaaagaaccatatagttgataccaatttaaagtttcatgactccggcgaaaggtccagtaagagttccgatgtaaagatggccgttgaactcgttgacttcactaagcaaagtattcccaaactcattcttgaggaaaatggtctggagcacttttccattagcgtctagtttgaccgccctagggtcggtaggcataacaaccttgttcacgacagaggcgacccagaaatttccggtagaacctaccctcctgatgttgtcggggttcgagacaagacttgagaagtcttcaatagttccagctttgggccctttaatccaatatttcttgatgttactctttatgaactcgctaactagcacgaatgaaccatctgagctcactgcacaaccagcagcaccacttagaccttccattaactcagtcacggctttggtcgctgggtcgtatttgaacagctttccgctcgcgtcttttaatcccactgcgattaacacttccctacattgcataaccaacaattattttagtacacatattaaataacatgcatatattaccatcttctataataagcatttaaaagttgattttgaaagaaaaaaatatactacaacttaattacttgaaaaaattattagtaaaccaacataattaagaacgtttttttttctaataacagttttgtaaattaataattttgtcctttcctatatatatactagatttttaaaaagaaggaatttatagcattatatatgtaattgtactattgcctatctataataactcgttcataataaggttatagtgttatagatgactagatatgtaagaaaattaaacacgttaccggggtccaaacttgggact

SEQ ID NO: 14424 - DNA, 1081 bp, Arabidopsis thaliana landsberg
  unsure (1)..(1081): unsure at all n locations
ctaccaaccttctcttcttctctccgatcttaatcactctcctaatcaatactcactaataactttctttcttttttttgtcttgtatagctaatctctgacttaaagtcagagaacccttttcctcagtcagactctttgacccgcagcaattagctcttccaccaactgctcttcgttatttctgaattgtaccttaagtttgtttctattttttttcttaggtgttagatatatttttaaaaagagaattttggataattcgtttttttttttgtaaacatacaatctctttcagacaatgatattgtcacaaaaaggatgcaatcaaagtgagttgcaacttattttcaaaaacaaattgaatgtcgaaaaaagtttatatttttagattttccaaatagtcaatagatatttagttaaatattagctttcgacaactctcttgtgtcgcaagctacaagtgtgaattttgcaaatggggagttcatgtttgcctccaggatttagatttcatccaactgatgaagagctcataggctactacttgagtagaaaaatagaaggtctcgagattgagcttgaagtcattcctgttatcgacttatacaaatttgatccttgggagttgccaggtaatttgaaaaggaaaacagttagatttttatccataaatttatatttaaataaaactaaatttgtttgattttatctttaaattttaggtaaatctttccttccaaatagagatttggaatggttctttttctgtccaagagacaaaaaatatgcaaacggttctcgaaccaatagggctacaaaagcgggttattggaaagcaactggtaaagaccggaaaatcacttgtaaatcatcgcatgttatagctggataccgaaaaaccttagttttctatgaagggtcgtgccccattaggcgacagaactaattggtttatgcatgaatatcgtctatgcgatattcatgatcattcacanaaatcaccaaatttcaaggtaaagaaaattagagttcgtttcatttgatccaacttcataatattcattttatgaactaatgg

SEQ ID NO: 14425 - DNA, 900 bp, Arabidopsis thaliana landsberg
ccaaagtatatcttaacaacagttgcagctaagaatagtagatctgcaaaattaaaaattcttggattatgcagttgaagctaagtatagtaaaacaatacatgttcagaaatatttgcatttctgttctgctttaagctttaacgacaagacattttatcggacaaaactaaactggtggtacatataacaaatgaatcatcccatgtaaacatgtctttagagatcaacttctgagcttacatatattaaaaagtctccaactgaaacattcttaaacaaactagtagagcatattgttctctatatacttattaagataaaatatatttgcttactccatggataggcgtgggacacaaaagtcaacaagcagcaatgatggcccgaagtccggctgtgtgcctggtcctatgtcctgaggctgagagaagcgtgcaaacctcctcgccatagccactttgagaaatacaaacttcttcttgtaccatatcttcactgttccaatggtctttctttgaatcttctcaactttaacaatgatcccatctctaagtccaacatagctggctggctcaccagagggaccattccctactacacacaacacaaatgaacatataaattataactatgtggattatttttatactgatatattttacctaacagagcgagacgacttacgtggactgaacacatggagttttgctcccacgagttgatgcaccaacaagtcacgtacttcctctatattcttaggctcaatcacttgtcctttcatgagaacaagagcaggtttatacgatgatagaggctttgacacagatccaactgtggccaatcttctgcttttggaatgccgcattgtttacgcaaagcaatgtagttttgacagtg

SEQ ID NO: 14426 - DNA, 607 bp, Arabidopsis thaliana landsberg
aaccttaatgaatcccttaccggatatgccaaaggtatgttgagcttgtatgaagctgcgcatttggggatcaactaaagactatattttacaagaagcatgaagctttacatcgagccacttggagtcattagcggcatgtgggacgtgcccgcctcatctctcagtgcacatacaaaatgttctcagtgtacctcagcattggaacatggagatattagtcccagtggaatacatcccattctatgaacaggaaaaagaccatgacgagattttgctgaagtttgctaagctcagtttcaagttactacagctccaatacattcaagatctcaaaatcgttacaaagtatttaatctctttatttactagtttctctatggcttaacttacaatcatttaatgaaactgttatatttaactacatatcaatatctttggttgctagatggtacaaggagctagagtttgcatctaagttgccaccttattttagagacaatattgtcgtaaattatttctatgtgctagcagtgatatatacacctcaacactcatatgagaggattatgttgactcagtacttcacttgtttagcgattctaga

SEQ ID NO: 14427 - DNA, 893 bp, Arabidopsis thaliana landsberg
aaagtatgaccttagaaataaaataaaaccaaaaactgaaaaaaaaaaaaaacgttaaaactgattattgtcaggacagcgaccaataacaaaccctagccgcaaaatttgaaagcggcgagttttaaaaaacaaaaaatcaaaacattgtttcagattttagttataagtttttgggcgggtggcacaaaattaataaaagctcccgctcgagggtattttagtcaattcaaataacccgaaatactagggtttccgcccccgccttcctcctcaattataaaattcctctccgtttgtttaattctgttgctactaaccgccgtctctctctctctccctcttccttatcatcaaaacttgctctgctccgatctcttaaaaaaaaaaagatgtctgagggatcagaagatacgaaaacaaaactcgactctgccggagagttatcagatgttgataacgagaactgcagtagcagcggaagtggcggtggtagtagttctggtgataccaaaaggacttgcgttgattgcggaactatccgaactcctctttggcgtggtggtcctgccggaccaaaggtgagatttttaactaaccctttcatttcaatcttcttatagtctattgggttgctgttagattccgatctagtagatctaataaatggatcgcgaaatagcatctatatcatgcatgatcctattttaggctttatcgtttttcaaatttatttaggtgatgaatcaatttagagaccggaaagatctgatctcatattgctctgaagttcaaattttccttatttctttggttaggctatcgcattgtagccattgggcaatgcttgcgggatccagagtaagaagaagagacgggctgcccttggtttg

SEQ ID NO: 14428 - DNA, 315 bp, Arabidopsis thaliana landsberg
tgcttcacatctgtggcccaccccagaagcaatggccaagaggaaagggcaaatgcagagatcctcaggggactcaagatgcgcacctacgactacttgaagaagcatggtgcgaattgggtcagtgaactcccatccgtgctatgggggaaccggataacacccaaccgagccaccagggagacaccattcttcctggtctacggggctgaagcctgtcttcccccggaaatcatcatgggctcccctcgggtccaggcttttgaggaatctatgcagggacggctgcggcgtgaagacatggacttcatcgac

SEQ ID NO: 14429 - DNA, 517 bp, Arabidopsis thaliana landsberg
tcagactgttgtaagcaagactgtctgtaagttgatctttcgacattgcagacatgccaagtttaagcttcgaatatcctatcttgtccattatttcccgacagacatgtatttctttattgtctgaaagacagtaaaataagtcatcttcgtcatttccaccatataccaaggaccctcgggggtatttcagatccttggcatagggttgcactatggcaatctgctcttctgttagttgctttcccgaagcatgtcgagcgatatgcgtccaagtcaccctgggaaggtgctttaggagcaggcgccgaaggtttctatggaaggctctctttcgtaatattttctggtacaacttccggagacccgcttcggcatgggcagaggtactggcagtaattatctttggaacttcttcagtttatctcccaatagctacggcagagaatgaaggtggcgtcttcacagattctagagcagattcctaaacgcttgccatcctcttttccttggagtg

SEQ ID NO: 14430 - DNA, 639 bp, Arabidopsis thaliana landsberg
cactacctccgtttgtggaggctggcgttggcgccgccactgcccacatcggcggtatcatgttttgtgttcttgaccgggtcaaacccggatcttgatcaggagcttcggatcccggtttaggtgatcttgaaccgggttcttgatctagagaattaggatctttaaaaagatcttcttcacggaatgttttgggaagagaagaagaagaagaagaatctgtcatgatgtgatgaggatgataaagctgttgctggaacccaaaaacggcagcgttttgagccgctcttcccatgtggaaagatttagacagtggagctgaaagagtagagccactgcttcgaagagagatgttcaaagtagagatattcgccggtatggttccagttccggtggctgcgatgatagctggctccgcttgttggagcagccactctatagtctcgccgtccgatttgtgttgtaactcacgtgttagttggaagacacgtgctgcgcagatagccggcatacgtatcctccggccacgtccgtctactttgatgtgacggtccttggacggtcgttttgcgggtgttttatcggcggtgaccgtggtggtagtggagtttggagcagcggtggttaatgagactgaac

SEQ ID NO: 14431 - DNA, 1155 bp, Arabidopsis thaliana landsberg
ggataagaaccctagcatttctcatttcgaatctcgctcgagctcacagtttcttcgttggggatcgaaatcgtgccatttgagttagcctctgtatagatcgatggctagcctgagaagagctctgctcgtagcagggaagacgaagatcaacctagagaactgccatttcatcaccggaatcaactacaacggtctcagcgtgaagcaactacaagagctccgtggaatcctccgtgaaaacacaaacacgaagctcctcgtcgccaagaacactttagtctacaaagccttggaaggaaccaaatgggagtctctgaagccatgtatgaagggtatgaacgcttggctattcgttcaatctgaagatatacctgctgctttgaagactttcatcaattttcagaaagagaagaagctttacgataacaatttaggcggtgctgtttttgaggagaaattgtatgctcctcaggattacaaggttattgagacgatgccttctcgcgctgatgtttatggtatgatgcttggttctttgcattggccggcgttagatctcgtcaatgcgttgcaggccccaccggcggcgtcggaaaatgagacagttgttgcatagaaggaaggaattttccaatttcttgctctaaaaacgcttcaatttatcagtctccttttgtgtttgtgcttccggattaaacatatagtgtcctatcaaaaataatttgttggaattctcttagaaattgctattatggatttactctttgattttgagcttcgatttcggaaccagtgttactggattttgttgtagtgtattgagcttggcttatcttcttctgttgtttgctagaagagaattggtgaattagtaatacttgttgtggacttgaaatcctctttgacaccttaatgactgttactgcatcatccaacaagtttcaggtaagaaattctaaatccaaatgtgttgttctatgatgtatttggactacactcttgcctgaaacagttggctaccaattttggttttgtacatcacaatcttaacatctacagttgctggtgtaaggagtttacttccatggcttatacttagtattgatatcccttttgaacccaaaaatagcaagcctcactttattcttgggt

SEQ ID NO: 14432 - DNA, 589 bp, Arabidopsis thaliana landsberg
ggaattgatgctttgtctcttcagttcggagagagatattatggtttaagttgatgtcttgcaaaagaattgggctctttttttatagtttcgtgactcttaacatatacattagtttataaactggattctctaccttttagataattggttatgtaaattatttgattgtggttcttattcatgcaagatttgttatttgtttatttttgttggctactcgtctctgctaattaccacacaaatttgagaattgatcataaagaaatagacttttactatgtaacttgttcgtctatatacatatcatgtaatactatttttgaactgtaaaatagatagaagttgcaatattttgtgtttgattagttagaatcaaatttggatcattaaaaccaaaataaattgacaaatttcttctactagagactttcactaatcaacaaaccttatataaaaaaaaaaaaaaaaaaaaaatagaacactcaaaacataaccagcattaactagtttgggacacgcattgagtccaagatggctgcaatcttgctttcatgaaacctatgcaagagaaagcgataaggcctga

SEQ ID NO: 14433 - DNA, 1034 bp, Arabidopsis thaliana landsberg
gacgaaaccatccgagaatcgtcaatttaagaaaatatagtaacgccgccctaattaatcacccacactagcaaaacttgcagctgaggaaacgaatgattaacagagaaaaccctaattaccgccatatcaaagaaccagtgaccaaataacttcctcatatacgattcttgagatttgccttaccgaatcgttgggttttacttcgatctcgaagcgaatccccttcaatgttttgacaatgatcttcatcttcttgcacaccaacggaatatgattccagttcccgaaaccgattctccggcaagaatctgttccgatcaatcgccgccggtagcaaacttccgagtagagagagattagagaagagaagaagcgagtgaaaagaaatgagaagaaaacggcagaatttatacggtccctcaataactacagtgaataatccaactaaaatatgacacgtgttaatatcttaactgaattcttgtaaccgtatttccctgacggctgacgagcgtcactattgggcctatattttcatttctaagcccattataccacaagcttcgtgcaacaatatgatcgaaaacagaagcagaacaaaataaaagagaagagtgaatgtgttttatttgaatttttcaagaattttattgttctgctggaaacgtcaataattgtatactaaaaaaatataattcaactatttgtgtatcaaaacgtaacaaacgataaaatctacgtagtgtatcaagtctttggattttgaatgaaaaacaaattacatatttttgagtatgtcactgcaaattttgtctatttgacgttgtagcctctcaatctcagcttcagtacgagccttaacttcaccatcctttgccgtgagtaacaaagtcttcaatgcctcgatttttgcctggaggcttgtgatctacaaatcaatttaaaaagataatttgtttaactacagagaaagctaaaacaaacttttagaaagtgagacttgtttatagtgttttgattcaattactttg

SEQ ID NO: 14434 - DNA, 620 bp, Arabidopsis thaliana landsberg
tttgtggcgaagacacaattataatttataaaccactttagccgctcgtagagaaccagcgtggttgcattcccggattgaggaggaaaagcgttgagattgatggggggtaatgcatgtttggtgttgtttggctaggagcgtgtgtgctctgtttttaaatcttaaaagtaaagcaagcatttttcattttcgttattcttaagaaaataaaattatgaaccatacaaaaaggtttaagtttcatacaatattaaagtggacataaggccaaattgacctaaaccaaaggtaaccaataaactggtgaagatgtgaaacgatgagattaagaaaaaacaacacaaagtcaagaagtagattgcctactttgaagttaatggggttacacttcgaggaacaagagtgcacttaagaggatgagccatgctcaacgttcctttaccagcaacctcattcatgttgatcttatgtccgtcgatcttccaatcaaagcattgcaccatcactccaatagcggtttctacagacacataagctagattcactccaggacatcctctccttccgcttccgaatgaaagatattttagaacttcttcttttattgcgtctttttg

SEQ ID NO: 14435 - DNA, 488 bp, Arabidopsis thaliana landsberg
taaggtacaacactaaagacaaaaaaagtcattaaagggtatttcttattttgaaacttttttaatgttgactgttagtcaaccttaggttcggaacaaatttggagatttggatgtttatgttgataaagttaactacttagaggttttaaatgggaataaaaaaagtttgatgttttagttaggaaaatattttgatttggaggtttgttttgagattttttctataataaaagctttttctttagtagtatactcttctacattttgaccaaatatttgctatggattatcaaatgcatataaaatcattgttatttaaggactcattgtctccttataagactcaagcctaataaaatgtcataagcaaaatgactggttgccatattgtaattttcgccgtaagaaacccaaaactaatagttaaccatcaatcttttgttatatagtgattcacggtcttctaaaaaatattttttcatttt

SEQ ID NO: 14436 - DNA, 834 bp, Arabidopsis thaliana landsberg
ttcattttgatccaaactcatctctttcaggtattccaaatttgtctttctctgttctttctactattacccaaattaaagttttgatttttatttctcactctgtttcttgtttttctaattgcagagtataatggactaaacattttttttctccgaagatggttaaagaaatagcttcttggttattgatactatcaatggtggtgtttgtttctccggttttagctataaacggcggtggttatccacgatgtaactgcgaagacgaaggaaacagtttctggagtacagagaacattctagaaactcaaagagtaagcgatttcttaatcgcagtagcttatttctcaatccctattgagttactttacttcgtgagttgttccaatgttccattcaaatgggttctctttgagtttatcgccttcattgttctttgtggtatgactcatcttcttcatggttggacttactctgctcatccatttagattaatgatggcgttgactgttttcaagatgttgactgctttagtctcttgtgctactgcgattacgcttattactttgattcctctgcttttgaaagttaaagttagagagtttatgcttaagaagaaagctcatgagcttggtcgtgaagttggtttgattttgattaagaaagagactggctttcatgttcgtatgcttactcaagagattcgtaagtctttggatcgtcatacgattctttatactactttggttgagctttcgaagactttagggttgcagaattgtgcggtttggatgccgaatgacggtggaacggagatggatttgactcatg

SEQ ID NO: 14437 - DNA, 638 bp, Arabidopsis thaliana landsberg
tcgcgcgacacgcgagaatcaacgcgacgacgcgcggaacagctcgacgacgcgcaaacgatgccgcacacgaacaacacaaccatgagcataacagacaattaattaaacaaaagtatttaaactggtattaaacaagttaattaatatttatatttataaaagcacgtgttaaaactatagatttgttctaattagattgttattttaaataaccaacaactaaacaagaattgactaattggcacgagcgacgataacggaaataatcgaataacatgcggacagcgcgcgaacagcacagaaacaacacgtgcaaacgacgcgcggacgacgcacgtgacatctcgagaactactaaatagatgcatgttttacactaagcgaatactaaacctaagaattgagtaaacatcaatcaccttaacatatatttataaaaatgcatattaaaactataaactagtttaactagattaccattttaatgattatcggagaagcaattgatttaataaaacatgtgttgcgacaaaataatgtttacatttaaagataccttacaaactaatgcgctagaatggtaaaaatagttttcgataaaactattgtgtttagtaattgttgattacggtgat

SEQ ID NO: 14438 - DNA, 595 bp, Arabidopsis thaliana landsberg
gcagcttgtggtgtcatgatgaacattgtctcaacagcttctgatcttatgcaagatttcaaaaccggttacatgacattagcctcaccaagatcaatgttcttgagccaagccattggaaccgccatgggatgtgtgatctctccttgcgtcttctggctattctacaaggcgttccctgactttggccaacccgggaccgcctatcccgctccatacgccttagtctacagaaacatgtctatactcggagtcgaaggattctctgctttgcccaaacattgcctcatgctctgctacatattcttcgcagcagcagtgatcgtaaacggtataagggatgcccttggcgcaaagtgggctcggtttatccgctcccaatggctatggctatacccttctaccttggaggttacttcacaatagatatgtgtctgggaagtctcatactgttcatctggaggaagctgaataaaccaaaggctgatgcgtactcttctgctgttgcttctggtttgatctgtggtgaaggtatttggacagtaccaagctctatacttgccttggcgtggtgcaaagcgtctatttgcatgaa

SEQ ID NO: 14439 - DNA, 671 bp, Arabidopsis thaliana landsberg
taaactacaaacataaattataaaaatgacatttatttgttgtatataaaacacaccaaataaataaaaacccaaacaaacaataaataacacgattaacgataaccgcataaaatgatttcttcattcaccgttaaactaacggcgtgatcaaaccacatttcttcatttcccatttcaccttctcaatctcatccaccggtaacgtcaccgtcacaaccctctcctcctccacaacccccggtaaaaccaccactgctccgtcgtctccaatcccctgaacattacaataaaccgattccggcgacttccccataactttcgcctcataaaaatcaacttcactcatatccacaaacgttaaattcgctccgtaaacaataaaatccgaaacatcgtcaacaatctcatcgatcacaaccctctcatctttcgcttcaccgatcgatttcacaatctcctccaaactcgcctccaccaccgaaaaatcgacgtgaacggaacttatcatctgaccatttctcaccgctctaggcttcaacttcttcggatccgatctgataaccgtaatcgtcaccggagctgattctcccctcaccgtcgcaacacatttccatatgattccagtgagaatttcgaattcgccgtctccgttcaccgggaaatttgat

SEQ ID NO: 14440 - DNA, 911 bp, Arabidopsis thaliana landsberg
ttcgagaggaagcacaccggaccggggatcctgtcgatggcgaacgccggtgcaaacacgaacggatctcagttcttcatctgcaccgtgaagaccgattggcttgatgggaagcacgtggtgtttgggcaggtcgtggaaggcttagacgtggtaaaggccatcgagaaggttggatcatcatctggaaagccgacgaagcctgtggttgttgccgattgtggtcagctctcttaggatcttcctatcatcatccttaatttagcatcatcgtcgtcattgtggtgtctctttatgcttttgcttttgttatggagtcgttttaaaatttgtagtcataagtttggtgtgtgttctcatgggaacatatataaacttgcccctttaatattaactaccagaaataaggaatgagcactcttttatcatatctaatttacgttaccaaatttcatctttgttatctgcatttccgttggaacagataaaaatacttggtcgagtttttgttcacctatctaattaatggtggacgacgttatgatccacgttgacgcagaggggctacaccaccacaaggtcttggtctaaaaaagtaacacacgtgcttctgcagagaagaaaccccaattaatgacaataataataaacaataccagtgggcctattttttgtttaaatcacgggtttgtcgataagatcaactttagtgggccttcaaatataattgccttcgtactcactattatatgaaaacgaaaattttccacctgaaggccggcccatcaaatcaggccccaaaccagttttaaaaccacacgatttttctggagactgtgatgaatgattgatgacatacaattaccaaatcaaataaatgtttccagagagactgaatctcatatttatat

SEQ ID NO: 14441 - DNA, 1185 bp, Arabidopsis thaliana landsberg
  unsure (1)..(1185): unsure at all n locations
tgttcaacctttttaactaagtactaagttgaaactaccattggtagggtgtgaaagtaacgggtaataaattcttactagggttttgggaagtgactgttgcggttttagagaaatcgcagtctgtaggctgcttaggagatttctgaaaatacatattcatggcatatgctgcgtgagagaccacattgtcggctcgaaacaagcccctcctggttgtatcgcaccacagtctattccatgtccgcacgctccaatccaagctcgcttgtaactcctcattcgttgcacccttctttggtacacaaccacnccgacgatgtcacttttcctgatggtgtctaattttatgatcaaaacataacctcacaaattaaaacattgttatttatctgcatttgcgtttacatgttataataaattactttccctaaataaaaaccacaacttctagtatctaacctgactactgctgctactcttggcaaggccaacatcatagaccatggaaagatcagttttgaaaagcccgaaagcccgttctgaagatggtccaggctttagattctcatcatacagtgcgaaaatgtaagtgtcaacaggttttccaggcatgagaggtgtgccaaccatagaccttagatgagctattaggtttccgttgtacgctttggcgttatccacgcttgctccaacctcgttagcgtcccctcttgacgcccaacctgtttccgccaccacaatctccaccttctcgaatcccatcgatttcaaagccgagtgaaccgcatcaacctagtagataatgaaaactcagacactgtaacttgtgctgcaacaacgacaatgaacaaagacttccactactgctttgttacgaaaacttataaatacgacctgaaactgaaacgtcaccattttttttcgtttgttttattgatttaagtcgacgctgcttacgtggaattaatgatgactaatgcaaacaaacaaaacaaatgtttcaagaaacgtctaaaaataactagtgcgaatccagtctgtcagacaatgagtaaacgagtgacatgtcatctcacgcatacttattccctgagaagataattattaacattaacatcgaatgaagttaaatataagtagtacaagtaccatatagtattaagcagaatttatactttatag

SEQ ID NO: 14442 - DNA, 535 bp, Arabidopsis thaliana landsberg
  unsure (1)..(535): unsure at all n locations
tgttttttttttttttttttgtcaactgttaatgtttttttagttctctttatttctgctttgtttgatacaaagttagttagtttttaatgttattgggctaaagatatgggcctgggacgatctcttcttgtgtgcaagcttaagaaaacaatttatcagggagatgggagggaaatgaaagaagaggaaagagccggcgagnnnnnnnnnnnnnnnnnnnnnnnnnnnnnnnnnnnnnnngtgttgttgttgttgtgatttattctctctgtgactgtttgttttgttatgttcttccttccgattctactagacaagtcgaaatttgaagtagatgtttgctgcaacggtatagttttctaacttctgttttgctcagtttgactattctctgagaaatctccatcgcgtgacaaaataactaaagaagtgggcctaaaaattaggacaattatatatctgtcagccttttaaagcaaattcggacaattatattttcgggcccaaagggttaaattaaaatgggataagt

SEQ ID NO: 14443 - DNA, 709 bp, Arabidopsis thaliana landsberg
ctaactaatcgcgtcacctaatgttaagatctttatgggcaaagatatacttcaagctcttatgttagtatagacttggcacttggccccattatataatgcctccaaatcttgagagcatgcacaacggctgccagttctaagtcatgagtggggtagttcaactcatgtttccacaactggcgagacgcgtaggcaatgacgtgtccttcctgcataagcacacatcccaggcctttgcgacttgcatcacaatatatatcaaaattcttctgtagatgtggcataatcagtactggagcatccatcaacttagatctcaactgatcgaaactctcttggcattcctcagtccacttaaactccttgctcttgtctaacaatgaggtcaaaggcttagcaatcttggagaacccttcaatgaattgccggtaataacctgcgagtcccaagaaactccggatctccgagactgtacttggtgtcttccaatccattatttctgttactttagctggatcaacaacaattcctcctttggagatgatatgcccgagaaaatgtacttcatcaagccagaagtcacacttggtaaatttggcataaagctgattatcccgtacttctgtagcacatcgcaaatgctctcatgccactacattcttggaataatagaatgtcacgatgaatctatgacgaattacaagat

SEQ ID NO: 14444 - DNA, 849 bp, Arabidopsis thaliana landsberg
tgcgaatatatgtaattgatttagatttttgttaaattaggtggcaagaaagggtttggggatgttgtgtgggcagttgcaaaacaccagtacgatggcaagaaaccacacattgtcttcactcacacaagtcctgacggcgatcaaggttccctttctttcactacttttttattctacccaaaacttttgaaatgcactatgatctaaggaagaatctaacgattactagtcctcttttttatatatcaatagggtttccgggagaactcagtgtcacggtgacatataaacttgtcaaagacaatgaattgagtgtggtgatggaggcaaagcctaaggataaagcaactccggtgaacttagctcatcatagttattggaatcttggtggtcataattccggagatattttgtctgaagaaattcaaatcctcggctcgggttatacccccgtcgacggtgagctcattcccaccgggaaaatcaatccggtgaaaggaacagcatacgattttctccaactccgtcctattaaagataatatgaaggatcttaaaacagggtgagtggtagcacatatatatactttgctaaaatatcagttttagtatgaacagtaacctatatgattgtttcattttttatcttgcagatatgatataaattattgcttagatggtaaggcaaaaaagatgagaaaaatagttgaactcgtagataagaaatcagggaggaaaatggagttatccggaaaccaagcgggtttgcaattctataccggagggattgtaaaggatgtcaaagggaaaaaatggggatttttccaagcttttccggggtattatt

SEQ ID NO: 14445 - DNA, 663 bp, Arabidopsis thaliana landsberg
  unsure (1)..(663): unsure at all n locations
tatttacaaaaaaacagcaagtcactattctttgaaacactcatttaactttgccaaaccgtggaagagaaacctaaaaatatgtgttttgtgaaaatttatttaaatattattaattaaaatgaactcattacttcacaagttcaactaaattctgttcaaacatatcaatataaccatctgaaaaaccagagtcagtcaaaacacatctccacttgtcatgattcttcctcactttctcaccgaccttactaccttcgtccatcacactcttcaccgaattctccaagctctgccgcgagaaccacccattctcttccctctccagttcaaccgccacctccatctcttccgtcatcagcctcgcgttcaatatttgttcaccatgctgcggaaccaaaactatctgacaattactcatcaaagactcccacattgacccaaacccgcaatggctaacaaaacaacccactgaaggatgnnnnnnnnnnnnnnnnngctgaatccaacctccgtacacaatgccacgtccttgaaccctctctttgaatccttccggtaaggcttcctcgacggttgatacacccgaaggaggcttaatggcaaccagaaacggaaaaccagttgattctagacctaaacagagttcttgaaactgatcta

SEQ ID NO: 14446 - DNA, 585 bp, Arabidopsis thaliana landsberg
tataaacgatgcataagctaatggtttttgtctcctttttgtgtatattacaatgttagggtactaaaaacgttttaggcatatcattggatgtaaatgagattggtgaactgcatatacataaaagtgctttcaaagggatgcgtaatcttcgttttcttaagtttttcactaaggaggagaaagaactaacatggctcttaccagaaggctttgattatttaccccctaagctcagattactaagttgggcaggctacccattgagatctatgccttataattttcgtcctcaaaaccttgttaagctcgaaatgacgtatagcaaactagagaagctgtgggatgaaattcatgtaagttattagtaaaattttaattagtattgagattagttagctttatttagtttttagatgttaatgctttcaaattgtgtgtaactttacctatacttcagccacttgcagggctcaagaatatggatttgtggggatctaagaacctgaaagaaatcccggatctttctctagccactaaccttgagaaacttattcttacccattgctcgtctttagtgaagct

SEQ ID NO: 14447 - DNA, 640 bp, Arabidopsis thaliana landsberg
cgtgccacgtcgtcacccggcggctacttctaaaaccctcggtgtgccacatcgtcactcgggttattatcctcaaagtggccgacacagcccgttttaactcggctgttatttctaagacgctgacgttatcactagtcgctcggcatttacctctaaagcgccgacgatgtcttcaatcgctcggcggctatttttaaaacaccaacgttatcaccagtcgctcggcatttatctctaaagtgccgatgatgtcttcagtcgctcggcggttacctctaaagcgccaatgatgtctccagtcgctcggcggctatctctaaagcgccgacgatgtcttcagtcgctcggcggctatctctaaagcgccgacgatgtcttcagtcgctcggcagctatctataaagcgccgacgatgtcctcagtcgcttggcggttatctctaaaaaacgctggcgttgtcacaggtcacttggctgtcacatctaagagcgccgacgtggtcaacagttattcgacactgacatggtttcgtcacactcgaactctatttcaaatgcgtaaatatcgataataatagctcggcaatcaccctgaagcggcgatatgatgccgagttatttagttactatctgaatga

SEQ ID NO: 14448 - DNA, 1589 bp, Arabidopsis thaliana landsberg
actttctttaaggttattaaaaaatttgcataaataaactttttttacttaattgggactttgtgtcaaatggtcggtccatatcagtgaagcactaatcagctttaggccctttgggctaggatcttattaaaccacacagttttttttctttaaaacgagcaaaatccgagaaaaaaataggtgaattcagataaacttttgaaacgtagaacatagttattgaaagaggatgaaatgagcttgacgtgggaaattaaatagctatcattcagtgggaaaaaggattgaaattgtttacgatctttttagcttggtcctgaaacgacacatgcggcaccgtcccatcctttccagtgagaactttatacttatccttcctcgtcaagttagtgctctcgaaccctaacgtgtccgccaagattctctgaacatggttcgccacatcatacggctttttcccggataaacacgtggcctccaccctccactggaagcttgttcaagaacgtaacctcgtaacccggtctggggttcatgaaaaagaatatcatgtccatacagttccagcctctcacagtgttcgcatggaagaatccaaccctacagtttactgccacgggcactatcatgtccgttaactccgcaaaaagcgcgctaaatcttaacaaaaacggttggcgacaagttgatccttcgggacaaatcactaggtctcctttggacagctctagcttgatagtcttcgcatcaacatctcggattctttgtattcgcacgatgggaatgggagagacgagtttggaaaaccgtgaaagagagtatacaacagccatgacgctgcgtcccaacacggtggatattacaacagggtccattagggttctatgattacatacaaagagaacaccggagtttcctgctcctcgtggctgaggaggctttcccttgacgatgatttggcagcccaatatactcatggcatgagttctgatccacattgggaggatgaacccggaaaggatccggatgggagaaagaaccattccaaatgggatccaaatgaggatgaggagagctgtggctggtgttggccgcttcacgagtcgtacgtccgtcgttgaaaatcaccggaactggctccaactcaatcttttggctatgcataaccagtgcgtgaatctgttttaatgtgtaaaataggtccaaaaatagtggtcactaaatgatttagtaagaaaggaatgggattttttgagaagttattaaaatgatgtttccatgttactagtatagtaagtgtattagtttgtaataacgcttttattgtattatatcatatgagttgtagaaaacaaaacaaaaaaaatgaataccactgaaaacgttatttaaactatgcaatttacgttacctcacataacgataagaaagtcgtagaagctgtcttagaggctcttccaagacctagatgaggcctccggtcatcaaataattcactaacacggttcaaaatagacttgtccatattggtttcacgtacaaaaccggtgacaaaaccgagtttgttcacgttcagctccgtaccg

SEQ ID NO: 14449 - DNA, 802 bp, Arabidopsis thaliana landsberg
gggtgagactctccttttgggagatctgacaatgcgatcatcgctttggccaatcggtttactactgggtgatgattcttatgaaaattgtgctcccatcccaaatgagtcccaatcgactctatgaaagatctcagcagcacggtccgagggtgttttggcattgtgtgacatcatagattgttgttctatatatactctatcaacttgtgcttttaaatcgtacagtctttgtccaattgtgtacgaatcggcgtcatacaggtgtttccttgagacgtgttgggctccttcagtgctgagaatgtcattaaaatgaatagggtctccaatgatcactgtcacctgcgaaatgtttgacgtaaatcaaacagattaaagattgcaaatacataattaagcaatgtaataacctaatgacaattagtaacactacaaaatgtctggcatttgaactctatatccttccatggacaatacatatccacttactcaaaatatgaatcacccaattatcgatagatcctttctttcttaaatcattaattcgagatccgattcactcctcggatcactaaaaagtcaagtccaacaaaaattgcgagaggtcttagatatgtatccaagggcttgcaaatcaaacaaagcaatacactcttaaactattttaactcgaggcaactaactacatctctgaaagttatggttttttatttatttcctgattttggggcgacagagatcatgatgcattcaactaataagagatcaaaaatgaaagcttcaacgaggaagaaaaatt

SEQ ID NO: 14450 - DNA, 604 bp, Arabidopsis thaliana landsberg
  unsure (1)..(604): unsure at all n locations
tggagagaggtcaaggattaaaggtgataataggcaaggatataaaggaagaggtaaatgtgcattaaaaaaactaggaatctaggtacaatcaagaataggaataagataagtcttgcaagaggtaaagtataggatataaccacgggtgagataagtaagagaccacgcttgaactaaggtagggagattggaggttttagataacgaacatagcgtaatcaccaaggtaagattgagagatgagaagggtaaaggcaataagaaacaaaagcaccacaaaggatgaggttacaaactcgcgagccaaagaagaggatacggccaagagaaagaaggtatgagacgaaagaggggcgattttaaagggcatgtatgagacaaacatgaatgtaggatatagaggtgtcaagggtgcatatgataataattagaatgcataacaaaggatatagttgagacaagactcgcgaaacgacaatgtggagaaaacaatcaagggtaagataggtaaggttccaacataagagttgaagtaaagattcattacgaagtggagttacaaggagacaacgggatcaccaaggatatgcanagtagaatg

SEQ ID NO: 14451 - DNA, 749 bp, Arabidopsis thaliana landsberg
tgatccatttactggtttcgtaggattttttatttgaagattttgatttgggatctcaaatggagaacgttgatgtgtctaagtacatacacagctctgtgcacaaagctgttgcttctaaagactatgttggtctcagagcaatactgtcttctcttccaaagcctaaagatccatgtgagattcaaacagaagcagcttcattatccgaggaagcaaaatccgataccatttcagctgtgattgatagaagagacgtcccaagccgcgacacgccgctacatctagcggtgaagctctgtgattcaacatcagtagaaatgctaatggttgctggagctgactggactttgcaaaacgaagacggttggaacgcgttgcaggaagctgtttgcagtagacaagaggcgatagcgatgattatagttcggcactatcagcctttagcttgggctaaatggggtgggagactacctcgtttgatagctacaatgagtaagatgaaagatttttacttggagatgagttttcattttgagagctctgttgttccttttgtatctaaggttgcaccgtctgatacttataaggtttggaaagtgggatcgaatttgagagcggatatgactatggctggttttgatgggtttaagattcaacggtctgatcaaagtatattgtttcttggggatgggtcaaaggatggtgaagttgctcgtggatcgctttaccatgggggaaatcataag

SEQ ID NO: 14452 - DNA, 599 bp, Arabidopsis thaliana landsberg
caacaaacatctagcagatggtgtagctagagaagatgtagtagatcaatgtaataaggtaggtgtagatagaccagcttggtaataaaaacaggttaaaccttgttggaaagagttttcctgtttcacctggatcatgtaacatgtgagtttttatatgactatggtgtaagaaacgactgtcggtttctgaggcaacttttaatatctatagtcgtttcacaaaattcaagagttaagatggctattcctttggatattccatgtggatcaccatgttgccttattaacctaacctaggaaagacatgttatctatcgaaggcctaccaacttaatccttgacctggtaatccctatgatgggcatagaaatatgcttaggctgaataacagtctcccatcatacttctttcatcaagtttaggttatggccatgccttgttcacttcattgggccatgatctatttggatctctacttgtgattgtacttacaggtggagtctcttttgtaccttgtcatccttgatcagtctatttgtgttgtgtgagattcgttattggttatgtctggtaatggcgttatgactaaattgatg

SEQ ID NO: 14453 - DNA, 802 bp, Arabidopsis thaliana landsberg
gaagacgttgcaattcatcacatacctagtcaattgatgaattccaccgctggttattatcgatttcgacgattctttcgaaatcgaagattcgaattcatcgatcatcgaaacgacaccgtctcggagatttgccaaagtttcatcgacttgtgatctgacggtggaggttgaatcagagctaaagagttcgttgatcttaggtaatagatcaacgatcgtttgataaacatcgagagtgaggaagatcttctccggagattttcgacatttcgccattttttccgggaaagtgaacaaagctaaagcggtttgtgatgtgatttctgcaaatgcagattcacgaattgttgatgatgatgaagagaagacatgatcggagaggatttgttcaccggaaaacagagtattcactgctcttgttgttgttcttaaccatttacgtatcttcttctccataacttcccattcaagtttctgaatctgcgaaaacgttaaattctcgaatccgagttggtttaacgcttcgttaatgatcgatttacggattcttttgtagattttaaagcattctttgctgtagccagatgatatcatacaatccgcgatcatctttagatcatccatggtgttggaatcggaatcggagtcggaatcggaagcttttgaagaacggatagagacggattcggggtcgagataacgtcggttcgatttgagaatacggtaaaactctttggagagatgagtcattgagatacgcattagattctctgctttaacgagtttcattgacgtttag

SEQ ID NO: 14454 - DNA, 990 bp, Arabidopsis thaliana landsberg
agtccaaattgggagctctattaaaatgaaccagtattgaaagagaaacgcatttcctgagacttaggtcaaactatagacaccccttatttttgtataaataaaaggggggttattaacaaaatcgtgaaaccttcatttaacgtaaatggtgatacaaagcaagcttaaatactaagagagatagccgaagatatataaccgaagataaccgaactacattcaacatttaaaccgcagagatataatctctagtatgatttatgggcttacattggccctagaatcgtatattgcttatcagatcgagagttaggttgaaacgctaaacatgtcagcgtattatgtgagatgagtaaggacattcagattgatgtaaaaaaactcttttctacttgctcattcttgaaaaaaaagatatagaataattgcttattcaatgtgacatgtaaaattgttcttcatggaaaaagtttcttgaatagaaaataagacatggctcgtatgatacgagtcgtatcaaaaaggaaaaagaaaataaaagacgtgggaatttggctttgctggcaacagaacactttcttttgctgcaagttaggggtgtaagatatataagttatctttatacatgcacgttaaaagttagaactggcttttggccgaccttagcgaggtagtcctctcgataatcttcctccaaactccttggctttatagcgtttttcctcttggctcacttcttcacgatttctacatgttttagttcaaaatctcgtgagatttgtcatttgtcatatgtcaaaagtcactaaaatagaacagagattaaaacaattcaaatgaccccaaaaggacctatcatcgaccatatagaaatgtaaaaaagcgagatgtagatcaagctactaccatatcacgctatctagtacttgattatttacttatctagctcttctaaatatttcaataatgaacaatatctcatcttga

SEQ ID NO: 14455 - DNA, 521 bp, Arabidopsis thaliana landsberg
atcaataaacagaatataaagctcgaaacactggaatcaacttattagacatgttcagttccttactatagcatttgttagactacccgtctagggtttgtgctattccctgtgtaatgaccattatacccctgtgtaatgggccttggcagattactctccctatttaataccactcccaacccctgattagggtgtgggttcagtctccaacatggtatcagaggtctaggtttaggttttctgtttcctctcccctgcgcagcgcctagcgcgccgacctctggccgccgccacccccgagccggcgagctcgggctccctccggccgccaccctattcctctcccctcccctactctctctcctccctaccttgcttcgtccgcgcgccagggtcgaccgccccgtgtcctggccacgcaggttcgcgacgacctcgctgccctgcgccgtgcccggcagacccgcgcgtgcccgacggcgcgctgtatcgactggccgcgactcgacgcgtctgag

SEQ ID NO: 14456 - DNA, 462 bp, Arabidopsis thaliana landsberg
aatactaggccagtacccatcaggctttgcaccattgttcttgatttctccaaccaatcgagcaaactctctcaccatacatgcctcttgtggaagctctgtcttaaccgtatgctcactcgggggactaacccacgcagtcacaaggtcattgaaccaagctttagtgctcgtggtaaacgacgcctcagtctccttatatgggataatgaagtcgtgtacacgaagtgtgcctttcgttccaatggcagttatctccattgttaagttagccaagaacgaacaatatatagttgcagttcgtccatcttcccaactcaaagatgctccacaggaaagtatcactcctgcttcattcaacacagcaccagggaaagcagtcacagttttcggaagctcaaagttattagctaaaagagctgctctgatcgcgtaccaccccgcaaacttttgttattcagg

SEQ ID NO: 14457 - DNA, 431 bp, Arabidopsis thaliana landsberg
gctctctcaagcagttttcagaagataatgacacacagctctaccagttaaaaacgaaccaaacagtctaatggtcacaggaagaaaccctgcaagctgaacagcacgaactgagaggcgttcaaaatcaggagaaggatatggctgcttgaaagcaaaacgtgagaagagttggagagcttcatcatatcttagagaaccaacttcatacacatgattcactcctgattgcacaagcaaacttttttcttgagtgattagaatgactctacttcctggagcaaaccagttggcgttctccgcgatccactttccttgttcaatgttgttcacaccatcagctatcaaaagaactctccggtgtttttgctttgcttccgccatttcattcatctcatgattcacacttctaaggatcttccccttcaaag

SEQ ID NO: 14458 - DNA, 1097 bp, Arabidopsis thaliana landsberg
cttgaaatgcacccaaacccacctcctcctcttttctgcaaatctcaattattaacattttccataatcaaaatcattaatcgaagcaaactaacaaagataagactaatttaataacaagttaattaaattaaagtttaattacccttttggatttgactgagagaagttgtggggaaactttgtacaagtcttcatccacaggctttggcgccttcatcctccgcttcacaaccggtgttggacagcttaccggcgcgttaaactcacgcgactccgtcttatagttgtgttgctgcttcgagacatttctcttcttctccgctggttcttgacccactttagcctagaaataaacattttccacgaacataagactaaattaagaactcaaggcgttgtgtgaaatacatgaatcaagagagtaccggcgacgagggacgatgataacggccggagctacaaggtggtggttgtcgtagagatcaccggcgaggtaaagatcacgatcttgagggtaagaagcatagtgaagaaaagctggttgttaagttgttgctgtctcgaaacactgagtgaatggaacggcgtcgttccaatcccagcttccaaaagctggcacgtgtcctctccgacagtactctcctcctccgtattcctgattgagaaaacataaaaagttaaaaactttgtaaaacccacaagaagatgtcgaagatgaagaagaaagaggaaggagcttacgtagtccattgtcgtagtagtggtgaatgggtttgattgatgatgtttggacctctctgctttaagtaatctaaatagaggaagagagaagagagagatctatgtgtaataaataaccagatgggtattttacattactcaacactgagacaaaagttgtcttaaagtctacttgtaggagatagagaaagagtagtgagggactctgtgtgtctctgagcatagagtggtgttttcaaaaatatagtgtagggtaagtgaaaataatacagtataaagttgggctttagctactcttcttcttcactttttttttttttttgtactttttaacaaaaatcgagcgtgttttt

SEQ ID NO: 14459 - DNA, 552 bp, Arabidopsis thaliana landsberg
atcaaccggaccggaagagggagatggaacttcttgattatcaaatcgcttcctcccaaattcaaaaaccgatgagttatcggtgttcgaaaccccggtttcttgcgagatgctcaatgttttgaagttctgccttctgttgttttccatcatcgcttgtaaaactgattgttcttgcgtaagaaccggattggaactctcggaaatgttgagagattgaggttggtagagtggaatcatctggagaaaatctggttggatggagctaagggaagggttgctgaagcaattgagtattgttcctctagtttcagcttggttggagaagcagggcacgtaaactggttcggtcttggttttgtcgttgtatggtgaagaatcagttaaaggtggtaaactagacccggttccgtaagaaccgattcggattaacgtcgaaatcgggatcttcttacctccagcagttttatgaaataccctgcagatcacccattcattctgccaaatggaaccaaaccccaaaaattatcaaacaaatggaaaaaaaaaaac

SEQ ID NO: 14460 - DNA, 647 bp, Arabidopsis thaliana landsberg
aagctaatgaaaaccaaaaaaagattcatatatcagttggagagagttcagtatcttgcctcgggtgtaggaatcctagaaggtcgacggtcaggagtaggctttgagttaacggttggaggagaacggtcaagcgaaagacgagtatttggcaccggggaagccgaattgctatcggatttagaagcagagagtttactcagtctaggaggtggtggtgatggtttactacgaggagtctccatcaaaccagttctacggtaaacatgaatcaagacaatgttacactaaacatcaataaaaaaaagttttaaatttgtggatctaacattattttaccaaaacaagagtaattaagttgctaaaaatcataacttttcacctgactaaatcaactaagttcccaaaagtcaaaacatttactagactcaaatcaattcagttacatttactagactaaatcaactacattccaatcaaattaggattaaaatgatcaactcaacaattcatcacaagaaacagatccaactgtcaaaatcaagaatcatatcatatccacttgtaatgaaagtagaagaaagactaaaagtactcacttggttctagatgccattgttgttgcaagagaagagctttaaaaaaaa

SEQ ID NO: 14461 - DNA, 704 bp, Arabidopsis thaliana landsberg
tcccaaaacctctgcgatctaaagttaacagcgctgctccagaaaaaatcatgaaacaatggtattccctaacaaagagaaaaatcgtaagtagtttgaatgctggcatatagtgtaaaggataaagacaagagttttcagttttcagtgaatacgtaccctcagtttcagtgtagatgagctcttcaaaagtttatttatgggaacataatgttcgtgagaaggatccaacaatatcatagatgtctcagcagcaaaaatagcagaaacagttgggattctttgccatggttcctcaactccattttgtacatacattagcagaagcctaagccctgttacatgcttgttcttcctacaattctacatcaaaaaagttatcgttaaacaaagaagtttccaccggtgtcctcagaaccaatttaacattagaataatcgagaacacatctgaccattaaacctttgcaaaaccaattacttaaagaaaagaaaagcattagtaggattaggacccgaaactcctacaaaataaatacttctgctatgtagcagtcgcattcacaagtcctctgtgcagatagggaaggccaaaatatttccctctacaatatcttttcccatcttttgtagaattgaaagttactcaaagtaccatttacaaaaggaacgatacatgcatacagataagttcacacaaaataa

SEQ ID NO: 14462 - DNA, 613 bp, Arabidopsis thaliana landsberg
gataccttaacaaaaccaataatggcaataattacgacccatgaaagcaggtagacaaggaaattcttgttgtcttgagagatattcaggtgataaacaagtccatattgatatatgaagaagcgtagtgagagcaacacttcaagaattctagaactcaatactgagtaacgtagatgtgcattctcactattccaccatgactcccagcttttctctggttgcactcctatgcctccttgattcttcatccacctattccagtcagcccagtcgtcaacaattttttgccaagcaaaaccagctgggttaaaaagaaaaggagtaaacagccaagccactgccataaaccatgttgagtatgtgatcatcacatgcacgacattgctaacataagatctcctaaagatgtggtagactatcaaaaggaagatcaactcaaatcctttgacaaaatgacttctggaatacaacttgctaattctcagtaaagcttgcatggaaacaacaaatttacgccctgtaggcaggtatttagcaccgccatgggagatagtacggccgcagtagtgtgcttttgttcaagtgagaatgtgaagaaactgatgctact

SEQ ID NO: 14463 - DNA, 506 bp, Arabidopsis thaliana landsberg
tgatgttatttgagaagcattgcccgcgtatgcgattaaaaggattccagggttcagcaaaagtttttcatttcaggtcactgactttgctaaatacagagctttggccgattcaatcattgagttaattcctgatgagaaacgtaacgtttcttcgagtttcttgactaagttgttacgagcttcgatctttcttggttgtgatgaagtagccgggttaaagaacagagttggtgagcggttagatgaggcgaatttgggcgatgttttgctctatgatgttgagttgatgcagagcttatttgaggttatcttgaaatcccgagacccgagagaggatgatgtaaccgcaaaagcatcagttgcgaaacttgttgatggttatttagctgagaaatcgagagattccgataatttgcctcttcagaagttcctctcacttgcagaaatggtctcgagctttcctagacagtctcacgatggagtttatcgcgctatcgacatgt

SEQ ID NO: 14464 - DNA, 961 bp, Arabidopsis thaliana landsberg
cctcggcctctatgacgagtggaccctgtctgaccagaaatgaggccctttcgtgtctctgatgatcattcatatgctttcgggggaatgcctgctgaaaaaagccgtggcgttggatattgcttgggttgacatggtggaatatgaaaatggggttaaggccagaactcactcaacagtgacctggatgatatctttggtgtcttcattgaattctaggagaggctgatgtgaagaacagaataaacacagagatcatcagatgagaggagcgacacacccagatcaggaagaacgattgtcatgttgtggcaggaaaagtttttgattcatataaaatcaaagacagtaagatggttgaacctgaagactttggcaagaaatgttgtaccatggagcctctgacagttggcgaccttcgagtgaaacatggtaaccaaagccctgaacaaaagagagaagagggtttcagaacatagctgaacataatcataaccaagaaaatcaatgcatgatctaccatggtgttagtgttacaaaataagacctgatcaatctcaccttacctgattgaaatctgagtaaaaaggcaagacttgtggataagtttggactattccccatgacttctcgacaagtgaccaccatctggagagaaaacacatgcatactaataagatccagcgtctcctttacagcaatagtaaaaaaaaaggtttaagctcacagtcacagtaatgctagttcaaactttaaagatgacaaggagattggaaaatatttaaagtattacttattctgagctgtatgaaaattgggaggttgtgcagtctcataaacccatccaggagcaaatatggcagctgacacattgttttcttttagcaaattaagagcagcatttaccttgcatggtaaagaataagaggaaaataaatatgtaaggatagatcattgtttt

SEQ ID NO: 14465 - DNA, 576 bp, Arabidopsis thaliana landsberg
tacttgctctttcttgcctttgtttgagttaattgttgagttgaaatcttcaattttgacttttatgaatctgcatgcacatacttagcaaactaattagatctcaaggttgtgttggtcattaatcaccaaaatcaatctagaaatggcttatagcacatttccctttcaatgatgcctcctccgactgttaggatactgtagccacgcttgggtcacccggagcctaccattacgctctagcatgttctgcagcagattattcgatgccatttgttgactttccgattattgagtgtttgagtcgacgtccacctccatgtcatggtggatgacataagtgctctggcatacctactattgtgtcgtattttgagtctcatgtcgtgtcagaggttgacttgcacgttcccacgtctgtgatggccgaagcgaaattaacccagtaatcatgtacctaggtggttaggcgaagtatccgacccttggctttgagcgttgggtggcaaaactccaaggcaggaacatccgagccttggcccctctgtagtcggaagtgggcggttgagtgagatg

SEQ ID NO: 14466 - DNA, 658 bp, Arabidopsis thaliana landsberg
agatttcacattctcagcctacaacaacaaacatatataattatgcattatctaataatctctaaattgaccgatattgtatttgtacttatatttaacttcctagagttctcatattgatggaaatgaaactgaccttaggaggctcttgagtgttctggttgatcaagccaccaaatccaggaaatatacccattccactcttaaaatttagtcgatagagagaaaatgacgatccaaagagagtgtccgagagaaagatgatatagagacaaagagatagttgacttaaggagggaaatatgccaaaagacaaagagatggtttcagggaccgtagataaaagttggattaagatttagacaaaatatagtaagaaactgaaataataagcgaaggtgaagtgtgtagggtacgtttacttacggcagagaaaaaacaaactaggaagctcaattcttgtgacttctttcttgacgtacaagcaagagctacatgaggaatgttaatggacctataagcccactaggattagtgagggaatgaaagattttcttaaaagaaaaaaaatcctttgcggctagcgttgatatagatactgtagatagaaggcacaatttagtaagggaaaaaaaagagtaaatcaaaatcaaccaca

SEQ ID NO: 14467 - DNA, 486 bp, Arabidopsis thaliana landsberg
tctctatattgcaaaattgtattggaagatagatgaggtgaaataactatttaaatccatgagagctttgagataaaggctgataagcgatttggcacatgtgaggtcacggctagtcgaataacctttcacgagcgagtcaaaatagatgatgtagtggtcattgtcaaaagacaaggtgacgttgaagaaggttccataaccgaggttctcaccggagatgattgataacaaatagataaacggtggatttagagatagaaagttaaagaagcttcggtaactaccacttcatggagacggtatcataatgatgttcttcttcaacttttcaaattcttgaatactaacgttagtgttgctggtttgtacttgctaggttcaagcaaaatttcaacgaaagaatttgagatctcaaaagccaatattcgaaacagaagaaagttctttttaatttttctatttatgcaatttagattaaaaatt

SEQ ID NO: 14468 - DNA, 712 bp, Arabidopsis thaliana landsberg
ctgaaacaccaaatcagactgcccttcaaccagtgagcgctcttcagatatgccttatcatgtttcaccttcttagtcacaatccttactccatcaatgctaatgttgaaatgctcggaaataggagtaagaatgctaccaatccgcttaatctctttccatattccactaaaaagcttagtctttggagattccaagtgatgcgcaaagacggctccaaagttgacatctctgtcacttgcctccatctgtagactctcaaaaaaagaatctccaacatcataataaagcataagtagctcatatagcctcatcttaccaggctccatcctagacaagaaagtgttactaatgagcctagccaagtatcgcaagacaggatgacaaatctctgaatgcacataatccttagaatcatagcttccattgccaaactaggcccaaaacatctaagcatcgctaaactgtccagggatcgagacatatgaagcatccttatcaaacccaaaaacatcacagatatctcggaaagagtatcataatcatctttgttaattctcggttgatatcgtcgtcccaaacccgtctagaatgaatctgctttcctttaaatttcggccgagggaaatgagaaaccagtccttgggagcctgcatgagactgggccgacgatggtggtacatggccgacagtggtagagcgtcgccgtgtt

SEQ ID NO: 14469 - DNA, 794 bp, Arabidopsis thaliana landsberg
ccaaggttctaacatgatcacaactcgccctctccaagacggctgcaactcctctcgcaccagagaatgcgcagacgtccccacgatcacttaaaatttcctcaaaagcttcggcttcaccattgatccactcgataacgtcctcagggtcgcctcgtatgaagttgtctttgtttgaataggcgcccacgttggcaaagctagttttcatctttttcacgcactccacagatttttcaaaacatctttctttggaggcgtgaagctctgcaactgtcctctctaaataatttttccaatattcgctggcatctcgattagcttcagcaacagcgcatttttctttggcctcagctaactgtctccgaagtcttcaatttcactcttttgggcctcagcttgagctttgaaactagcttcgtcttcttttatttttttaccaatgaaatcaatattttatccttttcaaggccttcgttccttagttcaatcacttctgaacgaaggttgttcagagccattgtacacccttcatcttcgatatttttctgtgctctgagggcattgctaaggatcaagccctgcaagaggagtatagaattaagtataaacaaacgaagtaattcgttttcaaatacaaaattgattttcatacctttatgctattatatgctaaattgtcagccagttcatcctttgacaatactgagaggcatcttctagcttcggaaattcgaagcttcgacctatctcccggctgacggatatcctgtgttaccgggagacagtcaaaa

SEQ ID NO: 14470 - DNA, 637 bp, Arabidopsis thaliana landsberg
aattctttctttctttatatgagttttggaaaacaataatagggttcatgtccataatttatatgtatgtgtatagtaattttaggatatgttacctatttataaaagattaaaaataaacaaatttcataaatataagaatcagtattgctaaatttgttatctattttataattataaataaattttcatcaacacaaaaatcagtatttactatttgtagaaatttataaatcaagatatacgtacacaagatacatgcatatagcaattcattattatattagttacacaaaaaacgtcatatgtcaatatttctggaatacatccaattttgaataataagataatatcagagccaaatggattatagatttgttacatacactacaagaaaacatgcgatttgcgaggtaaatctgcgatggaaaatagtcctcgcaaattgctagagaattgcaagacgtttacaaggaaagagaacaacctcgcaactccgtcgcaaaatttggaacgaacatttccctcgcaaatttgcaagacatttgcgaggaaattgcgtggaggcgaggattcctcgcaaaaacgtcgcaactttgcgagggaattgcgggtaaaagaaaactcttgcaaattg

SEQ ID NO: 14471 - DNA, 665 bp, Arabidopsis thaliana landsberg
gaaagtgaggactttgatcaccggaaaatatcatatccatgttcggtgtcaggcgttcatcaatcttggaaacaaagctgctggtgttcttgtcggtgataacgccgttaagtacacgttggctaataaatgcagtgtgaacgtttagaaagtttgacggcgttaagttgctttttttcttgaaattcaccaaacttctttccaccaacaggatactatttctgtttctacatatctttaagatttcactactttttggttgttattaagcttattgttgattatagaattattacaatcacgaaggtcagtggttggatttaactgtaaatccactttataaagttgaaataaaatggaggattgggttttggttcttttatagtttcatttcgtttttctgtttcctttatgatttttactaattcgtaagttcgttttaatcaaagcatttgtaaattgcatacgtaacaaggcaataacttatgacatccattccctattgttttacttttgtattaaatatgtaagggaaaaatgtcctaccttcaatttctataagttgtgaaaagcaatgttatgaggaatatattttgctggtagagagatataattcgattcttatgatataattatgaattaatataaatcatatggccctgata

SEQ ID NO: 14472 - DNA, 649 bp, Arabidopsis thaliana landsberg
acaactcaatcagcacaattaatttgataaaactaattaaatatgttggcattactataaatatgcacatgcaaaattgagtatagttatttttttcatgtgccaaggcggcgacttcacccggggcaacgacactggcggcgagtccatctacggcgccaagttcgccgacgagaacttgaagctgcgctacacggggctcgacgtgctctccatggccaacgcggggccgacaccaacgactcccagtttttcatctgcaccgcgcagacgccctagcttgacggcaagcacgtcgtcttcggcaaggtcgtcgatggctacgccatcgtggacaagatggtggttgtcggttctcagtcaggtgccacggtcgagatcgtacgcatcgaggactgcgaccagcttgccgacgactgagggactcgttatgcccgattgtaaccaaatgaatggatcaataaatttgttttatttcttttgtttcatgtggagatggataccggcctgtaggtaattatggatggatggagcggtgatttgatcaagacatctgtatttgttactcttggcatgagcgcagcctgatgaccaagatccacagacttctgatttttggtggtggtttttttacacagaatgatagtaa

SEQ ID NO: 14473 - DNA, 188 bp, Arabidopsis thaliana landsberg
gacaagaagaggtcccctggtgacaagggcgacgacaatgacgaggagttcctagaggtccacaactgcttcatgatcttcggtggaccaacaacgaacctctcagcgcgacaacaaaaacaagagcgcacatatgtcttctcggtcgaagtggcagcgtcggtctacctagactggttagccaaagt

SEQ ID NO: 14474 - DNA, 429 bp, Arabidopsis thaliana landsberg
gagaaggtcatattaatattaacttacgggctgatttatgttctcaattctcattctattattatgaaattatctgctttttttcaaaaagtgtgttttaatttgaggaaatgtgtgaatgaagtgtgagatgcaaggaagaggaataataggaagaatatcatcatcatcaacatcatcagaactggacatagatgacaatgaaatggaagtggtgactgatttattcattggacctcctgagactcgacacttcaaaaagtttcctccttcaaactaacatatatagtacaatgcttatatagatattatctagggaattacttttttccttgaagaaaaattgatgttacttactgaatttagcagttgcataaaaaaaaagattactgcatttaagccttgctttttttttctttttggtttttt

SEQ ID NO: 14475 - DNA, 499 bp, Arabidopsis thaliana landsberg
  unsure (1)..(499): unsure at all n locations
caaaaacaccacacgataatacaaaagaatcttctgaaaaaaacgcacccttctgtaaatggggccagttggaacccatcctttattattccggcacaaactgcaattgcagatcccgcgacaagcgggacaaatccagtctggattctcaagagcttcaagcacatgttcaccatatctgttcatcaaaaatattaatatacattcatcatcaataacagaaaaactaatagcagccaacctcatgaacaaacaatcaccacagaactgtccttgaaccaaattgcattcactgcactgtgtacgatgccccatcgtcttctgcctgtaagaaacacacaaacacacactaaagcattacagaaaaatcatttcagagagttgcaatatcaagttctcnnnnnnnnnnnnnnnnnnnnnnnnnnnnnnnnnngacaagtcttaccgttaaacggctcataaatccgtttgccattcttatcataggcatcaacaaaac

SEQ ID NO: 14476 - DNA, 619 bp, Arabidopsis thaliana landsberg
agtagctagttagaattttataattgaagtttattgttatttttagaattcgtgtcattgtgaagaatcctctttggaataaaatgaagccaagtaggggagtggagtggttccattggctaaaacttttacactctctctttctctttataacacaaaccacaaataccttcttcttctctccctttgcttcacaatctctccctatctatcttactgattatctctctctaccatctgagttttgcctgttttgtattactttgacgacccacttttgcagattctcaaggattcttcaaagtcttagtcttttgtgtttctttccagattcttcaattaatatacgctataatctctcactaaatcaggttctttgattccatcattaaactattcgttagttttcccagtttgattcctatatatctttagatcctataagaagcttcagtcttttactaaacccacaaatcaagcttccaagaattagaggaaaaatattaagtactttattttataggtagaacttttatctcgtagcctttaaacgatggagactctgcatccactactctcgcacgtgccaacttctgaccaccggttttgtagtttcaag

SEQ ID NO: 14477 - DNA, 836 bp, Arabidopsis thaliana landsberg
tcaaatccaccaccataaggtctccttccaccaccaccaccaccaccactccaagagccatcagaatcatctcgatctctcccaattcttccaccagaacgaccaccataagatgaaaacccaccgcctaaacgaccaggttgcatttcctcctcggaacgttgtctaggaccagtaggtaattgaagaatctcttgctgagtcaatccaacagagtttctacctccaggtgctgtataagccctgtagtaaactcagataaactcatcttcttcatcttcctagacttaccactagtcgcagtcgcagcagcagcctctctcaggctaggaaatctctgtgtatccgccgtcgcagcagtagcttccgccgcttgttcttcatcggcacgctctgcttcatcagcccaagctccaattccaattccaccccaagctttcgacatcaattttgaaatttcagaatttgactaattctctcagatctgaaatcgcaaattcaaatcgggaaaaagtaatagatctagggttccgatgaaaccttgaaaccgtcacagaaatgtttattccttttgcgtgaagattgaaattttttgggatttattctctttgaagcctttttttttttttttttttggtgcatgcttctcaacgaaggagagatgggtggagaaacaagccatcacgcgctgtagaagcgagtgactttttttttttttcccaagtgaattttatgaaacaaaagatacaaggcttaaagcctacaacgattgtgcagcaagaaaattggagcccaacaatagcccattagagtaacatctacagcagaaagattct

SEQ ID NO: 14478 - DNA, 1371 bp, Arabidopsis thaliana landsberg
  unsure (1)..(1371): unsure at all n locations
acacagagtttgaatcgaggttctatttaagaagatatgtgcgtttcttcctagacaagtaactgcataattttgaatcctagaaatctatttcgtattggcttcttcgaggcgacgtttggaggtctgaaatatgccgatcgggacaaaatttggtgtagagcttcatggtactactggctagataatcaactgagggattaaaacattaacggttcattgaagagttattaaggcgtctttaaggcagctgaaacaagtgttctacatcagcaagtggccaaggtgagggtgtgatctgcggagattcgattacaagtttctatttttatgcttcatgattcattgcataggaatagatctgattgcttagtaataatgaattgttatttaggattgatgatatgatgactgttctagtaatataggatgattgaattattgtacttgtcagaacaagtaattatatgtgttatatgagaaagtggaatcaccaacttttgagatgatgaaaagtggaacagtggataagagaaaaagtggaacagtggaaatggtctacattgaattgacggattctttgtagctcaaagactaacgagtccagtggaactagataggttcaaaggtcaaggagatgaacgaacttggaaatgatgtggagatcttgcttaagcaagaatgagttgtgtgttatagttttgcatagtgatgcggactatatgagtgttgtgtctatttctatgtgattgttgagtgtggtttaaaggtggaatcgtgtatcgtatttccagtggacggaaaggatcctctcactgagtaattcattactcaccccctttttctcatttttccccaggtcacggtgataatcgtgagtactcactcaagtctgtctcgcttgtngggttttttgggaacctcagatttattctctactattgttattttttatacgatttattaaagagttttcaatgatttaagattatttttaagacaattttgtatttgaattaagaaagtggaatcgaggaaagatataagtaaggggaaagcgcgacgtctcaatgttgtgggagacgggcgtgacaaatggtatcagagcggaggttaaagtcaagccggtgctgacccggaaggctaagtggaagagttttcttgaaagatagattttaactaagtgttttaaaaataaaaagtttttggtattttgataaacgggaaggggatttttctaaaagataaaaaacaccaaaggagcgagacttgcgtttaaagttgttctttaaagtttaagttttcatagagggcatatcatttcaatgattgaagtagagaagttaaagtgaaaagaaagcacagtcgatt

SEQ ID NO: 14479 - DNA, 626 bp, Arabidopsis thaliana landsberg
tcgaagagtcttctcattccattgcgtactaagtcttcgagtagagtaagaatttaagttttaagataataagttttattcgcctattcacccccccccctctaggcgacatccagatcctgttcccgggtcaaagggaactttcacacacatgttatatgtagggatgaaaacggacataaacggtcgaaacccctctttcacttcagataccgtattgttttatcaaaaacagaagcgggagtgatatagccaaaaatagagatagtaatgaggtcccgattccagattatccgcgaggaattctttcttaggggatagagaagtttcttcctccacaagaatttaaatgggaaaaatactctcccgataggtaaacagagacgggatgggaaaatattccctattctcattctccatgggacatgttaaacttgcatgtgatgatgttttcgtgtagtaattaatgataaaaataaataattaacttatcaagagattacttattgtacaaatgtgtttattttgatgcacacataataatttatttcatcttacaatgtgtataagtgacaatgttttgcattaataacaaaggacatatgttctaactattatttaagtga

SEQ ID NO: 14480 - DNA, 333 bp, Arabidopsis thaliana landsberg
aaaagtcctcctgtctcatatatgttaaagacattctttgattaaatgatttctttcttttttacaggagaaaacaatgttgagtactttgcaattcaatatctcgttaccgacacaatacccgttcttgaaaagattcctcaaggcagctcaagcagacaagaaggttagttaaaaataatggacttatgaatcagtttaactagaagtttgaattttagaaaggaactaactgtgaaactgaaaacaaaacagtgtgaggtcttggcgtcgttcttgatcgagcttgcccttgtggagtacgagatgcttctgtttccaccatcattacta

SEQ ID NO: 14481 - DNA, 912 bp, Arabidopsis thaliana landsberg
agaaagagtaaaagcacaataaggctcattattgcatagcataagatatgagaaaaaaagttctacagctattacaataatgagagctcgtctcatcacatcataaaagtgtttatggcattcaagccatgcatgcatcaaatagttattacagaccaagtgttcattacaaaaataaagggtactgcataataaactttctccccctttttggcataagaaccaaaaagagagagagaagcgccagtccaaggatcaccagtgaggaggagggtgatgaggagcgaagaggtggtgcgccaggtcagagacaaagtgttcctctccagactgggccagaggaggagcactgccagacgggtcctggggcggagggtaagaggacgattggcccggatccccgtgatatgggggcgggacaaactgctccggatcatcaaaataagtttcttcttcgtcgacgtcatcagctgttgaaaaaggcaccccatatgcctgctggtaccactcgttgacatctggaggaggagggtggagaggtacatcaggagagcggggggcgaagggagtacccaaagcggaacttgacgacttaggttgtcgtcggtctctcgctgacgtcgagccacctcatggacatctgcagcaatgtttcagcacatggagaagaaagccgcaaacccgtgggccaagcgggcacccatcccacggccacgacctcgaccacgaccacgaccacgtggtgtaggagatcgcggccaggggaagggcgcgaggaccagcagcagcagcaccagcaccggcagacggacccgcagatgtatgagcacgagaactagagggggctttcctgaggcgccatgctggattgttgggataatcagaaaggggtgtatactgatgtgggtactt

SEQ ID NO: 14482 - DNA, 491 bp, Arabidopsis thaliana landsberg
gaaatgaagcggctaagggctgccagcaacccggtaagcttttggatgtccttaacatgagcgggaggcctcattacctcaatagccttgattttctccgggttagcttcaatgccccggtatgaaaccaggaaccccagtaacttccctgtggagacaccgaagatgcatttctccgggttcagcttggtgcgggttgcccgcagcttgccgaaaaacagggccaggtcttccactataactgacccttccctagtcttgaccacaatgtcatcgacgtaaatttccaccttatcccggatcaggtccgcgaaggtcttgctcattgcccgtacaaaggttggcaaggcattcctcagacctgtaggcattacaacataaccatatagtccatctactgttacaaaagcggtatggttcctatctctttagccatcagatttggtggaaccagagtaagcgccaagaaggatgagaggtcacacccgaag

SEQ ID NO: 14483 - DNA, 545 bp, Arabidopsis thaliana landsberg
atttgtaaaaagcataactcctaaactgtcagacctatggctgtaaaattttaacacaagtaagataatagagttgtctacaactttcttgtgaacaccaataactgatttcaacattaacttaagcaaacattgcaatttctgaaaactgttctgaatttcgacagattcagatgctgggcttgtgaaaaacacaactcctaaacgatcaggtttatggctgttaaattttagtacaagtaagataataatgttatctacaactcttctatatgatttttctacagaaaacatgatttagttcatcaaacaaacggcacaactaaaacagtgcgtgcagtccaaaacaacaactataaattttagctcctttttactttaagaattgtcatgttctagagactgaaattactctaacactttactatttattagagttgaaacaaacaaattaggaccaacaagtcacttacaaattttatccgagtcattccgtgcgctagagttattaccacacaattaacaacacatggcacaaataaagt

SEQ ID NO: 14484 - DNA, 713 bp, Arabidopsis thaliana landsberg
aaaaatgggattctatttggtccaggtaccctaataaagaatcacgtgcaactaactagttaactgtattaccctaacttaatttaatatcagaagttttggtaataatactgaaacacatttcacacacactataacactgacacaactctctatataaccatgagctctccttcatttcatcctcaacaaattcctacaccaatatctttagctagagagaaaaaaagagtgaggaaactagagagagagaccacccaataatggtgaggttcgagaaggttcatttagtgttagggttagctctggttctaactctggtcggagctccgaccaaagcccaaggacctgtttgcggtgcaggcctgcctgacaaatttagcagattaaacttccctgaaggcttcatttggggaaccgcaacagcagcatttcaggtccactcttatttcttagatcatatgattttaatttgttttgggtaaaaatcgttttatggttagtgatcatttatttattactatgtggttgtaatataggttgaaggagctgttaatgaaggttgcagaggtccaagcatgtgggatactttcactaagaagtcccacgtatgtaattgttttttttccgtattgagtgggatactttacattttatcgatatatgaatgtgtaaacacattttcgagatagatgtgaaatcatacgctgatg

SEQ ID NO: 14485 - DNA, 565 bp, Arabidopsis thaliana landsberg
tcagcaagccacacatacccaaacatacccacacatataatcacacaagatgagctttacctgatcaatcgcccggtcgaacctctcccgaatcgtctctcggccgtgagggcccacatcctgtcgaagagcgcccccaccaaccgcttcagaatcgggtcctcgacctggaagatttcgcgttcgaagccttcgtccgactggttgaagacctcgaagtgcccgcacccctcgcgggacaaagcattcatggccccctcgcaggtaacgagggaggcaaaggacatgaggcccgtcacgattgtcgggagcacccccaactcctcctgcagccactcaaggaagcggaggccatctcttggccgggcgctttgaaggcggtggtccacgcacccagctcctggtacgcgttcacgagctacacatgcgtccgctcgacctccgcgcgcgtcgaggcctcggttttgtcacgcggttgccagggccgtgagctcttctccagctcctcggcgcgttgcgggcgagactggcctcgccgcgcaagtttggctcggttgagcagcat

SEQ ID NO: 14486 - DNA, 614 bp, Arabidopsis thaliana landsberg
ttctaataaaagcttcttcttcaaatagtcccgtcaccgattagatcctgaacatcaatcggtaccggaagtccaagacgaagcgattccatgattcgttcgaagacaaggacatggcaagggatttgtagaactcctttttgctcgtaaccatactcttgagcagatcggtttagtaaaccgatgaaaaccggatggttaagtagctccgcgctaacgacgaacctctccatctcgtcacctacgtagaccggtacgtgtccttcgggaacagaagaggtttgcttctttgagcggcgagtcaccgaagaacggaggaatgattcggaacggcggctaggtcgctgtgaatcggaacggaggagactgtattgagcggaatcagcgacgcgagagagacgacggattagttgcttcatcgtcttcgtgttgtgactttgagagagagaagagagaaacttttggtgattggtactgaaaacggatgtttgagaattcgagagagaatcaatgagaattttgtgaaggagagagtgagggaaggttttggattttatattgagtcgagggtattttggggaatgtgtatttgataaagtaggtacggggaagga

SEQ ID NO: 14487 - DNA, 964 bp, Arabidopsis thaliana landsberg
taggtttttccataaatccttcccatttttaaattttcttaaattttataatttaatttccaaaataataattgtttttggtccaatagtccaaaaatgatttcctttttggatcgatgatcaaacttataccgattaatgtttttgggctgtaggaggccccctgtaatttagcttttccactaggatttcccatactttcagcctatgccctattccatttttctcccaatgtatataattccacctaaatcactaaaatcaattaagcttctcaacttccgtttgaaattgataatcgcattttacaatcgttaaccgcaatcaaacggttgatccaaacacgatctattaacactttctcaaagagaaaatccaattcgggttataacattttttttctccaaaatagataagtctaatcagcacaaaactagataagaaacgatatttgaatctctaggttttggatgtgtcccaccgtctccatggctcttctccggagttttacaatgaaggtcgcacgtgactactttcattcagttctaacttatggtaaaagagattttttgtattgtaatttgtttgtgtgttttgtatgtctcagatttgttttaaattttagttttagttttgtaaatattttttgagtttctaaattccgattcgggaaatattgatagatattatgtagtttgtttgctcgagttttttctcctttgtttaccttctttaatcttgtctccaggaatgtttttgtactcgttagcttatctgtcttcagaaatgttcttgtactttccgactctttgtatttcataataactttcctccaaactggtcttgctcatataacaaacagatttatcaaattttgtaaataagtaaaaaacagtcacatgacaaaaacccaacacaagtatattaaaaaggtcaaataaaaggacaaagtcatgtgcaaaga

SEQ ID NO: 14488 - DNA, 1003 bp, Arabidopsis thaliana landsberg
gtgcccttatgaccaagcgtaaccagcatgcatttgcatcttcttataggtacgtgaatggaataaatacagtccttagcggcagcatacctgtcctcgggaaacttctaacaccagtttacttccagtttttccttgacaaggtaattatatagagtgtatgatttgaataccttcatgatctgatggttgcggccttgtgcaaatttaggacccgcatgaaatggggtcatctccttggttatgacttttacaagaatataaaagagattttcatgctaccttgtataactctgtgcagctggcatcatccctaggaccacggttctatgctaatattttcagatgcaagcaactatccgaaactggagctcaacaggttagcctgcatgctctatgttcctccatttggatgcctctgattctctctgttgtgatttctctaatagtcaactagtgaattgcctagaatgatgttccatgtgaaaaattctgtttatcaggtgtatccatagactagagccaaactcagtctggttatatcgccttatcgcttacactttcttcttttgtcgatgttaaagtgactatgtttgataatttcctaattgtctagtatgattggagtgttcatgagatgttatgtttctgagcccttgttttttagttgtctagagttctaatatgaattatatgtcttttggtttcacagatgttactagatacgcaagctgtgaagtcgattctactagaaattccttcccttgccagacaggttagctcatcacaaccaatttatgtcatttctgttatctcggtatgacgtattactgggtatcttctttgcccaaaagtagaatacctgatgcctaaaccctttggatattcttgtttcggtcatagagccgatattagggataacgtatatagagcattagtcagtaaatccatgacgatttacttttgtttaagtttgatatatcatttagtaatacattgcaga

SEQ ID NO: 14489 - DNA, 742 bp, Arabidopsis thaliana landsberg
cgatcggagagcgttcttctgatcatcatgtcctccggcgacgtaaaccttcgtcgaaccaacagaagcacaggcgaaaaacgatctcgccgccgacatcggcctgcctcttctgaaccttcttccgcttccttctccggcaaagaaatccagaacaaaaacatctcgcacaggctgcaacgtctccggatcccaaccgccgattaacaacactttccccgcgtcctgaatcgcaacgcattcgcagaacaaaggaatccgttcaggaatcgcgactcggtgccacgtgtccagcgttgcgttataaacgcttaaaccgtaaagtggcgttccagtaatacgcggttgtagcagctgctgcgtcatctgagactcgccttcttcttcctctttcttcttctgactcatctcaccaccttcaatcatcgccggagacggtggtgaagtcagaggttgaacaaggcagagaagagattcagctttaccaaaacctatccgttccttgataaaagaacgactggagataacgcatttccatgatcggcaaacagatttgatggaagaatgaaactgaaaaggaactctagccaaacactcaattgctaattcctctggtaaccctgggattaaatctcctctaatctcacctgatttcttctttgacactcccattagtaaaaacctaattagagctacgagacactaacagattgtaagatagagaatctatatatagatagat

SEQ ID NO: 14490 - DNA, 570 bp, Arabidopsis thaliana landsberg
ctcagctctcaaagcagatgcaatgagagtagaactattataaaccaatccgtgataaaactagctttcctaagaaccctaaaccccaaattaacatctacacacaaaaggtagacaacaaaggaaagaaaaaaaaaaggatagagcgaagttacatacgcaacaatgagattgagttcttgaggacttgtgaagttcccgacgcaagagtgagtgacacaggtcggtttctgagccgtaacggcgtagttccatacgctcatcttcttcttcgcccagaaaaaaactaggggttttgctttctattgcaacacacgtgagaaatttcccgcctcttttataccaagcttctgggttctctttgagatttaaacgggaaaaaaataagagaaagagacggagacgatgcaaagggagagaggaggcgaagaagaacgcaacaggttaagaagaacggccggttcagaacacaaaattgaaattttaaagacggtacgttccggtttggtatataactggaattaataggtttacctggatctaattcggcccggcccaattgatacactc

SEQ ID NO: 14491 - DNA, 649 bp, Arabidopsis thaliana landsberg
  unsure (1)..(649): unsure at all n locations
tgggcgaatgaatcccttgtctagcaactcttgtaactgccttttcaattctgccaattctagctggaggcattctatagggtcttttggatataggggcagtcccgggttgcagctcaatcacaaactctatgtctctgtcgggtggcattcctggcaattcatttgggaaaacatctgggtattcgcataccactgggattctctcaacaggtgactctattagggcgaaggacatgaacgggtacaactctggttaggcaagtacaatgtgatttctccacaaaaaggtgagtgtatctcaatggctctcactgctacatcaatcaaggcatggtgtcgtgataaccagtcagtccccaagatgatatccacgctctccaatcccatgatcaaggagtggttttaaatacaaaactacccaattttattggcacgcgccagttgagttgataggtggcaacctgcctcctggtgttgcaatcgtaatgcccccatttgtgtggtaaaagttagctggcatttggcgtaaattttcgctgatgaactatgtgaacatctgaacaanaagaataactgcaggataatcaaacggaaagatacggtcatgcgggtgcttactggaatgcagcatagtgtgagtcagctg

SEQ ID NO: 14492 - DNA, 606 bp, Arabidopsis thaliana landsberg
gaagtttctgtgtatagattgtgctattaccctaaaaacaaagaagatgaaaaaactaaagatgaatgatttatttttcattttcatttgtttttactaatattttaatcctattcttataagtgacaaccaattgcactcataaaaactgacttttggcaattattgtatctttaagattatattttagttagatttcacaccgtcagccaaacaattgggaagtctgtttctcatggaacattttggcattaccacacatatcaaaaccgatttcgttgtcttctcattttttttttttgccatcataaaaacaatgaactatatgtaatcccaggcaattgaggaagattatatttttcatatcgaataagactcaaaacttatcatccaatcacacacatatatatgtatatatgaaagacgagagatagcattttaattgtttagggcctccataatgttaggaacgtatatgcactttgataatttaaagccaatagagccaagaaacctgaatatttcaaagaacaatcgaaaaaacaagtaatttgtcagtttgtcactgacaaaacaaatccatatccaatttttcaaccattattc

SEQ ID NO: 14493 - DNA, 567 bp, Arabidopsis thaliana landsberg
  unsure (1)..(567): unsure at all n locations
cgaagcatgccaaaaagttctcccctcgctcaggcagccctttgcaattcaccaagctcatcgcccatacatggccgcttcaacgctgggggctggacatcgttggactactgcctacagctcaagggaacctcaaattcaccttcgtcgccgtcgaatatttcacaaagtggatcgaggctagagcagtatccataataacatcgaagaccgctcaaaaattcttctggcaaaacattgtctgccgcttcggagtcccatccgaactcatagtcgacaacggcaaacaattcgatagccaagacttcagggatttttgctttttcatcggcaccaaacctgtcttcgcctcggtgtaccacccatagtccaatggcatcgttgagcgggccatgacgccacaagaaataaagcacgagtcgcctagaacaaacacatcagcaatccccgatgtcgatgaccaacttccanagacctcatcgacggagaccgtgtcctcgctctgcaggccctcgacaggtatcaggttcaaccaaggctggcgcgacacgcagtcgtccaagataa

SEQ ID NO: 14494 - DNA, 733 bp, Arabidopsis thaliana landsberg
tgcatctactaggtaaaacttcaaaacaagtgtgatgtgatgatttgaagtattcttaaccttagggtagggtacctaaccctgggatcagggcatatgggtaaaagtagagccaaattggacaatacctcataagtcattggaaatattcataagggatcaagagttatggatttgagtgacacaaaaaccctagagtgctcaaaaccttaaaagcccccctagaaaaccctaatttgtaccctaggggtgaattcaaattctatacacttttggaccaaaatgtaaatatcaaagtgatagaacatcaaaaatcaagcaacttttacattggagaattttcaagtagtgtggagtaatttgggcttatttgcaaaagatccaagcacacttatgtggctatgtctgaatttaagtgaaattgagccaaatttggagtcctgtatttctcaattcatgaggattttgccctgggttaatacatcaaaattgtagagctatgataggagtacaactttgcttaagtgactaagcattgatgacattcaaaatttggagataaatggacctgaagtctggctatcagtcagtcctaaggctgaattttgactgacagtgaagtcagatggactttgtgatccattttgagttggatccagtggctattcgattgtggatgctataacacaaacaaagatggattataggacacaatttctctgttgatagatga

SEQ ID NO: 14495 - DNA, 851 bp, Arabidopsis thaliana landsberg
taattagatgagaaagagattaacatatgtacgtgttgcacttggtgttgaacctgatttgggtactgtaaggtattttgattccgcatctcctaggaatcccagcagcacggtcagcgttgagaccagggccgacgtttctagcggcatttttaatgcaacgacatgcttgccgacggtctagggttgtaaggaccatgccgttaagctttctaacaccattgcagcactgtgggcctgggctagtgataccaccattggtcaagtagccagtgcacggtttcaaattgctgttaacttcgccacagctcagagccgcctttgctgtgattggaccggccgcaatcacgaagacaaagaccaagcatcctaacttcataagaccagccatatatatcctttagttccagtaaatggtttcaaaaggagatgggtgatgaagagagttgtggagtgagtgttttatatagagacggaaattgtgttaaaaaatgtgtatgcgttagagtatagaagaaaggagtagttggttgttactctcatttaatttgaggtcctcccacttatttattgatatttcaatttaacttctatattttcagaaagtgataattttctcaatataaattttattaacgtttgttccccttttttgtatcttacctttattgtcatctaatgtattatgatcagagatataaattttgttatattattatatttcaacattctattgcgtatgaaattacggtgaaactctttatctaactctaattttatgtaacagtttccacgaacaataattttataatgcaactctttatgtaacattaggttctacgacggacaac

SEQ ID NO: 14496 - DNA, 649 bp, Arabidopsis thaliana landsberg
  unsure (1)..(649): unsure at all n locations
atctatttttgagggtctatagggtctgattttttaaagaaaacgtgtccgtagacagaaacctccttagtttggatctttcccatgtgatcattattaaaaacgacgaacggaattagaacaaacatatctattcaactttcggtagtgatggtactaagagaataagattcagatcataaaaaagggaactatatacaagaaattttttctatatatagaaaacatctgaaagattaaaacacttatccatatcaaagaaaactaacacaagtagataaatataaagaaaaatgcttgataagcttattattggggttgccggagggattaccggagggattcttggaacggtcgatgggtttgccaaaggggtcgggatatggcccaataattatcagaacaccggtggcttcgagaacaacaataagacgagtccgggcaactacggcaatggtaatggcggtgcagtgaaggcatccgagaactccggcggccgccgccagaaagacagggagtaaaggactcctgaccacacccagtaatgattatgtaccaaaataatagatgtataagatggacatgtttcagtatcttaccanaaatataggagacttttaatgaaaagtcttcttgtgtaattttatga

SEQ ID NO: 14497 - DNA, 504 bp, Arabidopsis thaliana landsberg
gatactaaaatggaatatgcatcatgctgaggtttttctttgtgtgcattttgtgacaatataaaaaaaatatgtaaaaaaaatatatgttggtacccaaattggaatttaaattctaaaggaaattctataatttgagaagagaaggaaaaagaaaggaaaacagaaaaagaaaaaggaaaacagataactgggccactcctgctcattccggcccagttggccttttctctacacgcagcccgcgcgcgcctgccctgccgattctgtgccccgctcgctgacagaagggcccgatctgcagccactgtgactgacgctgtgctgtgggccatggtggtcagctcggtcttctcccttgcaacggattccactggcgacgctgggtcaacaactcttccgcagctgccgccggggacctcggttttgacccgcgcgtgcccggactctctccgccctatatagtcccgattacttcacccgttcaccgccaaccctccagcc

SEQ ID NO: 14498 - DNA, 993 bp, Arabidopsis thaliana landsberg
tgagttcctcctctaccctttatgttgtctgcgttttagtatattctagggtggtctttttatttagtggtattagtagtgctctaagctaatcagttagtcaatggagaagaaaggatctgtgttgatgctccgttatgaggttgggaagtttctcggtcaaggtacctttgctaaggtataccatgctaggcatttgaaaactggtgatagtgtagctattaaggtcatcgacaaagaaagaatcctcaaagttggcatgaccgagcagattaagcgagagatctctgccatgagactcttgaggcatcccaacatcgtcgagctccatgaagtcatggccaccaaatctaaaatctactttgtcatggaacatgttaagggcggtgagctcttcaacaaagtgtcaactgggaagctgagagaagacgttgcgagaaagtactttcagcagcttgtacgcgctgttgacttctgtcacagccgtggagtatgccacagggacctgaagcctgagaatctcttgttggatgagcaagggaatcttaagatctctgattttggtctcagcgctctttctgactctagaaggcaagacgggttgctgcatactacatgcgggacccctgcatatgttgcaccggaggtgataagcaggaacgggtatgatgggtttaaagcggatgtgtggtcctgtggagtgatattgttcgtcttgctcgctggatatcttcctttccgtgattccaatctgatggagctgtataagaagataggcaaagctgaggtcaagtccccaactggcttgctccgggggcaaagagattgctcaagaggatcttggatcctaaccccaacacaagggtatcaactgagaaaataatgaagagctcttggttccgtaaaggctacaagaggaggtgaaagaatcagttgaggaagagacagaagtggacgcagaggcagagggaacgcaagtgcagagaaggaaag

SEQ ID NO: 14499 - DNA, 1005 bp, Arabidopsis thaliana landsberg
aaaacaaaatgcaacggagtgtaacagagacaacagagcccaaacggaacagccatcattgacagaatcccctttgaaagggcatcagcctcacgaacagaggaacctttcaaaggatcaatacctcttgagtcatacccaaacattttctcagacaaaattcccaccaaaggcgcagcaaaagatgagaatgacccttcgaaagcacggtcaaacgcgtagatcattgtacggtgccttggaggaaccacttctgcaaacatcggtgcattaaccgctgatccgcaccaagttatggtaagacccatcaggaagagagttatcgagaagattgagtagctgcttgtgctttgtgggattactttcagaagaataatagagaatgggattcccatgaatgcactgaactgcgcacacatcactctacccgaattcggatatatccgcgacattttatccgctattatccctcccattaatgttcctatcgctcctcctgtagcaaataccccaagcaaagctgcagtctggttatgatcgaagcctaaaaaaaaaaaaaaaaaagactgtttacactcaagatctcagttcttgacaaacaatggatgttcaaagtgttttttgtagaaaaatgccgtttaccaataagctcaaaccacattgtaaagaaaaccatcgcggtccacggaaacgaaccaatgattccttgcgcgacgattatctgaaaggtacttactttgacgacagattttgcagctgctaatgaatcattccaaacggagttcgaattcatcttatgagccattagtcctctctacaattacaagcagaaaacctcatcaaactttggtcttactcttaaaattcagggtacaattcttgagtgttttgtttaccgttcaatgttctttctcgggtcaacaacgaagagaaagacaagtaatccgatcactgcgctgagcgatgccatcattataaaagacaacgccatcccggtatgcccaa

SEQ ID NO: 14500 - DNA, 708 bp, Arabidopsis thaliana landsberg
ttttcccattaccacttttcaaaaatgtcttctctgtaaaacatttatcaaaaatatctttaaaatctgaaatatacctaaatatgtgtaactttataagaaaacttacacgagttacttttatacgtttgtaaaactttataaatttttggatggagtctctgaatagtcgttaccattttgaagtagtattaaagaacttttttttctttgaaaaattctttaaacagtgttattaaaattccttgatgtcaatagtctttaaactgtgttattaaaattcaaccattcaccgttttgcaaagaaaagtatatagaatatgtattctcttttgttttgacatcaatttggttatacttatcttcagctgccggtttgaattgtactccaaacacaattataaatctcaccattttttattatacacactttattcttgtctctatagttccacatctcaatctagctctcttctctatctttctctaaatcatgggtcttcctgaagatttcatcaccgagcttcagattccaagttacatattaaagatactttacgtcatcggtttctttagagacatcgtcgatgctctttgtccttacattggtctactcgttttctagaccacaacgagacctctgcacccgatccgacccgacacgctctctctacgtcagcgagtcttgctaacgagttgatccaggtg

SEQ ID NO: 14501 - DNA, 476 bp, Arabidopsis thaliana landsberg
tgaccggccgagggtaaatattgaacggaaaagatcgtttgacgagaggtccttcagcgaaatgggaatcttcgacaacgttaattctcccggaggatgggaaactccggtgtcttcggctagaaactcgtttgagccacatcctatggttgcagaggcttgggatgctttgagacgatcattggtttactttcgtggccaaccggttggtactatcgctgcttatgaccatgcttctgaggaagtcttgaattatgatcaggtttggttatttggattgtttttgtgtttcataattaaaccttgttctgttttgtaatgactctgttattacaattttgtacaaaatgttggttaggttttcgtaagagactttgttccaagtgcactagcttgtctcatgaacggagaaccagagcatagtaaaaactttctcctcaagacaattcaaatccaaggaagggagaaaagaatag

SEQ ID NO: 14502 - DNA, 518 bp, Arabidopsis thaliana landsberg
gactaggacaaatgaatagtaaaccaagaagatgcaacagggtaatggagaaccgagtcttgttggtctattcgttgtccaagtccatggttcttagatggaaactagaagaagatactaaaagttgcacatgatttagctctttctttcctcatcagtaaaaaacataagcatgaaacattgccgttgtagttcatctctgttcaatattgatgtaagaaattatgtggtaaaggaagagaaaagcatttggaacaaacatatacatacactgactaatgcagacacggaggaaggtttgagatggaaaatgaagttaagaaatataagagaattagtggagaaagaaccaacgcaaagtcatttggattacaaaagttgaaaaaaacatagcaaactgagttacgaaacacaaatcttctaggacacctttttaaggcgaaattgacaaatacagaagagaaaaaaatgtccgactgaaaagagttaaaagtcttttttttttccttcgtggcggg

SEQ ID NO: 14503 - DNA, 967 bp, Arabidopsis thaliana landsberg
tttgcaaatattctccataaacttctttcagtaagttttgataggatctttggattttgttattatacaaatctttggaaatatcaatttcagtttctccatcatttggattgttgatattatcaccactaatgttcataatccatctagaaagagcttcatctatagttgtgtgaattcttgtctcctggaattcaattagcaaaacattaaaatatagaaattatagtactacaagtatttctttctacaaagtaaagtgaacagcatgatcattataatatataatgatttccttttttacatgtcaaaacgagtcatgtgcaatcaatcaaaccttacaaaacctaagtcattgcatgaataatcgattattatgtaccaaagtgcagagcatctgattaatttgcaactattacgaaatatataactataacaaaagatacatgttaaaggtacataattcagataaaaacataccgacgaatcgagtaaaaccaagtcgatggagttgtctgattctttcttatttcccttcgacgttctaactatctgcactttgatcttccatggtctgatctcaccgagagaagcagaagggtgattacgaattagagccattactgtagcagtttgtgaattcgttttcttttctttttcttttgtgatgaatttggctgaaaacgaaaggttatgtagcttttataagcgtataaaaaactagaatcacgatctaaacggttacggaatttaatcagtttaattaggatttcctttttatatacttttcccaaattcaaaaggaaattctaattaattgtttcttaagttaacagtaacggaaatcttttttttgtcaccacctggtaactggaggattttttatgtacttaaatttaattttccactttaaattgaaagggaaattaatgaaaaaaccctcaactttggccagattcatttttaa

SEQ ID NO: 14504 - DNA, 791 bp, Arabidopsis thaliana landsberg
atcatttaaatcattcacgttttcggtttgttgagaaacactagcattatcacctcttttttaacaaatttatccatagcccctctttgagattgaataaataatgcatctctttttcttctcttaacttggtcatctccacacaaaaccatgatcaatagtcaaaataattaaaagatagcacctggattaacaaagtcgaggcagtgagcggtggtaattgcaattaacaagaattgatgtcacgataattcaagtggaagcacctagaacaataaacaattcataaagaaaacgattaaccaataaattaagaatatactgagtgttcgaagaaggacaaaatttagatctacttcaagttctgttctttttgcttgattcaaaacttacaaagttacaattagtggttgcagccacaagaatcaagatgattgagcatcgattctggttctctttttttttgtatgttaagaatttattgagatttgagaaagcaaaaaaaaatacagattcataaaatagtatcgtgtgaccgttagaggagagagattagtaaagcaaacccagaaaagaagaaaaaattaaacctaaaattttaattacacacaaattggcggtcgcacctccgtcctacccatgtgagccgggcctgagtgaattaatgattcatatttatttttttaagtgaagaaccttcgctaaaagtgagtctggataacaatttgaagacgaactcaaagtcaatgagttccattataagccaaactttctgctggattttaatacat

SEQ ID NO: 14505 - DNA, 425 bp, Arabidopsis thaliana landsberg
tgccacgtctgagacaaccatcattgggttcaagcccccaagtgtggatagaccgtatgatcttgttggggtcgcgttgtttggtgatggagccggagctatgatcattggatccgatccagacccgatctgcgagaagcctctctttgagcttcatactgcaatacagaactttttacctggtaaaagaccacaagatttatgcatccagttatgtctataccttgagactattcttggataaatatggattttcattttcatggcgcagaaacagagaagacgatagatggaaggctaacagaacaagggataaacttcaagctatcgagagagcttcccagataatagaagacaatgtggagaatttctgcaagaagctaataggaaaagcgggactggctcataagaactataaccagatg

SEQ ID NO: 14506 - DNA, 503 bp, Arabidopsis thaliana landsberg
tacataaacattaaatccacaatccacaaatagtccacaacataaaattggagtccattacaacatctgagttcacaaacaatccatacaacataaagttcacaaatagtccattagaacgcacaattcggcacaaaactaacaccatcacatatcggggtcgttggagttgtgaccacatcctctagaagcgaaaaactcgttgacgaatcgtgtaacaggtttggattctaaagaaaaaagaagacattaataacggcaatgattacatgcatgaccattattcaaacaaattgtttatcaaactaacctctcctggagtagctccctcccctgcataagctcctactggtgctggtatcgccggtggtggcgtgttgtggcccatgaccccagatccctacaaaatcaagtttagtaaagatttgaaaggttgatacaaatgataagtcttaactaaattgaagcacctaaggtggaggtggcggcgatgtaaacccact

SEQ ID NO: 14507 - DNA, 602 bp, Arabidopsis thaliana landsberg
tcataattcttcacaaatacatcacagttcaccaaaataccactagagttcacaattcttcacaaatatatcatatagcccattacaacataacacaaactcacaattcactacaagagtcaaatcatcacatatcggggtcgtttgagttgtgaccattaccttcagaagcgaacaactcgttaacgaagtcgtttaactggtttagattgttaagaaaaaagaagacattaataactgtagtgtttacatgaccactattcaaacgaattgtttgtcaaactaacctctctagtagtagctccctcccctgcataagctcctcatggtgctggtatcccggtggtggcgtgttgtgtccataactctggatccctacaaaatcaagtttagtcaagatttgaaaggttaatacaaaccacaagtctaaactaaattgaagcacctgaggtggaggtggcagaacatgtaatcccacagaggcatcgtcggctgaaattgggagaaacaaatggttgctgctgtgctactctgaaaacgagaatgttgcaaatcaatatattagttatagacaaatatatgatcgtgttgagaataataag

SEQ ID NO: 14508 - DNA, 559 bp, Arabidopsis thaliana landsberg
aaatgacgtggcgtaaagagagatccagcttcgattgctcccttcttctgagacacctggcgatttcatctgcgtcgacctcgcctttggccgacctcttctttcatttttactctttttatttggagttgtacacgaaagtctttgaaagttataaatcaagtgacaccagcaaccttcatatgtttgttaacgaaaagcatttatgtaaccaaaccaagatagatttattctcaactgagcttattaacataaatatctaaaactgaaataatattagaattttattaggtgcaagaaaagttttcaaaaaaggggagaatgaaatcaccaagttataatagattcttagattgagatataaaatgatgaagaagagagttgtttcaaatgacaattctcaaagttaaacattgatattcatctcattttatatagtaatctatcttgataattacatggattaatagatttcttatgattatcaggtaggttaccctctagaattagttggatccttgctcgttatgccatgttttaatcctggatcagtggatca

SEQ ID NO: 14509 - DNA, 748 bp, Arabidopsis thaliana landsberg
aatgttgacttgtttagtaattcgtttatttagatctccatctttgtattacattttatacacaaaaaatatttatttaaatttggatacgtggaagcttatgtatgtggaaattattgtataactctataatctaaagatatgtttttttttaaaaaaacgtagatatcatttgtttgataaatatttagggagttaattaaacagtatgagagtttcactagcaattagcatgtggttgtgttgcatgtgcaaactgagatggatagagagtggttggcaacagcgacactattttatttttttactatataaatgaaaagattcctaaatttagtaaaatactatatgtcattttatatatagttttaggagattttcaattgagatatatgaccatgacaacaaggcactaatactctctagcatagaaacagtaatgaaaacgcggaagcgaaacgtttcagaaacgagaatcgtttttttccactttttgtggtcatcattggaaacctaaattttttgtcgagaaatgaagatttttcgaaagggaagaatgtcgtgatttatagttagtgacacttgcaagttgcaatttttgtaattttcgtcgtagtttacaaactatttgatcttcgaaatctcactacttgagttttattcgtgtagagttttaacttatataagtagcacactaaatacaaagatataaatcacagaaaacgattagacataagataaagacagt

SEQ ID NO: 14510 - DNA, 594 bp, Arabidopsis thaliana landsberg
tgctcggtgccttttcaggctggccgagagcagactggccacggagccgtgcccccgccacggttgccccgccccgtgccctgcgtcttgcccccgcctataagtgccccaaggccttagccgtcttcactcgtgcaccttaacccccgcccgagccagtggttgccgaagttcgccacgaaaggcaagcgccaccgcctgccaccattgctcgagcacgaccgccatagccagcctctttcgtcgacccccaacctagcccgagcccttggacagcttccctgagaggctttgaggcttttccaagcttgagccaagacccagccctaaagaagcagcaagagcgacctcgcaggacttcggccgcccgcaaccgcacgcagaccgggctaccaggtgagccatttacaaattccttgtgcctacaacctccctgacttcctgtgaagctccccaactcactggattgagctataccgccatggttaggctgaatcactcgccgtcgacgagctcccccgcctgcgccgaggacccaccaactctggccatctccgacaccgacccgcacaccgacgtgacctcccctgacgt

SEQ ID NO: 14511 - DNA, 1503 bp, Arabidopsis thaliana landsberg
cgtgtcggtaacacttgtaagaccatctccatcggagtatctgattgagatactcatcttttaaataataattaaaaagagaaaaagtaggagagaaggaaagaaaagtggagaaacgttgagagacgattctcagcatttattgagagttgtcattcaactaatggttcatttacttcaaactaattaaaatatattaatttgattaaaatattaatttatttactttttgagatactctctaccacttttgccgatggagatgctctaacaatctcatctcgtctcttatctgcttgataggcttcggttaaacctttgtaatcaggcccaaagtattaactcctgtaaataatttgataagcccatattttgtaatcagaaccaaaccctaaaccggaagtccaaaaaccctgtggagcagcaagtcaacacgccccacattggctaatccatgacatcgatcatattctatttattcatattgtcaagtgatgattcttcgttcatgtcttttaacatcacacaattttctgcctgaaattaccgactgctaaaagtatttaatcatttatatttttatctccattctccacgttataggtgagtctattttataggcattttattctaatatattcttttaaaatagtttttttttaaaaataaaagaaatatatggaaaaaaaaatcaactcaattttctttaaaataaaaatagaaatatatatcaaaaatgatctaaatatcaagcatcgactcgtgtgatcgattctttattctttaaatcgtgaaatgacttaataaaaattcgactctgaaaatatacaatagatatgatttatcagttgtcaaaaactaaaaataaaaaatagttaaaatttaaaagtagttataaaaaataaccgtacaaaacaggcaacaattgattattatttttttttttttgtttttcacttttgtgattagtaaccattaaaacaacgcacatctaaccattgcggtatatgtctatttttatcaataatatttttttatcatatagtaattatgatttatgaatgtataaataaaataattctgattttattcagagtatataaataaacaaaaaatcttcatttctcgggtcgggtctaaatcgcgagttttcgcgtaggtttgagcaaaaaaaaagagagagagtgcacagtgcgcttttggtagagagaaagggttgttattatttaggattgatgtcttcttcctcttcgtgattctctcacacaattttcacccattttcatgtctctttctaccaaacgctctactttctccgccgcttctgcctccgacgactctttttacttttctcctccgatgaaaaaggccaaaaactacctccaccattcccctcaacaccctaataccgttcacaaggttggttggcttttattattggaggaaagattccaacctccccgcccgcccggttaaacttcttctctggaaaggaaaagctta

SEQ ID NO: 14512 - DNA, 321 bp, Arabidopsis thaliana landsberg
tgaagatgattgaagtggttactcaatttcgctatgagaaaggcacaagacatctatcttacaccccttctggattgatccaaaggatccagcagggtgtttgaggaaagcgccctccagctctcgtggacctactgctgccggaccctcgcgtccatctcctggtcgcggatctcccacaccacgtggtcatggtcgtggtcgaggtcatggtcgcaggatgggcgctcgtctggcccatggtattgcagcattcttttccatgtgcagaaatatatcttcagatgtgcatgagctggctcggtggcagcgggagactaa

SEQ ID NO: 14513 - DNA, 568 bp, Arabidopsis thaliana landsberg
tatgacatccacaaatcctcgatgagggcaacttcaaacttttcagttttcaccataccaaaccccctgccacgtgactcgaaccataaacttaaagagcacagatgaggcgcgtggttggcacggcgaaaagccgcgtggctttaggagccgtgagaccaaacacatcattcatgtcgagctcacttggtttcatcccatcaggtaatttccacgtgaagcaatgtaatatatgagccacggctaagtcaagcgcgtataaccctagttgcatacccgggcacgatctacgacccgacccgaacggtataaactcgaaattgctccctttgaaatccggtacgcccggttccaaaaacctcgatggtctaaacgtgtccgggtcagtccaagaggttgggtcgcgtcctatggcaaacgcgttgatcatcacacgagatttcttgggaatgaagaaaccgtcgatactagtgtctccgcggtttcgtggaggaggagagggatcggtgggtgcatcttagggtttctttgagtgtgcatttgagataagtcacttctcgatgtcgga

SEQ ID NO: 14514 - DNA, 608 bp, Arabidopsis thaliana landsberg
  unsure (1)..(608): unsure at all n locations
tgtcattcattgaacaacatccgactcttttgtcacaacccaaatactttttcttcatcaccatggttcccgctcctaagctcagatacttagagctttacctttatcatggtctccgcatcaatcctcacagttcgagaactcttcaatggacagagacacagtccctttgaccctgatggcaccatcccgtcgaggtcgagtcatctccgtagcgttgaacattccatcctctttacgtctttcatagtttataacgtttttgcaaatagccttccatggagcaaggcctagagcagccgaaactgcgaagtcactgacgtttcttgctttagccgctgcattagggcagcaatggttcggcttccatttcactctaccgaccacgtgggcgttgagggacaataccatttgctcttcgagcttgtcatattcgtttctctataatcactactctcatgggtatttcgatgcccaatagtttttggtaagcttcgtgagatcataaagcatagcctttcaaggaggatggttaattgtcatgggtttcatgcntttcacaccaagtttgctcccttaacgttgtttttctacgtagagcggaacat

SEQ ID NO: 14515 - DNA, 235 bp, Arabidopsis thaliana landsberg
aatggccgattatcaagagaaagacgaaaagcttaaagctctgaatattattcaataaaaggttttgttctgcaactacaaaagagcctttatattggggctacaagaagaaaaaaaatcctaacacgtttgggaaaaaacaccgactaatacatagcttaaagcccaaataagtcaaaggagagaaataaaataaagcccaaattagtaaaaggagagaaataaaagaaagccc

SEQ ID NO: 14516 - DNA, 441 bp, Arabidopsis thaliana landsberg
gaagaacatgttttcatcattcacaaatatcatgtcatttattcattttattttgtattgaatgtacaaacaatatcaagatacacattgcattgataccttcggcttgcttgaaggtataggcgtgaatgcagttaccatccaacgtcaacagtgttggggtactattcatctatttataggcaatcgtacaacttcgtatgatattacattcatttccttgaagattgcatacaaggtttacaaatgtcatagggacaattttgtcatttgcacctagcagtttcaatcaacaccttcttcctacgtcaccttcccgcgacatcgtaacgaagcttgcttcgtcgcacttccattgatcaaaatcaaagcttttcttgtactgaagctccagtaacacttaataatatatacacaaccagtagtcagccgtgtttttga

SEQ ID NO: 14517 - DNA, 747 bp, Arabidopsis thaliana landsberg
  unsure (1)..(747): unsure at all n locations
ccaattcaaacaggaacaacaaatatctctctcttagacttataacagagaagacataatactccgtaacaattgaattacagatagatttctaaaagagatgattgttgaagaaccttggggacgcgttgcctagttctttggcgtgagcggcgtagttacggccgacgcagacgatcttcgtgccttgcttgaacatcctctgtatcatcgacgtcgccattttctgatcgatacaaacaacaaactcacttttctcttcttccttctcctctttttggtcagaatcgtggagaaatggaattcggtaacttttgtaattttgtcatttaatcacttccaaaacagaatttactatttcaatcccaaacttctgttttttcacatgtaagacccttaaactttgaaaataacaaattatgagaatttgcgtaatttgtaaattctaaaccggaattttgttccaagaatatgaaaattcagaattaagatatcaattggacggatttttgaccaatgaatgaagaaaaagcaacagaaaccggaatatctgatttatcaaagctgagttttagatctggtgaaatcaaatttacatttgaagatgcatgacatgtactaaaagactttttatagggtttatcnccaaatttggtttggttaaagccttagaagcacacatacatacaaattacaagagactagctacaacgtgatgatgataatgggactgaacacacaatgagt

SEQ ID NO: 14518 - DNA, 665 bp, Arabidopsis thaliana landsberg
tatatgtggatcacaattcacaaatcaaaataaattttgatcaaagcttccgtagaaacactaagtcaagagaaacgaatgaccatgaatgaaatttaaaaaaaaagaagagataatattgtggaaaattatataggtatgggcacaatattctctagaatgacctaaaaagttaaattaatatacacaaacttgttaaaaccctttaattaatattgtggaaaagaagtccttttagcattaataatgtctaaacacatattttagctccttaataactagagagtagatactatagagacatagagttagcgtcggccggtacgcatattgacactcgtcggtgcaaccttctttgttcttggaccaacccgatgatatgccccaagatccacgtcatcacttcttccacaaaccgtccttggagccatcataatcattcctttccacaaatttctaatgctcatttttttcaccaacccattctcttgcttactatcatattcaagcttcttctgcaacatattatgatcataatgttgaccatgatcattccagaaaccactagttggtaacgaaccctcatcaatcctcttagagatgctcttgatctcataagaatcaagaagactagacaacttggtttcttgatctccacgcaaaaa

SEQ ID NO: 14519 - DNA, 947 bp, Arabidopsis thaliana landsberg
gacattatattgtcgtccgctaactttccaaaactttaaatatttgtagttgatgttgtaatctctctatgtttttctaatatactttcatgaaaggaaaataaaaaaggaagagtttacgttatatggctcaattcacgaagaccttgcaagttacatcacccataactatatataattaatacgtagaaacgtacagcagcacaaataattattgacgttgacgaaaaaccaaatttatagcctctgtacgttactagagtacttcatttatgttcctccatgtcaataataaaagttctttgttggtcacaacaaaaaaaaaaaacaaattccccacatactctaaaactttttaatttaagctttaaatagttacagcggtccaatggacaaaatcgtctataaactgaactgctttttgtttaccattcacaaatgattgtctgtaatggtacagactaagaaaataaaagaaaatcgccacggactaactgcggaccgtctttaaaactaagtccgcagcggtttattatccgtcccaaaaataatatggattggaccgccgacggattaatccgcagtaaccataacattcattcaattatatttatttggttctctaaacacattaacatgatgattttattatcttaattagtaattacgtacaagctctacaaaaaaaaatgatacctaaaattgcaagttctactactttcattggtatactctcttaaaaacaaaatgctcttaaattaacatgttgcattcgccatagcaaaatatttttcttcaagaaaactttggtttgaaatttaacctaagttagtatagataatgtagtcttcttcaattgagctaattactctcatatacttatgtttcatgcttttcaatttgagttaacattgttttgttggacattaatttcgacagctaatatt

SEQ ID NO: 14520 - DNA, 683 bp, Arabidopsis thaliana landsberg
caagattcctcccatcaccaaaatcacaaccaacagccacattctcgttaagattaaccgcattctgtattcccccgtcgcacggagcaagaacaggcttatcctcgtcgatcttcccgatcctagaccgtgatcgttttctacttatcgtcactttcttctccaaaccattctcggaatcaacatcgacattcgcattaccgataatagagacattaaaacccgagctaccattcgcgttatttacatgattagtttcttctaaatccatcacattattatcttcaaaaccaataattttcccagtttgattccaaatcttcctagagatatcaaaagtagcttgatcatgaggacttttaaagaatacttctttaccagaactaaacttactcataacattcctatacttcttcttcaacctccttagcttctccacaagctgattcttattaaactctaactgtagcttagatttaatctgctcataaaacggcgccgtatcaggcggatgagagctgttaccacggtggtttgtgatgtaatcgagaaagccacggagaagttcgatctcgtcttcgtcagtccatagtctctggaataaacgtcgcgaatcatcaatcggtggtctctgatgaacgatttcagtcatacggtgccatttctgatcggaatctgatgga

SEQ ID NO: 14521 - DNA, 539 bp, Arabidopsis thaliana landsberg
ccaaaaccacacaagactaacgatgttgctagggaagagacagagaccaccaataaagagaaccacgagtctatctgagattaagttcgatttgaatcaacctagcgaacaagaaccatccgatcatcagattcagcttgtgaacgttgatgaacatcgtcaagttcatcaaagattgttagatcaacggcttttagcgatggtctcaccaagaggtacacagagaagacactcaagtgattattctgaagattttctaagatcttgctctctttgtaaacgtcttcttgttcatggccgtgacatctatatgtataggtatgagtttaggacctaaagattaatctcatggttttggtttgattagatatgtaattaacgatttggttttggttgttaaattatgagcagaggagatagagcgttttgtagtttagagtgcaggcaacaacaaattacagtggacgagaggaaggagaagaagaaaggttcggtgaggtcaccatcgtcgtcgcaccggaaccacacaggagagagag

SEQ ID NO: 14522 - DNA, 562 bp, Arabidopsis thaliana landsberg
gcgtccatattacataccttacaaccccaatcacaaaaacaacatgcaaagatatgtaaagtgaaagagagtggaattgggtcatcgtatcacacctgttgatcattgatttttatacaaacatgatgcccaaataggtgagtctcatgtacgctaccaccgatatgaagttgtgcatatacattcactttttagttctactacttagaaactaaccgtgtcatctctttaatcagttgagaaaaaacctaaaattgagatgattggaataggaagaagagattataaggaatgatccgaatccgaacaccaacgttgaccttgatacatctctccacaataccagatccactgcccatttcatttcattcaatatagttttcatagcaatttttttgtaaatgtaataatgcagaataaattattaaaaaaagtttctgcaatttctggggctgtgtagagatgtcttattactctgcagatctatttggaaacagtcttaaagagttagtgaaaaaaaacaaattcttgaatcatttttagaaaaagagaatttacatta

SEQ ID NO: 14523 - DNA, 431 bp, Arabidopsis thaliana landsberg
aaagtcccttctttaacatcgcttctctgaagaatttacccttttcaacccacttattcaccgttttgccattaggactcacattattagaataatgcgcaaaaacgacgccgtctttagtgtaaaccttaaaactctgtccttggccgtaagttttgaagctgacgttacctccgacgttatcttggccgtaaccggtgaaattatcagagccaaggttaaaagatttaccgtaatttacgaaattgaccttctcgttgtttgagtttttagcgtaagaagagaaagaatcaactccgatgtttgattggtctctgtaatttttaaacccataaacggcgccgttacctccgtcaccgtatcctttaaattcgttaaccggaacattaccgttttctccgtagctcgggaaactggcgttagctccgtta

SEQ ID NO: 14524 - DNA, 899 bp, Arabidopsis thaliana landsberg
cacattttatttgtatttgcacgcattcttaatccaataaacacacttcttaaaactagctaggaatgactttatcatgttaaaactcaaatctaataatagtggctccattgattaacttgtttttaaaaaactaaaaaaaaagtgtttaaatgattgtttactatatgtgtggcttttgaatagcgagagaatagtgtcatcatatgctgatcatgaaggatagcaacaacaaaactcacacacaaaattcatcgcttatctagtaaaatcaatcacccaacccaaaaaaaaagagagagatttcatttgttatagatatacttaattaatttatctcaaacacttactaatccatgaaataactccgcaggtatattacattgcttctcaaaccataacaacagctatcatagccctagctagttttatatatcttacagacatgtgtcttattatcatcatcccagatcctaataaactctctatgtctctcttaacttttggttatttcgaaaacattactaacacataacatccttgagaagcttgtacctacgagtggccggtctaggagaaggcacgccagtttttcccttgtcggctgctggaggaatactactactagtggtttggttaatctcttgctgtttgatttggtgatgaggtgaagaatattccgaccggtacgatctcttagacgatccaccattaacaccgtgttttgctccggttcgactatatgcatcacactgacaccaatcatagatcttgattggatcagcttgctctatgtaatagctactacagtacctgtatcaagactatgagtatggtcatgaattgatgatgataatcatgtatatttatcatggatacgtatatatggtagttgtcga

SEQ ID NO: 14525 - DNA, 463 bp, Arabidopsis thaliana landsberg
tatactgtaatacttgaatctagatgttgataacacattaatggggacactacgacactaatatacatcattagcctaaatgtccatgttaacttattcagtaatatatattctcgtctcgtagaaactaaaaataaagattactaaaatggaacaggatgttgctgggctttctcggcggtggcagcagtggaaggcatgacgaagattgcgaatggagagcttgtatcgctgtctgagcagcaactgttggattgtagtacggaaaacaatggatgtgacggagggataatgtggaaagctttcgactacattaaagaaaaccaaggtatcaccacagaggataactatccttaccaaggagcacaacaaacatgtgagtcaaatcatctagctgctgctaccatcagcggatacgaaacggttccccaaaatgacgaggaagcattactaaaagcagtgt

SEQ ID NO: 14526 - DNA, 817 bp, Arabidopsis thaliana landsberg
taaggagaagttttcctttatattattaatattttctttttcgtttaaactttcactttctctaactatggaaattttctttttattatttctatatgttgttttcaaaagtttacatatttattctttacaaatatctcatgccattccttctcctaaacatctctcatctgatgataattagtatttatcaagtcaagtgttctagttcgccgatcacatcctcacatgcaccattcccgaggtgtttttgcttgcaccgtttgccgacgcaagtggtcctatggatcgccaatgtcagacattctcctcttgttcttactctgactcttcagtctacgtgttctaagtttgatttcaaattcaaacaaccggagttgatacaaagcttgctcagatctggcgatgtaggctctccggagttggttcttacgtctccttgctttcccatgggtaaactctcttcctcatgcgtcgccggaaatccatttctcaattctatcttttccctcttttcaactggttacccctcaaactcaactcattttgcgtttcatgttttcttacatgctagagcttcctcctcgtttggtggtcatgttgttcccctgccatctatttataagactccggcgagatctagtctcctctatgttgttcattttagggacaatgagatcccatgtggtgttggtgacctgctttgggctttacaggttttgggccagttgttttaatttaatgggcccacaattttgttggtcctttaaacacaaacattgttgttattaagagaaattaaatatcctcataaaac

SEQ ID NO: 14527 - DNA, 317 bp, Arabidopsis thaliana landsberg
tgaaagagcactcaatttacttcatgctctggatcaaagggtttgggtggtgaaggtcttggcgatcatcgagtcactcaactatgagacactcaccatggatgagcttttcaacaagctcaagtccatagagattgaccactagacttgggccaagatagaggaccctggtgcacccagcatggccctggtgtttggaagtagctcttcttctaccttcacatgttatggtttctgtgtgatgtctgttggctagcataggagaagcaggtgtgagagccgtagggatggagggagggggtgcttggttgccagtt

SEQ ID NO: 14528 - DNA, 611 bp, Arabidopsis thaliana landsberg
tatcgaagggtttgggatatgaaggtcttggcgatcattgagtcgcccaactatgagactctcaccatggatgagcttttcaacaagctgaagtccaatgagattgaccaccagacctaggccaagattgagaaccctagtgcacccaccatggccctggtctctgggaggttgttctgcttctaacccctcacctgctttgtttgctctatcttctttattgaccattatagagaagtaggtggagatccttagggatgaggagctggtgcttgtggctagtcggttcacgctgttccacaacaactgccagaactggcattgtggcgggttgaaggatggatgcttcaactgcagcgaccccgaccacttcattgccagttgctccaagaaggataagtctgaagttggcccgcgcgaccactctggtcggcgcaagggtaagcgggaggatacctctagcaagcacaagtccaaggggaggttcgacaaggagacgctgaagaagaagtactccataaggcgaagatcaaggagcacgccttcctcgcgtccctcggtgacatcgaccacgactccaacgagtttgcttcttcctcgagtgatgagga

SEQ ID NO: 14529 - DNA, 887 bp, Arabidopsis thaliana landsberg
gaaggataatccgatacaaccccgattgatatcattctcgatatactctcgagattgtctacttattcaatcgctaagtttggtctcgcatccaagttctgtggatctatactaagaggtcaagatttcactgagttgttcctaattactaggcccttgagtcgtccacgtctcttattcgcggttcaaaattctgataagtggtgcttgtactcgtcgcctcagtctcagtttccagatgagaatcattctcttgtagtatcagccgattttcatatggagttacgtagagacatgggacaagagatttttggccttgtctctggtttgctctatttccctaatacgcgtacaggcgaagtgccggtgatatgtaaccctagcacgggacaatacgcaagattaactcaaaggagtagtatgaacaatttgagcagcttattagggtatgatccgattggcaaaaaatacaaggtaatcacaccaagcagttcacattttgatccagaaaatattctgacattaggaactggaaaagtagcatggaggagtatccgatgtctcgtagaccattatcctgaaagtgaagggatatgcatcaatggggtgttgtattacatggctagcaacaaattccagttcagtggtgtgaagatagcttcctttaatgtaaggtatgaaacacttaagtttcttaatgcggatgttgacgtaaccttttgtcctgcgcttgctaaactgattaattacaagggtaaattatgcgtgcttagttgtttatgggataatcaaatttatccaaagccgcttcggtggaaggtacttatgttgtggttgtgggttctagaagatgccgagaaagaagaatggttgaacgtgaatacact

SEQ ID NO: 14530 - DNA, 532 bp, Arabidopsis thaliana landsberg
aattgttatataactaatttttaaaactaaaatatatatttaaataaattattgcaaccggtttattgaatcaatgcaacatttagtttttaagttaagtaattatgtgcattcttaatgtgaattagtccttgtggttctactcttaattgcttcatcgataagatcgctagtgcattaagattattaattgagtaaatcactacatcagtttgtgttattgttttcgccgtatcatcacaggaatttcttgtagtatagagtcgatctagaaagcaacatcctccgcatcatcagtcaaggcgccggagacatcgatccactcaagctgcagctctatctcccctcgttcaacattctgaagcttaaggaacatgttctggacaatctttcctttgtgccatacaatcttgctctcttctgacaagcagttttgtctgcttgcctgtatcttcattattacagtcccctcaggtagtcctcctagttggttttggattctgatggcttcaaggaacggatcaatgtgaaa

SEQ ID NO: 14531 - DNA, 682 bp, Arabidopsis thaliana landsberg
gaaggttaagggaccaccaatccctcctcccctatcccctccacattacaataaaccgactccggtgacttccccatcactttcgcctcaaacaaatcctcaccactcagatccaaaaacgtcaatttcgctccataaacaacaaaatccaaattcccatcgcaactctctccgatctcctcaattccacatctctcatccttcgcttcccccatagctttcactaattcctccaccgtcgcctccgccaccggaaaatccacgctcactgagcttatcacctgactgtttcgaatcgcattaagtttcagatcgttcggatcttttttaatgatcgtaaccgttacaggctttggctctgctctaactttagctatgcatttccatatgattccggcgagaatctcgaacaccggaatcgagtcatctcccttcgccggaaaatgtggtgatatctgatcggcgacgacgagattgaaacagtaattcgccaatttcttgtcgtttggagtgacccagagatcaccaaccggtttgacccgtttaattgaaaccggatctttaaccgtcgggtttgggctttggaaccttctctctcctatagagggtgttgttggggcataaatcttttctccggtaatggccttagccataagttgaaggcatagaacagagagaatgc

SEQ ID NO: 14532 - DNA, 399 bp, Arabidopsis thaliana landsberg
cacagtctattacaagatcattgctaagttactcactaagaaactccaacctattctcgcttacataatttcggagaatcagagtgcttttgttccccaaagagcaatctcagataacgttctcatcactcatgaagtactccactatctacacacttccaaaagccaaaaataaagtttatatggttgtgaagatggatatcagaaagcctacgatagaatcgagtggaattttgtgagaatggtgctagaaagacttggattccaccaaacttggattacttggatcatgaaatgcattacctcggtctcctactcttaccttctaaatggttcagcacatggttcaattaagccaaaaagaggattgcgccaaggggatccactttctccctacgt

SEQ ID NO: 14533 - DNA, 671 bp, Arabidopsis thaliana landsberg
ttacgaagaaaacgccgacgaagagcatagattctccggtggagattccgacgcaatggatgatctcaagatgattgctgattgtatgatctctaccggctacgctaaggaatgcgttagggtttataaaaccgtacggaaatcgattgttgatgagacgctgcataatctgcaaatggagagattcaatcttcatcaggttcagaaaatggattgggagattctcgaatcaaagatcaaaacatggctaaaagctgtgaaattagctgttagaaaattgttcttcggtgagaggattttagctgatcatgttttctcttcctctggtttaatcgttgaatcttctttcactgagattactcaagaaggagcattgattctcttcactttcccggaatatgcttccaagatcaaaaagttaactccggagaaaatgtttcggtttctggatatgtatgaagctcttgcgaatctctatgttgagattgaatcaatcttctacttcgaatcagctgctgcggttagatctcaggtgataaactcgttagctagactcggcgatgcgacgaggttgatgatgacggatttcgaatcggcgattcagaaagaaacctcgaagactccgatcatcggtggtggtgtcatcctctgactcgttacgttatgaatta

SEQ ID NO: 14534 - DNA, 1322 bp, Arabidopsis thaliana landsberg
tttgggatggtgtagccgccgagcagcgcggtttcagacggacggtgagggactagcaggggaatggttggataaagtctaagtgtttctttcattatggctgatatgaaaggcaatctagtgatgtgtgattcttcaataatgttatctttgcctacaacttcgtctagctcttgttgggctctcttcatcaactccggctttcttattagttcggccattgcaaactctattgtgttggtcgatgtatccgtaccaccaaccaccaaatccttcacatatatataacaaacacattgtcacgactcacttctcatgaacaaataagtaaataaatatattcttaccccaagatcttaagattaatctatatatcctccgaagtttttattcttaaattatgaaaactgaaatcatttcattaccacgagtacggctttgacatggttaccgtaatgggaacctccgagtcagcttcttggtcctttaacttcatcaaatgttgcaaaaagtctttacattcaccatcatcaccatccctagttcttagtagttgcatctgctcgatggctcgatcaagtatggcatcgagctcccgagcacacacatgcatcatcttcacaagtccttgaagatcgaatctcgctaaccgtgggaaaaagtcagaaacattaggctctcccaaaagcctagtaatttcagaaatcacttctttaaactctgttccaacactctccatttcctctgctttcacagtacctccccataacatattcatagttagattcatcatcgtcaaaaagacctgttctccaacattcaccggtgattctatcttgacctttctggtacaaatatctcgtactttcccggatatctttacgtcgaagctcgtagaaagaattcaacgttctgtggctaagaagcttaagaacgcaaactttcctaagcatcctccattcagcaccgtatggtaaccagacaaggtcgagaccgccataggtaacggctcgggctgtgagagggacgtcatggtttgagaaattgatatcttgatctttcaagatctctcgagccagcgatggagtgttgaccacgacagttagttttgagccaagattgagtttgaagattggaccataactttgagcaagttttgtgaagtaggtgtgaaggtccgggtcaagaaagggaaggtttccgacaataggtagccctcgcggtccagggggtagatgcggttgcggcgagcgtttgaagaggtaccatagtatcgagaagatagcaatgagaatgagaattgcgtaaggagtgagattgat

SEQ ID NO: 14535 - DNA, 692 bp, Arabidopsis thaliana landsberg
cacaaaccttcaagacgatgaagatgacaacaacaacacggatctgtccataatctttgattcacaagaagatttcgaaaacgatataacggcttcaatcgatttctcatcatcttcactgcaatatccagtcatcgatcatctcctcacggcaataagccaagaccagtttgatttctcatcaggtctccaagttattcatcagcctcctaacatttcatactcaggagatcctctgtctctatcggcgatttcctctctagctcctcctcccttacaatcaggggttttcgaagaagattgtctttcttcagtcccaagttacaatcttggtttgaacccttcttgctctttcttccgttcgtccggtttaccggcgtatatgagtaccggtttattatctgctgaaagtaatctcggttatcttcccgggaatattcatgtgggatcagaaatcaataagccacatgatccactgatggactttcaagctgataatggtggttttttttgtccggattccatcaaacgtatgtttaatccagaagatctccaggtaattgagtttttgttacaaatattttccggttaacgtttggttatctttaagaaccggtatggagctaagatttccggcacaagaccgggttggtattctgatgtgatgctaaccggtttaattttgttgaaga

SEQ ID NO: 14536 - DNA, 874 bp, Arabidopsis thaliana landsberg
tctactgggttctttgtgggctttgttaaatctttagatgttcttctaatgagttaaatacaaatggggtagaacctttaacaccaattcggccttagcaaagtggttgagtctcagctgagctcagttcccaccagggttcgatctatattggtaccaagttaggcttcttccgagcaatcagtctcgagaatgcttctttccgccgtacgaatgtctcggtgcgcttctacttccccttgtggaatgtagcaatcttcccagtgctatctggagaagttcccagttctgtctggagaaatatctccgaggtcctatcctcgtggatgtcctgtcttccaccatcattggggttaagacccaaatgaggtaatctaaattacctctctttttgtatttttgtattttttttgatgttgttgcaattctgaaaactgttattagtgtgaatatgaattagagaataatttcttttgaacaggataaacaactttgagaagtgtactcaattcaaatctaatttaggactttcgtcgaagagtttgtgggcttaaagtaaaaccaaaactcaatatttctccataaaatttcaagagacctttcataaaacgaaaattaaacgaaaacccacaagaacgagaaacagaaaaaaaaaaaaaagtaaccgaaacaaataagttaagatcaagattcgaatttcagatgattaatctttacatttccggaatctgtatcaaagaatctgaaaatcattctaagaatcgaatgttaccataatctaaattacctttattttttgaataaagtccaaaaaatgtatttttaaaacttatagttttttgtaacatttttttataaacgaggtatatttaag

SEQ ID NO: 14537 - DNA, 497 bp, Arabidopsis thaliana landsberg
actcacaccaatggaaaaaccaaaccatcaccacctttaagttgtctttataaagacacaagactctaacttctagtcctcccacttcttctcctctctctctactccaagttttcagaatgacattcttcatcgaagacactagtctcatcatcagccacgttctctacaaaacggcacttatcatcaccgttttacgatggatctttgcatggatcctccgttaccgctcaagatcatcatcatcatcatcatcatcatctcaatcgtcctcttctccttctatttcatcacaaaccatcaaagaaagcctagccgtgtccgctttccgcgacgcggtggagagatctcccgcggcgataaacgacatgtgtgccgtgtgtctaggagatcttgaagacgaggacgaaatcagagagcttaggaactgtactcacgtgtttcatcgtgattgtattgaccgatggctagattatgaatgttgcggcggtgatgat

SEQ ID NO: 14538 - DNA, 513 bp, Arabidopsis thaliana landsberg
ctcttgtgtcacatctttagttttccggttcatactatcttttttttttttgaaagaataaacaggggcgtattcatgtaacatagaaacgggcaaaggttttcccgaatctacagattcatcaggcagcaagtcgtgaaccacatctgaacagaatttcttgacactgttaccaaccgtctgaacttgattctcaacatattttgctgtgtcctaaaaacacaaaaaagcaaagcaagagtttaaataaaggatacaatcaacgaggtaagcaattacaggttcttacacaaacaagcatttacctgcacgataatttcttcaacctctaagcacattgcttcaaacttctgataaacattcccaacccattttatacctttaaaatccattatctctctgaatcgaattaagttcttgtgtgcgtcctgtcaatgccaacaaaaagaaaactcagagagagaagaagcatatgcgcatacacaacatcaattctttagttagagaaacaag

SEQ ID NO: 14539 - DNA, 682 bp, Arabidopsis thaliana landsberg
cctggttcctcttattgaactcaaggccgaagatagtggatttctggtgaagggcgaactcaaaatatttgttgaattagaggttcttgaagttattggcctattaaatgtgtcagaatcagaaagcatggatgtcaacgggtttcatgttctaccttcccaagtaagaaagatagttttaaacacaaaaccataagaatcactcacttaactttagtttttggattataagacattgttttttggtctgtttcttagtctcccaagattgctctctgatctggttttacttcttacgtccattttatttcactgatcacaggcgaaatatgtgaagagtttgtttgaaatacacccagacattgcaacaaaattccgtataaagaaccaatatctgaagacaggatacatgaatgtgttactctgcctgattgagactgtgcgccggtcacctaaagaaatctccaagaatgatttggccgatgcatatgttgcattggaatccttgactgatcatggatttaagttggattggttgaagaagaaacttgatcaagtgacacaaaagaaggagaaagaggcagctggtgagactcggatgcatgaaattggggaagagttgaaggatttgaagctgaagtgttcagaacctcgagctcagttggataaagtgaagtggagt

SEQ ID NO: 14540 - DNA, 910 bp, Arabidopsis thaliana landsberg
cacctgacttgtacccgcaagacttggcgtagtctttaaggtcttctatttcctccttcgtcagtttttgcccaactaagttctggaaagtgtatgcttcgtcatccgaagggtcttcggctatttcttttcctttttcaggcactgtggccatggttttttcagtagtagcaccagtttcttccgcggccatgtcttccaaaatcttgttgatattcttaatcgtggtttctaagtttgtatcttcggctgtagcggcttcggtagccgcgacctccgaagtacgccttcaacgattgctgcaccttcggcagctgccgttttttggattgacgcccttggcggcgtcctatcgataacttcagttaccgcaatgattctttgccgcttgggtttgcttgtcttcgtctgatccggctcgtccacctttcgaaaaagcttcgtcagttggagccctagtggacttagcttcgtaggcatgggttcagtcattacctttaaaatttcttctatgtcgctagtagaaggcggtgtgggggttctctcttcttcggatattttccgtttcggagttgatattttccttttcttcggaattttcttctctgctgctggttgctcttcatccttggccagaatttcagccactctttttcttttgtggcctccggacccttattcaactgctcatagtctggatactcgaagcccagggcatcgaatactcggtttagccttcgcttcggtcgggtgccgaacgtgctgtcattaattgatcctcctttttggagtaatccccaagatttcattgcacattgtctcaactgtgtctaaccactctttgcagggtttcttaaagtacttcttgaatttaaagtgataaggcagacgaacaagctccccttccttc

SEQ ID NO: 14541 - DNA, 1062 bp, Arabidopsis thaliana landsberg
taatcagattttttaaagtagtagttggatggatcctactaacaatttaaagacaataatttctacaagctaattttttagagatcaataaatatatacagctataattctaccagacattttaaccactgtaacttacggtggtgttacattgaacaagtgatcacatccgtctaaagagaagtaaactttttctgaaggcattcaaacaaaagttttaaggtaacaaaaacaagaaggaagcaacaaaatagcggcaaaattgtaattaacagaagtataagggtcacaaatgaaagtacataaaactacatcagggttccataaaacaagggtcccaccagcactcgagagacgttaaagaaaataatggggattcgggggagaggtgggccctacgcgcgtggggtttttggaataagcgttacaccgtaatcactacaccacttctactacttgtgttgtgttgtgtctctctcttcttattatatggcgacaaaatggtaagaatattgttttttacttaatttttttattaaatcaagaattacaaaattgtcgttttatttggttatgaattttcgtggtggtgggtgacgtttttgcgaagactttgagggaggtgctttgtgaggtacaactacaaataatagtggtgcaatgaggtcggtgtttttctaatgttagaataggtgtgtgactgactagttgtgatttcgatatttatggtaagtatagtttgaatttctaataatagtgtggaccttgttgaatagtggaatcgaaataacaaataagaattagtggaactcttgtttgtatatattaattcaataatattatgtgatctatcaatatatgagaaacaaaagaaaaaaaaaagtcattttattgtctatataatgcagctattttgtcaaataaattctgaagtttagacttatttacaatggctgctattttaattattgattttttccaaaaataaattgattaacaaattaaaaatattctaaatatattccaatctcatatgtcacacatacactagattctatatag

SEQ ID NO: 14542 - DNA, 478 bp, Arabidopsis thaliana landsberg
gacattttcgtttgtcgaaattctaaattcaatgttgagtttgtttatgttcagaaactaaaaatatctttgccctaaatcctctataaatagataacgaacccatcctcagtttattactacaaagcacaacaaagcattcttttaaaagactctcgaccaaaaaatgtctgagtccgacgtcgtcaaagcttcatactggttcccggctactgactttccggccacggacatcgactcatcccttttcactcacctcttctgtacatttgccgatctcgaagctgagtcatacgaaatcactatcgccacatggaaccaagcaccattccacgcttttacagagactgtccaacagagaaatcctcacgttaaaacactcttgtcaataggtggcggtaatgctgacaaagacgcgttcgcatccatggcaagtaaccccgactccagggcatcgttcattcaatcgacaatcacc

SEQ ID NO: 14543 - DNA, 597 bp, Arabidopsis thaliana landsberg
tgcatgcgttttctagtcctccatcgggacctattccaagtatacgcaagcatatgtaattcagcgtggtagtgaacataatgcttttgctctcaatgtggaatccccatccaccatcttcgttctgaaaattaagggacataaacacatgtaattcatatggagatcactagtcgaagttactcattgatatccaaaccgtgtaatttgtcattttaaagtatacctggtgacaatagatatatcgaagcatctctttgcgatgctctgcatcgaatacctcttccaagtgtccagtaatgtacaaacaaaatacctgcacaaagttttattcatttcgttatttctcttttttccttttctttttttttttcaacaacacagattttaaaactaacatacaccagtaggcttatacaaatataaatctctgattttatttttataaagaaagtagatctttgggctttatattttatatgggtttcgggtaccgagtgaggtttacccatctttaatatcctatttgaaagtacccagacacataaaattttcgaactgatagtacaaagaagaacatccaatggcggacgatgc

SEQ ID NO: 14544 - DNA, 633 bp, Arabidopsis thaliana landsberg
gcctgaaattggttcctttggtctgctagttatggacaacagcggattggttcttgtttttacgttttggcgatttgtgattgtacctccggcgagtagcggaagttgagtttttggatcggtgggtttcaccactttgcgaagaggttaacggtggctccttggctggagcttagatggctagttttgggtgatctttggccggatctcggtagttgatggattgtttgagccggtgtccatcatcttccgccgttattggcttcctctttgccggatatgaagattggtttagcttttgaagtagtttatgggagattgtcgagggaggtaagggttagttttgatgtctctcttcttgctaggtttgggagaagaggtcatgggtctgagatgtggcggatctacttttcccgaaaggaaagttctgggttcggtatgttctcgacaacagtttgcgaccggatttactagcttcggtcaaaattctgatgttgtgatcttgtccgcaaaggaaccgttcttgttagcatcgaatatggaaagtgagattcgtgttttccggtgtactgccttcttcagattttactgcgcttgtttttccgttttaggcgcttcgtttttgtactgtgt

SEQ ID NO: 14545 - DNA, 719 bp, Arabidopsis thaliana landsberg
ggaccacacgagagcgtttaccccatgcaatagcagggacagactgtaaatcaaagtttcaacagaaggggaacttcataagcacaaatattacccctaaagtaatcaaagtacaaaccaattcaggctttctaacaaaataagggagtagaaaataagtggatgcataaaagaaacatgtgtatgggtaataaaaccattatacaaagcagtaatccaattcagactttctaacaaaagaattacatctgaataccaacctcctgtatgaaatcgatgtaatgaagagcaccatgcttgaattgggttcctccaccaggaaaagttagatactcaccggtaactttaacccaattttgatgccccttatactcagcaagcttggtatgagggacgttggtgtaccagatctgcgtaaatgaaaatggttgtattaggttcttagcaaattaaaatatctaaatgggaaagagaacagattcaacagaccttttctcgacttttgggccactcaattggccgcttgtatccatcaggcaaaggaacaaggcaggtgggtgggctgtctgggcaatgcctctcacgatgcccgtaatgtttagtactcggaagactcctaaatggcttgcacgattatcgagacagggaatgtaacaaggtcctgcatgtgtattgcatagtgcccatctgtaatcaagtttatgaccagaaccattctg

SEQ ID NO: 14546 - DNA, 821 bp, Arabidopsis thaliana landsberg
gtctacgattttgttttttgcaaagttattgtcggattttgttttccggctaagtctggctttgtattttcacctacgtgtgagtctataccctctatggctattttctctagtttgtttagttttgtcttctgcaattgcagatcttaaatttcttctatcgaaggggaagtagaagccgagagtttattcagattttctggaagcatcagctgctcgattctagtcaaaatgggaatgaatccttcataccccctactgggaccgtaatcggctaaggatgaaggtatctctttatgatcgtgaattgtgttgagtgggattcggtggttctggcgccggttctggcgcttcattaatctaatgcttcagatctgacctctcgccatatcgcgggttatggcgctacattaatctgatagttcagatttctgtttgtttactctcagatggttgaacaaaaggtgatgaaatggtgataggaaatagtaactgaattctagcaaaatctttgggcaaaaaaaaactgatccgcttggcgtacaacggtggatttggtcggcattcctgatcggtggagatggcggacgtgatgaatgagtcggttgcgttttttctgccctccgtcatgtgtgccccacgtgtacacacatgttcatttttaaccaacttgctcttactttgtagtcaatatatgggttaattgggcattaatattgtgtatgtgggcttattttcaccatgtaatcctttaaggatttaatgaaattgaccgacaaataagataaaataatacttctaaaccaattaaaatcctatgt

SEQ ID NO: 14547 - DNA, 793 bp, Arabidopsis thaliana landsberg
tgatattagtatcaaagacctagaaacatctcccaaacaaaacttaagccattttatatttgtgaatctcatagctaaagagtacaaatttcacaaaaagacgtaatttttagctaccataattggaaaaggaaactcctttttccagtaaaagccaatttctaagttagtacctgagaagacaagtcggcggcaatgtaaataagagaggaagtgacacttttggtcacaactgggcgtgatttaatcataccaagataccatccaacgaacccaatcctcgacggagatgaagaagaagagaaacccaaagaaggagaaggtgagactcctgtttcttttgctctttcgagaagctgacgtgaccggaaataaggtctcgattgagcaactccggtcttaccatattggtctgttgacgccgccgcgttccgccgtatgagccgagcggtgtcgacggctatcttcctgaacaatgctctgctcattatggcttccgagattttagggggggttgttgttgttgttgttcaggtatcaggaagctttgatgatgactgcaaaaaattgatagatctttccaatttaagtagtttcagtcggtttagttaaaccgtacatataccgagttacccaaaatatccggtataaatggccaaaaaactcaacaactttaggaattagttggggtgagcatttaggtttaacttcggattcggtttgggtttggttccgtttggttttttgggtcttgtaaaattctaaccaaactcaaccgaaagtagttaaagtt

SEQ ID NO: 14548 - DNA, 588 bp, Arabidopsis thaliana landsberg
gcggcagttcgcactttctgtacccgaagtccggcacacaactcgtatgacctgtggacccgggacctcgtgtcatagactgggttgccttggtccttggtgcgcgtcgggcgagattttctatggcgattgaggggtgcacggaagggttttcctaacaaggactcaggtttccttgaaaaaggattcaccccacgtgcagcaggtaccctttcacattctctcccaatcgcttgcgcccctttgccttcatgctcctctgctccccgctcgcgccgccgcacacgccatggcttcacttggtcatcctgaccgtttccagtctgaggaagcgctcaacctggtgcgcgacctgcttgggtggagcgcactaggctcaccggaagaatccgcgccggtgccgctcccctcggcgatcttgctgccggggagttcgtgctgttcacctcttacatttcctgcaggttggcgctgcaatatcgcccttcttcttgctgctgctggaggagttcgggcttcagttcagcactcacgaccactccatcctcaggcggtcacttcgtccactctgcgagatgtcgtaggtgt

SEQ ID NO: 14549 - DNA, 646 bp, Arabidopsis thaliana landsberg
tactacaggttattttgtatcagatgattattgaagtaactatacattaatattactaatgcaaattagtaattgattgttttaatctaattttaggcttaataattattgaagtaactatacattaatactactaatgccaaaatattacaattgtttatttttttgttacttttaataaattttctttaatttatatttttttatcatttactttatttaaatttttgttacactttgcgccgttctctgatagccgcatcttcccaggcactatttccgaggtatcttgatttgcgccgttctctgatagccgcatcttcccaggcactattcccgaggtatcttgatttgcgctgttctctgatgtcagtggtgctatgggtcgccgcgttggatattctactatcgtttttgttgtatctcttctctttatgcgtgctcaattcttgttcaaagtcaaaccacatgagttgatccaaagcttgctcatatctgataatgtagactcgctggagttggatccgactcccccttgttttccttgtggcaactctcttcatggtgcctaagcaaagatccagtattcaactctgtatctttcctcctttcaactggttacccctcaaattctactcatgtcaca

SEQ ID NO: 14550 - DNA, 639 bp, Arabidopsis thaliana landsberg
tgataaaaaggatgtgatgataaaaagagtagtattacacatacaagcctattattgcatagcataagatatgaaatgttactactggctattacaataatgtcatcacatcacatcattaaaacatcattaaaaagtttattgcctctaagccatcaccacatgcatcacgagatagacgaataataattattacaaaccagattgttcattacatagattaaagagctgctaaaatgagactccttctccccctttttggcaacaagaagcaaaaaaggagagagccaccaagccaaagatcaccacgaaggaggaggatgcggacgaagaaatgatgcgccaggtgagatgcaaagtgttcttccccagactgatccgggggaggaacacttcctgaaggatcctggggcggaggatgagaagatgattgacccggatccccatggtagggaggcggggtaaactcctcacgatcatcaacataggcttcttcttcatcatcgtctgcagacataaatggcaccccataggtctgctggtgccactcattaatctccgggggaggaggatggagaggcacgtcaggcgagcgagggacaaatggcatacccatggtggaagcttgacgacgaagat

SEQ ID NO: 14551 - DNA, 583 bp, Arabidopsis thaliana landsberg
cagttttctaaatttgttagaaagaaaaactagtctaaatatcgtggaacatgcacaaaagtttagaataaaaactctaatattagtagaacactaaaaaacattttctaacaaatttagacaaaaatttctctataaaagaatcatcttttgtcaactaaatcaccaattggtttttttacaaatcagttatattcttgtacatctacatgttttttttttttttttttaaaaatcgtacatatatatggtattctgcaattacgcaaccttttagtataaaaataaacttttaaattaaatttcaaatattttaatgagttatatatacaaacaaaattgcatttatgtcattcataaatttagacataagtttagggttttactgtaaaatgtctataatatataaacgaatttatggatgttgaaatgcatatgttataggtttgtatatatggtttaattttcaattggaaacacattggatttaataaataaaaagcattatatagaggttttcttatttaaagcttcgagatatttaagtttggtaagtttcttaataggattaagtagtatatga

SEQ ID NO: 14552 - DNA, 823 bp, Arabidopsis thaliana landsberg
  unsure (1)..(823): unsure at all n locations
tcactgaccgcctgagatgtacgtgccatgtcatgcagccaccacggccctgaccaaagagatttccagaaggcgttgaagttttgaactctcttgaggtctggaggctcgctcaagaaccgtgacagcatccttgacatggtgaaggataggatcaaagaagaggctctaaggacttacctattcacatactcaagctcttatgagtccttgagtcttgatcnnnnnnnnnnnnnnnnnnnnntctctgagccgcaggtccacagcattgtgagtaagatgatgattaatgaggaactgcatgcaagctgggatcagccaacacgatgcatcgtcttccatgaagtgcaacacagcagattacaatcattggctttccagttaacggagaaactctcgattttggcagaaagcaatgagagggcaatggaatctagaaccggtggaggtggtctggatctgagttcaaggagaagggacaacaatcaggactatgcaggagcagcatcaggtggtggtggatattggcaagacaaggcgaattacggacaaggaagacaaggcaacagatcaggttatggtggaggaagnnnnnnnnnnnnnnnnnnnnnnnggtcagggcagaaccgaggaggagggtatgcaggaagagttggttcaggaaacagaggtatgcagatggatggctcaagccgtatggtgagtcttaaccgaggtgttcgtacttaaagaggatgaggagaaatctgcagtgttgaccttagtctcaaccttttgttatgttttggattcttttggttacaaatggttcttctaagagatg

SEQ ID NO: 14553 - DNA, 509 bp, Arabidopsis thaliana landsberg
ggaaaaaaaatttgatattggatttttttctgatgacaattgcaactgaacttttacctttgagggcgattcttgagtttgcttggagatattttagagatggggggggggggggggggcttttgtttagttgcaaatgaacttttacctttgcaatgtgattttagtacctcctttgcattcatgaattattaggaaataaagttactgaaaaataaatagctgttgtattattagggaaattacatattcaacaatttatttataacaagagtataaattatgggggcttttgttttgggaactttttagcccaaatattagagaaagaaaaattttcaatcggcttacgaaaatgggtacttatttgtatatagatgaactatttggcccttgaatcttcttttcctttttcgttccccaacttcttctcttcttctcttcttcgtcgttttctcctttaattttttttcagaaattttaaatgacttttaatcacggaatctaaa

SEQ ID NO: 14554 - DNA, 474 bp, Arabidopsis thaliana landsberg
tatttagctaaaatgtctgcaattttgagagaatggtgtacgttaagtttcacgtacggctaaacaatgcagcgggcagctcaattctcgtgagttatttacgtacagacgagacctaccttagctaggaaaaaataaaataggaacttcaataccataaaccgaaatagagatacaaaaccgtataaccatatataattcttgcgttggaaacttggaaacgaggaattacaaattgaccaacgtttcagaattgtgccaaaatggcataatatggatttggcccccatttttattaatgtacaattttgtgttgaattcgaagaaacctgatgtagagcatatcattacatttttcatataaatttattgatttacatagagacaaacattatagtcattttggtatagattttatacaaactaaaaaacgaagaaaagtatatccaaactttatatacacatacgaaaact

SEQ ID NO: 14555 - DNA, 332 bp, Arabidopsis thaliana landsberg
tgcggaaagtcttcttcagccaaagaaccctacatggtctgaataacaaaatccttcttttctaatgcaccttcgtgctctttgaccatgatttcaaggtcttggattgtgaagtctttctttttcagattggcttcgtgattttcaactttttcagccaaatcttgaatgacggctttgtttttctcttcttccagatcttgttgcatttttagaaccttgcttaataatatgctctgtcgagacgatcttcgttagaacacgacctaaaagatattaataatagtattaaattaccaaaataatcggtaacctgaaagtaagcttaaggc

SEQ ID NO: 14556 - DNA, 507 bp, Arabidopsis thaliana landsberg
  unsure (1)..(507): unsure at all n locations
aaacttaccgcctctcaagcaaagaatcttttaggtacttcaattttcattctgtccaactaaactcataagacattatgaaatcacggtctgatttgtttcgcaacagcgcatcccgaggttcttcgtgttgtaccaagtcgagtaatgaggttgaaaacaacaagaacatttgattacttgggactgttgcctacttctccaaagagtcttctacataaaaccaagatgggaagtgaagctattattggggtcatagactcagggatatggccagagtcacagtcattcaatgacacaggtctaggaccgatcccgaagcgttggaagggaaaatgtttgtctggaaatggatttgacgccaaaaaacattgcaacaaaaaacttataggggccgagtacttgaccgtaggtcttatggaannnnnnnnnnnnnnnnnnnnnnnnnnnnnnnnnnnnnnnnnnnnnnnnnnnnnnnnnnnnnnnnnnnnnnnnnnnnnnnnnntg

SEQ ID NO: 14557 - DNA, 749 bp, Arabidopsis thaliana landsberg
gtgataacaacaaccttctcttcctcaactttagactcctcagacaactcagtacctattgagtactcatcgtcatcaatttgagcacctttcttcttagatttagtagcaccaacgagagatgacgcaggaggttgctgctcagcatctccacctcgagcactcggcttcttccggccccattggaaaatttcaggtctggttcagaattggttccgaattcttccgactaatcaataaatcgaggtgaaatttcctacaattcgaacggaaacaaattaggttttctgggatcggcacaacacaatccttttagaaaatgaaaccacaagagagacgaggaagcgatactgtggctaagaggagagaatcgaagaagctttaccttattccggagaggaattaatcgataggctgagctaagtttagagagagagagcgcggcgcggagagagagagagagagagtagagaaccgagaaatagcgaagctttgagaaaccggcgtgaagcttcctagggttgagctaaacgctgtgtagattttaccgattctaataaaaaaaaattgtgacgtttgttaaatactattttttctccgttttctttctcgatagtgttattttttcttttaaaataaaagatatgtcatattctttgttataaaatgtaatttctgaatgggattcaacagttgtaattttcacgttttaatatactgaaatctaacttatataattaagacactgg

SEQ ID NO: 14558 - DNA, 596 bp, Arabidopsis thaliana landsberg
  unsure (1)..(596): unsure at all n locations
tcacgtcgttccccgtagcaagtccattgctgatgtccttgggatagtgcacagtgggtcccacaagtcagtctcataacatggtcatacgtggcatggcttcgcctgtcatcatgcctcacatcaccttccaccgtacacggacacatacacttggtatggcgtgttgtcccgtcttttttgatatatgggtcactattgagactctggtgctgaggtcttctatgattgaggctgaccgaccctacagcgcagtgggggtatgcctgaactgttcgtgggggcgtatagtcatgctgaaggcaacctcccgagggatgtcgcatcttgtcttagatgccgtgggtcgatagtactggattgaaactccgcctcgccggattgctcgtcaaggacttggttggtcgctcccctcgtggggttgctcgacagggacctggtcgattgctccgtctcacagggtttctcggtggggatctggttggtcgctctgcctcatcgggttgctcgatagaaagtttgtcgaccagttggccgttttaaaagaggccatgggcctatttcgggtacgtaattccngtgtaccggacatgggt

SEQ ID NO: 14559 - DNA, 594 bp, Arabidopsis thaliana landsberg
  unsure (1)..(594): unsure at all n locations
tgtgctgaagagatttcctaagcatcttgcgcttccccatgaaagcggaattcacctgtaaatcaaggatatgggccaacctttgatggtagttacaaagaaattaattttttcgaaagagcaggagagttgtgcatcatttaattagagaagaaaagatccaaaatggaccaaggtacagagcctaacaggcaaggtaaacacatactatcctgcagccaaactacagcctccaccagaacagaggaaggccatggcgggactaagggggactccacacccacaaaaattatgtcatgttcatattaagtgcgacctctaggcctaagttctcaagatgtttagctccagccttaatccaacacaccaactcatctacaaaaacacatcagattgtgcccagagaagggttctctccattgaagactgccttgttgcggtgaatccataaataccaggcccccaaaataatggtgatgttcaaccctttctcttgcttctatgtatcttcttacatacctttcgccaccaatcggcaaagaagattcatctcagacggagagagattacagacccaagggcgnaagatggtat

SEQ ID NO: 14560 - DNA, 560 bp, Arabidopsis thaliana landsberg
ctgaatttcgtgcgatactcgaagaagccgtggcacgatcatgaagacgtaccggagccgacccaagacgcaccggaacagaccaagacaacaaccgagacgtcaaggaaaaggaagcagagcagtcgaaaaagaggtgacagggggctgaacaagtttcccgacagaacatacaaaatctcagacgtgagcccgaaaggtcagcccctagctccagaagaggcactacctaagttccggaatgcacttgggtttttagttagagataatcttgacataacaatacgacagtggagagatgtgtcagatgatgtcaagaatcaaatatggaataagctattaatgaggttcgttctgcctcggggttcagaagaactcgtgaaggaatacacgatgaagcagcttgcaatcaatttccgaaactggaggtctgagatgaacacaaagtttgcaaagaaaggtctggacccgaccaaaaaatataaaatctcagcaggtcagtgggtagtatttctagagcagaggagcagccctgatttcatatctctaagtgaggcaaa

SEQ ID NO: 14561 - DNA, 646 bp, Arabidopsis thaliana landsberg
ttttgtcgggtctaggtctttctttgcaaaatttgtattcatctcagacctccagtttcggaaattgattgcaaactgctttatcgtgtattttttcacgagttcttctgaaccccgaggcaaaacgaacctcattattagcttattccacatttgattcttgacatcatctgatacatctctccagtgtcggattgtgatgtcaagattatctctaactaagaacccaagtgcattctggaacttaggtagtgcctcttctagagctaggggctgaccattcgggctcacgtctgcgattttatatgtcttgttaggaaaattgtttagccccctgtcacctctgttccgatcgctctgcttccttttccttgacctctcagtggttgtctcggtcgattccggtgcgccttgggtcggttccggtgcaccttgggtcggttccggtgtgccttgggtcggttccggtgcgtcttgggttggttccggtgcgtcttggtatcgtgccgcagctttttggagcatcgacgaaattgagacaagacccctattcatgtaataaaatgcacaagaaatcatgcatgtgtaatagacattgtgaaatcagttaattaattaggtacaaacacgaaattaaggatgtggt

SEQ ID NO: 14562 - DNA, 464 bp, Arabidopsis thaliana landsberg
  unsure (1)..(464): unsure at all n locations
catcttctattacctttcgattctctagggctggcaagcatgacatggcagtctcccatatagagaatgatcatttttgttgtcttccatagctaaatgactactatagtttttcttttccctagttaatgttgttaataagaggataattttgctaaatttggtaaaagtacatgaattatatatgatatgtgatttagtcaagaaaaattatgtgaacctgattagattttaccatgtctcaggttttcaagaatgcaatttttatttccatgggctagttgaaatagttacctataaaatatcttatgacataaatcgatccagatatgatctacatacaattagaaagcttaaacgtggaaacttaattgatgatatgctttatggtgatcaagaagaagatatncacanagtgttgagatactaacaaaaatagtttttttttttcttggtggtataaa

SEQ ID NO: 14563 - DNA, 597 bp, Arabidopsis thaliana landsberg
  unsure (1)..(597): unsure at all n locations
tgcagcataccgaatgggcgacgggaggtcaccatcaacacaactttacgcccccacgaacggtatgaggcgtattaccactatcatgtagggtcagtcgacctcagtcgtgggaggacctcagcaccaaggtctctacagtgacctgtatatcgggaaaggcgggacagtgcgccataccgagtgtatgccaacacacgctggctggtgacgtagggctcatgatgacaggcgaacatgccatgtacgaccgcaccatgagactgacccgcgggacccgccacgcactactacgaagacatctgcaatggactcgctacagggaccagtgtgacggatgacgccataccgggagtatggctacacatggccctacagacaaccctagggatgccacgtcaacccgcgcaacggatctctcnnnnnnnnnnnnnnnnnnnaggtctcctctgtaaggttcttcccttgaaataggtctctagtaggaaataggtcataggaacggacgtgccgataaaattgcgcatcatactctaaatgatgtcgaaaaagaaactttttgcttctctatagactctatctataacgaaccattga

SEQ ID NO: 14564 - DNA, 635 bp, Arabidopsis thaliana landsberg
gctcttatatatatctccataaacataagatcatctcataaaatagtttacatctctaacaggttccttcaagaaccacaaagtttctcttagaaccaaatcaagaacaagtacacataagagctaaaagataaaagggtgaaaaatatctctcttgagtggcaatgtggcatgacatgttgaagatccaaggagagttataaataaatctctagaggaaaggaaggaaactaagggtttttgttcttacaacgtaaaaattatagcctatatataggaaaagacttgtgaacccaggttaaccagctgtgagaaagatttttttgtatctatttattagttattacaatactttgttgatgaaagtaagagataaattgtagtgacaaatcctcattaacaaaatattgtaagagataaatacaaaaaaaaatcaaatcaaaataattaacaaatatgttccatagttttcagatctatacaacatgttttagacattgacttacaacattcagaagaacaacaacatattttgaaacagaaacaaacatttgacatgagagcttaaccgcaatattgtctctgtttggtaatctcaccatctcttcttgttctcttatcagagtgtagagtag

SEQ ID NO: 14565 - DNA, 757 bp, Arabidopsis thaliana landsberg
agttgtgatgttgcttagttcaatggttttagaggttcgttaggttcctcatctctctttctctcagtcatacctgcttacaatacactttctaggtcctttgtctactactctctgtagcgcaggaaccaacttcttaagttgatgttgaattcatagtataatttacggatgtttattgtgtttgaatttttaaaaccagcttttaccggtatggtgctgcttatgtgcatttggttctgttgttatcttctcctaatcattgttcttttttccagctacaggataatataatttcttttggcttggccatccgttgtcaaactacagaggaagatgtttggctcatctaatcgtaagtaatcctatcttattcttacttgttggtttccgaagccaaatatttcgttattgttttatagttttatgctatttatttcttttgtatatacttctaaagaaaattgaccttctgaaacattgttcttatagcttttggacagtcatctggtaccagcccatttgggtctcaatctttgtttggtcagaccagcaatacaagtagtaataatccctttgctccagctacaccgtttggcacgtctgctccttttgctgcacagtcgggaagttcaatattcggaagcacttcaaccggtgtttttggtgcacctcaaacatcctctccctttgcctccaccccaacttttggagcttcttcatcaccagcatttgggaattctactccggcctttgg

SEQ ID NO: 14566 - DNA, 1050 bp, Arabidopsis thaliana landsberg
ttaataaattgaaaaaatgtaaagctaacaccaaaataacatgaaatatttgagtaaacattattacataaacaaacttgtataagattttacaaattgagaggaaaatgaacgaaaaaggaaaatatatttacccacagttgatactaaaggagagaaagggggtgaaagaaaggagaaaaaggatgaaagagagagaaagatacggctgacagtgacaggcgaatcagagcgagaatcccgagggagagaggaggcggcgactaatttaaagagaaagaaaaataaaatgtaaatagggtttagtttgttaagatttatattttccaaaaaaaaaaaaaatagtatgtttattaatagattaattttaaaagggtatgatagtattttctcaaaataaaaagactttcatgaaaaaaccttcaactattgacttatctaattttaagccttcaactaaattttaaacccttaagtaagttagtttaataaaacaacttcccaaatgtcggttaatccattttaaaccctttagttaaattatcaataaaaaatgtatcaagataagaaaatattttttttataatttcgcctaaacatatattgtttaaacgatattctattttatgatgttattgttttggcttgttagaaaacaacatttttcttacataaaacattgtgatgtttgtttatagaaccctaaattttcaaaatcttttatgtttattcaaaatcctaaaattgtgaaaagtgtaaagctagcgtctctctttctcatgcttctcttttatccatgtttgtcttttttttctttgggcaaaagcttgtttttccattcaataactcaaatgtagtacaaggtttgggagaatactattctcaatgtttgatacaacaagattaaaaacaataaaaggagcaaaagggttgtaagacgcaatgtcatatgcgagaagatggtagatcggagacacgaccatggacaatccgggaaatggaagattggtcattgtcaaaagacatgatgacgttggagaaaaaaccaca

SEQ ID NO: 14567 - DNA, 458 bp, Arabidopsis thaliana landsberg
tcatttcctcataagtctcatatacgtttatgtgagagtcaataatatggaagtttaaagtatctttaagcttacttgagattctgtaatcgcgagaagagctttagttttcaataaacgttgaagctctatgcgtttcctttgcacagaatcatgtaattctgatatcttggaaccaaaggaatggatcatggtctacaagataaaacaaaacaccattaaacataaacagaacctttagttcaaagattttaccataaaagcagaccatcagagaaattaacctcagtttgtgttttatgagtttgagtcttcacttgtgcattgggcgtttgcaaatctccattggaggtaacgattgtggaagcagtttcagagaatgcacatcttccaattgctctgtaaccttcctcttgtttttagtatccgctggaacttgggtgccattggaggcaatg

SEQ ID NO: 14568 - DNA, 493 bp, Arabidopsis thaliana landsberg
  unsure (1)..(493): unsure at all n locations
cttctcctgcttctttcgctcctctcacttctctcttcagatacaagcatatctcgtaatatcctctctttgtaacctctcttgaaacaatgcagtttccctgtttctgcttcttagcctttgattcggatttctaggactcggtgtctccttgcctttcaagttagcagaagcaagctctctgtgcttcgacttctttagggaacaaaagctggattgtgttccaaagaaccgtattgacagtacaatatcttccatttctacatagataaataacactgttagacaaatctcgaagcttttaatccaaaactcatcaaagttctatgctatttaccctattagttgcctgcatttagggcatttccttccacacttatccgccgcagatcgcaaacactttttgcagaagctgcagagaaccaaaattggacaattcagtaccaaattcaccatacaaagataactntgtcttgnctagttaaatctacct

SEQ ID NO: 14569 - DNA, 866 bp, Arabidopsis thaliana landsberg
gttatataatgcaaaattaaaaatatgtcaacggagatcatgttatagaacaaaattaaaaaggaaaaaaagatacgaggaggagttttagtggtggggacttacggagtaaaaaggagcggcggcgacgacctggacaggttgactcctggctagtgaagagagtgcgtggacggcggcttgacaaagctgcgtcgaaccggtcccaaccactatgtaccgatcctccgtcgcagcgttaccaacaacaccgtgcaagtccttgatcgcatcttcaagctctggctcaaggaaccaacacaagttcgtcatgtcgctgaagtaactcatgagatcacaaccacgtatcgtcaccgtacacctgtcacccatcttcctccagtattcttcgtacgccgttggatcaccactgcaacaatatagcgaaaaactatataaaaatctgatttgttagtgaaaacggagatttcgatttctttttgagcctatgatcttgcaatgccgttagggtttatttttatgagagagaagaaacgcactgatccagattgaccacgaaatcggacatggggatgttcttgttcgaaatgttttcgggtttcctcgagttctccagtttcaccatcttcttcttcttggtttggtcgtttgtatagtgcttaatgattagagaatagtgtaggtcgaagtgtatttatagaaggaaagcgatattttactaaaatattttattaagtaaaaaatattttttccctaaaaaaaagactggtatctggtttttaaatggagaaatatatttaaaattaaatatctttgctttttaaagtgaaataatgaaaacctttttactgaaaatgaatttcctt

SEQ ID NO: 14570 - DNA, 583 bp, Arabidopsis thaliana landsberg
ctcatcccctggcgctgggagatttagatctatcaagctaattattattcctgatcttctcgtgaattcattattagcggaagcgtgagatcttttgtgacctccgagagcttgaccagatgtgaagactttggcacagattggacattcatggtgactactagtactcttcttcttcttcttcttcaactcatctgagcctaattgatctgtttctgctatcttcttcttgtggcttgctctgtgtccccctaacgcctgatacgacttaaacactttctcgcaagtctcgcactcgaaccacttattcctcttcttcttccatctctcttcatcactttcctcttcctccttctcccacttgtctctcgacagcaacatgagactcaaggccacgtcttcttccgttgttgcagcgtccgacaccgaactcatcggttcctgctccgtacacgactcactgagttcttgaacccgatcttgatatctgctgctcttgcggtttcacttttcccttcttcgttggattgttgatgacgtaatgatgagatggatctcggttaagtctggatcgtttgcggga

SEQ ID NO: 14571 - DNA, 621 bp, Arabidopsis thaliana landsberg
aagtatatcaaagatgacttttaagttctagtaagaatatagttcctggtacaaagaaaagccagaagacctactgttgaatgatgactcatctgttacatcatagacgagtaatatacccatcgctcctctgtaatatgctgcaaagaaaaatggaccaaaagagttacaaagaaatgtcatctgaactttattaacaagaaagaaagtaaacaaatagacttagaatgatgagtaatcatctaacagaggaatcagcagattcatacacaaaacataaagagtgatcttcacttcacatagagcagagagaagttttaacctgtggttatagttctaaaacgttcttgtccagcagtgtcccatatctgcaatttgatacgcttcccatcaagttcgactgttcttatcttgaagtcgattctgaaaaacatgaaacgtacttaaaccgaacttttcaacaatctaacaagacaagatacaaagtcaaagaaagaaagacatacccaatggtagtaatgaaactcgtggtgaaagtatcatccgaaaaacgcagtaacaagcaactttttcccacacctgcgtatacacacacacacataagtacgaaatgaagagaga

SEQ ID NO: 14572 - DNA, 307 bp, Arabidopsis thaliana landsberg
tgacatatcaaacatccttttgttttgttttgttaagggtttatactatcaagtttatgagctgatctaacagagattatagacagcacatttgtctctttggttaattatgcaaaatcttacgtccacattcgtctctccttccatgatcccgatcacttctccggcggctgcgactgccaccaccacgatcagtagttcccatgactaccgtttgcatggaacaatcatacaagcaaaaagtggttgtgatcatgggagccaccggatcaggcaagtcatgcctctcaatcgatctagcaactcg

SEQ ID NO: 14573 - DNA, 729 bp, Arabidopsis thaliana landsberg
  unsure (1)..(729): unsure at all n locations
catcatgcaattcgatcttgactaaagcacaccacactgagcgttcaaaaactcttgatcgcgaattcgccgatgtatcccaacggaaactccatctcgtcaccgttctaataacctcgacgatgttaagccacaagaacaaacttgaactttaacaccagtcaatttcttgagcttgttctcggagatgtaaccactgattgttgatttgtaattcaattggtaagaaccaacaagattgaagctacatgaatcgttgaaatacgcatggaatttgcctgtcgttgtgtctaaatcataagctacgactccttttggaaggattccgacggggaagttgtagctttggaggagtgaatacgccgtcggagtatcggattctacggcagtgacggcgacggcgcgtgaagagaggaagagannnnnnnnnnnnnnnnnnnnnnnncgagacatttgggtttgaggaaacacaaatcgtagaagtaagaatcaaaagattttgatttctccgcctgtggattttcgttttgccgtcggagactttttgtaataatggtggtcgttgaaaatatctatcgttaagacataaacgacgccgttttaggtagacaactggacacgtggttaatatctacaggctgtcaggttgtcgtgatgagacgattattctgggaaaacttcacctacgataatagataatcatgaattgtaggctatcatgacatttgt

SEQ ID NO: 14574 - DNA, 682 bp, Arabidopsis thaliana landsberg
catttgaaggaatttttggtccagtcttttgaaatggtaaggatatgagattttttaaaatttataatctataatctatatttgagttgattcaaccatgaaaattagcatgccttaagttcaggggttgcaactcactgtatcagcatatatgacgctagcaccacctccagctaccatcgtccaaatgcggcctttaggattcaaaacagtgaacttcaaagaagcacttgtctgcaataagtaacaaacacacacacacacacacacatgtatggtcagtaacattactttcaagtctttcctgtctgagtcacaaaagtggtgtttttagaaaagctggatgcttaaaccttctcatctaaaccatggatgaagttctctgtagaactgaggacccttccaaatggcagaggaaattcaatgtctccccacctgtattaataaaacttatcaatccaatgagtttccaccggaaaaattgattgcgggtctctcaccgggaacttagaaatgttagacatacttgttgaaattcttgaaggcagcagtgtcatctaattctcctctcatatccagagggaatggttcccatcgactagtgtaaaaggattcatctccataaaactgaaaccaaatctttaaagaacacacaagtagatataagaagatgtcttgagag

SEQ ID NO: 14575 - DNA, 597 bp, Arabidopsis thaliana landsberg
atttatttaaacaaaaaactttgttttaaaatattgttaataaaatacgtttatgctaattttaagggattgatatgaagtttgtttggattaaatttgattgataatgtgattgacaaattaaattaaaaatttaaagtaaaattaattattttggaaaaaagatttaatgctaatggcattgggttgtaaataagtccaactctatgatttatttgctaaaatagctgcaaaaaggtatatatagatgtttttgggactcctagcattcgaagaggttagtgtgatagtctgggatctaagctgcaaatactaatctcccaaaggttcaagatgctacattgcacctatggtccataagtttagatggaagacctatgttgttcaggttggtggcttggacaaggattttggtttggtgatgatagaagtaggccaaactcggaaaggatattaagacagtaggtaccctttgttttatgtgaacgattgtgagtggagattatgtgtcgtgtacatcattaaaccattatcatattcataatcaagagacgagttttgttactagtaatcgtatgaaaatatgtccaacacaag

SEQ ID NO: 14576 - DNA, 497 bp, Arabidopsis thaliana landsberg
  unsure (1)..(497): unsure at all n locations
aaggagaacgagtttgggtttgtcggttatgacagtttttgcatgtccaccttagaggaatcttcgatggcccatcaaaaaatgaggaaagtttccaccttgagttgtcacaaagacttcacttagcaaactcactgtgtagtccaaagcagccattctggaggagtattcttaaagcatcagagcatcaggaaaatatannnnnnnnnnnnnnnnnnnnnntgcttagactaatgaagtcaaagtaaaaannnnnnnnnnnnnnnnnnnnnnnnnnnntgcaagagactcttttgtgtagagacgaggaaacatttcttgaagaggagccaaatgtttctcaggttggtagattcttcccgaggccaaatatatcgaagtgttgttatcaaatcccataccacggagcatgatactcgcctatggtaacgtgagaacatctattagaaaacacagctcaataacatactgaaatgtgaattagatcaatgaaatta

SEQ ID NO: 14577 - DNA, 602 bp, Arabidopsis thaliana landsberg
gatttcttgaatctccatagttttctgacttccattctcggtcacaccctcttcgtcttctcttatatcatcgaaatcaaacatcgggttctccattgagaaaccaggggaaaagagagtaccacgacaaagaggacaagtcgaatttgactgaagccaagtatcaatacagttcaaatgaaaagcatggctacacattggcaacaacctcagcttatctttctcagagaactcacagagacaaaccgcgcaatcaaacggctcttgagcagcaccattaccaccaccaccaccagcactaccaacaatctccttgtagtgaaaaacaggtaaagcatcgataaaagcttgatcaagaccagaatcattcaaatgaaaaagctgttgaagctgtctttgaagagcatcactagttgagatctctgggaatctattagaccttgaagaagcagtagcagaaggatgcttaataagaaacctgacgagcaaatgaagaagcccagaaatgaagaataagacagctagaatcacaattacaaacaaaaccgccggactgattctgttaccggacgacggtggtggaggagcggcggagaaagaat

SEQ ID NO: 14578 - DNA, 516 bp, Arabidopsis thaliana landsberg
cctatttggagaaatatcgtgtctaatctctgcgtcttcgctcatttttgttaacttagaaacatgaagtagatttgttggtggaggttccttttgtttgcttccttcacaactaatcctgcttagttggtttattggaccagaaactctccgtgaaggtaaaagttcgcgtctctcgagaaaatatttcgaggcatcagtgagtatcttcagtgcctctttaacaccactaccaacagattcgtcacggtcaagggaaatgtcaatagctaatgtgctataacgattaaagattgttataaaatctgcggttcgctcgaccgctaaaacatcataccaatcaacttcaccattgacttgcttctggaaacccatgcacacgtcaagaagtgcattgagacggcgaagaccaccaagtgcaggattaatttgttttgccttgagagcaaactctttggcttcagcaaaatcacccgctttatatttttacactgcgatggctttcgctcgtttagc

SEQ ID NO: 14579 - DNA, 847 bp, Arabidopsis thaliana landsberg
atggactcacattgcttgccgtgttggctttctcttcggagttgctaattttttatttaatatttttactattttcatcacattattgaatacgaataataattgtattaaacaatcattattggaataagacttagatgataaagatattctaatcatttataaaatacgtagatgttgactttttttttttggcaactatttgaaatatatttgtttccaacgattattattttataaaaaataatcataaaatttgtgacctgcaatatgacattaatagttaaaaaaaatttcgtcaaaaggaataattcacaattttaaatagataaaaattgtaaccagaagatataccatcatatatatttacaaattgtattattatctattcataatacaaaacatgacaaaagaaattggttgagttcttgtcgggtattttccatatctcacacaaataaatcaaaaattgaaaaagattacaagacacaaacaatccaaaaaattaagtatcaaaaggcaaattttttatttttatctttagtttctcgtagtgcaaatattaaagcggttaatttgatacgtaaaattcgtgttcaaccgcaacatattatttacgtaaacaacatttttcaaaaattgcattaattaattttggataataaaaaaaaaggtatatactactaaaatatggagattaactaaaactgttcatcaagaatcttcaatatatatctttaaagagatttatttcgaattttattaaagaaaaaaatttgaaatctaaagggcaccaaaaaaaaaaaaaaaagacaagaggagaaagaaaagcaaaggaagggcatgt

SEQ ID NO: 14580 - DNA, 560 bp, Arabidopsis thaliana landsberg
taattgagctcaagtcacttgaaattgaatctggagatcgagatggcaaagagattggtttcaagagcttaggtttgatcgagacgacgaacaaattgaatcgctgaagaagaagaagaaataagttaggtttgttggtagtttctaaaacatagtaagggtatttatgttatttaccagatataacgcagattttaatcgtttgacgctgactttaattagcgtctagaatttttagccgcagggtgttgcatttgccgcagctacttgcatcaccaaaacgaacatgctcaattgcgtctgccgccacaacaagctgcggtgaccaaacaaacatgctaatagtctagcattttaggattttaatagctcaaaatttgtaagttattaattttattggtaaaatgataatggtgtttaattaggggtactattcaatcatgtaataaaatttaaatttatgcccaatccgatattattcaattatgtattataaattatacattaaaatctagtgttatgatatttgtaaatcatgccttaaatctagtgttgaaaag

SEQ ID NO: 14581 - DNA, 855 bp, Arabidopsis thaliana landsberg
aggtcacgacaagagcaagcttgttcttgcatgttttgaagatgtttttgacaatatctatggagataacactcgttctacattccatcgccgccaagttgaagacttttatgtcttctctcattttgtaatggttaatgattcttgcagatagtgaaggcgttgaattgagcattgagacgttgactacgaggatgtcaatctccgaaggtgagattttgtttctcttaaggactttctcgatggtgtctatgtaaaactcttccatctccgagagcccatcctgtagcgtaggacgctgttcacggccctcaaagaagagccttggtgcgtaagtttgctctccgataccggaactaacgatggctttgaggaggaacttgtactcgttgagccgaaggtgtttgtttcgaaggatgatatcaccgctgaattgagtgttcaccatacgatcatcggaaggtttgtgacattggtagtccaagatgtagcagttttggtctctcttggagtctatgcgtttccagatcttgaagatgagataagagacgagaagagagaggagcataacaagaagatccattattgtgtttttattggagttagaaagaggagtgattaaaaatgcatgaaaatgtagcaaagattgttgtgggatatataagaggacagtggagcaggaaaagacagctctcgttttttgacaactcattccgtccaatagattatgtcaatatcatttagtaaattctcgggggtaataaaagcagacttgtatttaattggaaaagttcatgcaaggacaaagttatggtagaaaaattgaacaataagatgcacattgatgattgattg

SEQ ID NO: 14582 - DNA, 193 bp, Arabidopsis thaliana landsberg
ctcaccttcgatttgcaggacaagttcggtgtgaggtcaatcagtgtcaataacgatgaactaatgggtgctgtgtatctacaagttagtatcatcagtcaagctctaatctttgtcaccaggtcaaggagttggtcatttgtcgaacgtcctggggcgcttctgattgattgcattcgtcattgcacaactg

SEQ ID NO: 14583 - DNA, 718 bp, Arabidopsis thaliana landsberg
caaatcctttgtactggccagattggtactgaaaatagatgatgaaacttctcttgtagtatttttttttcaattttccatcaacactcttttctagtaaagcactaaaaatctctcatctccctttagtagatagaaatcttctagttccttgtacgatatcattttgagatgggtcttcattttctgctataaggataaaaaaaacaaaacacatatacacgtttagaagcataattatgaacaaactattaaacttttgatagatgcacccaatttttaattaaaaacgaagacatggattctaactaattttagtacaagtaaatcactagagttacatcaaacaattaatgtaaaccataatatttaacgtaagtctaaaataattaccaaaaatgcagaaaaacaaaatgatttgaaagatgacgagctattaaccaataaaccaaactatatggaagatgaacatcacttcattgccattccggacagattcatcaattggatccatcagtgtattaccacaccaactttctcgatctctaacaatggtagcacaggtggttatttcaaaagtaccaaaggtataagacatggagaccctctttctccctatctctttgtccttgcgatggaagttttctcaaagctcctgcactctaggtttaattcgggctatattcattaccaccctaaagcagctgagttgaatatc

SEQ ID NO: 14584 - DNA, 658 bp, Arabidopsis thaliana landsberg
agctgtccttataacagcagcaagtactttacttgtagctggagttatcttcttctgcctccaaagatgtatcatcgcacggagacggagagacagagttggaccagtcagagtcgaaaacactttacctccgtatcctcctcctccgatgacgtcggcggcggtgactacgactactttggctagagaaggattcacgaggtttggtggtgtgaaaggtttgattcttgatgagaatggtcttgatgtgttgtattggagaaagctacagagtcagagagaaagaagtgggagtttcaggaaacagatcgtcaccggagaagaagaagacgagaaagaagttatttattacaagaacaagaagaaaacagagcccgttacagagattcctcttcttagaggaagatcatctacttctcacagtgttatccataacgaagatcatcagccgccaccgcaggtcaaacagagtgatccggcaccaccgccgccaccaccgtcaattgcggtgaagcagagtgcaccaacgccaccgccacctcctcggattaagaagggttattcaccatcgccaccgccacctccgccggtgaaaaaggttggagctttatcatcatcagcttcgaagccaccacctgcgccggttagagatatagag

SEQ ID NO: 14585 - DNA, 619 bp, Arabidopsis thaliana landsberg
aacaatcattacaaatatttgaaatgacttacattaagtttgagaacacctattcaataaagtttctctatgaatacaaagagacaaattaaaccagagtcgtggcttaccacgaatctaatttccacctaaacatacttaacaatccacgtgtcaccgtcataaagtgttaaaacttttggacttttttgttctgtaagaaaaaaggagtgatttttagcaatgggtgcgttaccaatttctccagtttcccactccacatccaaaaaaacagtgtaataataatcataatcacctgatcaatctcttacataaaagctacagatctggttttatacaatcatcaccgcaccaagttcctaaaggtttcgactttactgtttctattttcggaaagagagtgcaagattgaaatcgaagatgaaggcggcaacaaggccgatccacgccgtgacgacatgggttcgtcggcaaccaccaaaggttaaaggttttctcggtgttgtctccgccatgactgccctcgttttgttgagagtgattgttcatgaccacgacaatctttttgtcgctgctgaagctgttcattcccttggaatctccgtccttatctataaac

SEQ ID NO: 14586 - DNA, 551 bp, Arabidopsis thaliana landsberg
cgatccgtggtcattacctttttaattacctcttttatttaccaatgtgttcactttttaaagcctagactcccacgttaattatagtatagatagataccaatcgaacatttacatgcgatggacggataaagtaaacatttacattcaaaaacttcatattacgtatcacatcttcttgaatgaataagtctttccttctactttttggcaaaaacaaaacctttagaaagctacaatctaacaaaactaatacgaaaaaaaaaaaatactgacgcgtgttcaaaatagtagtagtgattgttgatcagtgaccacgtcctctcttgctcgacccagacgctaaccggaaagcaaaactttccgagctgtgcttcaccttcatagtcgccgacgattggtcatggccgttggtatctctgaacggcttcgatcgtagagttctgcaatgaccaccctcaaacatcaacgacgagctcaccaaaaataagaccacacacaacacaaacacattcttgttctccattttataaatatttttcgggtctctt

SEQ ID NO: 14587 - DNA, 866 bp, Arabidopsis thaliana landsberg
acattcgtatccattttgatgattattacaggttgcgtgggagatcttcacgccgctactccacaggatcgacattggagaagtaaagtcaatcccatacaaaccaggaagccgaggaccgaaagaagctgatcagctactagagaaagctggttatcttcagactcacggctatatctggatccctcctacactataaaaccctacatatatataaatacacaatacatgtatctacatgtatatgtataaattatgctgaatagtccctcctcgagtttggtgtttgtacgtgaaacttgctacttcagctgttcactttgacacttcctttggtcttgtatttgcggctttgtagaaataaaaataaaaatcttaccaataccataaatgaatttagcttttgttgtgctcgttaaatgaatgaaattgacgatgagatagaaaaaattgccaaaaaatgtagagtttgttgatatacacacataagttcaatctagaggtggttgaaacacacattaagttccatctagagtttgttgacacagacacataagttgagtctaggaaccgacgccgtctttacatagtcatcattatcattagatgaccaaaaaaaaaaaaaaaaaaaccgatggataaaatggatctcgatagaaaaggctatctttcatgatttctcttctttattgctttgcttctgaacttgctctgtttatgcaaaaacaattgaatgtccatacagatcgaaatttgacgtaaactatcgacagtttatgcaaaataggtaccatctagataatccagatgtgaccataagttatccgcatagaacaacactcctaggtaccatctgtatttttttt

SEQ ID NO: 14588 - DNA, 354 bp, Arabidopsis thaliana landsberg
tttgatctgctatccgtaagtgcgctcgtgtccagctggtgaagaacgggaagaagattgctgcctttgtgccaaacgatggttgcttgaactacatcgaggagaacgtaagttctatttctccagctcataggactcttcaccacgtgttaacactatttatccagatcgtacgacttttcaccttgggtaactgatggttgttcctgcctgctgttcgctgctaattgccgccacactgcgtctctctgcaggatgaggtgctgattgctggattcggtcgtaagggccatgctgtgggagatattcccggcgtccgtttcaaggtcgtgaaggtctctggcgtttccctcc

SEQ ID NO: 14589 - DNA, 751 bp, Arabidopsis thaliana landsberg
ctcaagcgattaacaagtatttccgatctactaaatttgaagcaacaaagcattccctttcgacatgtctaaagaagtaggtatactatgatatatactcttgttatttatcgtatatctttcttcatcttctcattttcacttttaaaaatttaagtgtattccacaaaagctttttaggaatttttatagttttagaaataaaggggtgaaatcgtaaataaagaaaaaagtaaggaccctagaataaaataaggatactggcgcctgagaaatcgaacaaaagtattctgacttccgctaatacagttcgtcaatttccccaacccaaaaaaaacttttaatttttataaaataatttgattaattttgtcgtaatttattacacaactgtattaaggctggcatttgatcttcaaacccatctcgaatccttacaaattttctcaagatttaaaaccctaattctttaattttgttcttgtgaattttccctcgtaaaaaaaaatggatcaaattccttgagtagcaattttgtttggtgctgacgagaaagagatggcgcgacagatgacgtcatcccagttccacaaatcaaagactctcgacaacaaatacgtgagcttttcttcttccgcaattctgggtttcttcttactaattttgcttttgctctaccaaatttgaaatcttttgtggactcactactccaagttttgttctttatgacttttgagcgcagatgctagga

SEQ ID NO: 14590 - DNA, 581 bp, Arabidopsis thaliana landsberg
acatctcattttttaatctttaatcttagctacattaatttatttatttttgtaaaatatatttgcaactaaatagtttattattttaaaatataaaatataatttacagttggcggaaaatataattttgtagttttgacgggaaaatatgatttttggtttttgcggaaaaatgtaattttgcgatttatgcgggaaaaaaaaatttcatggttttggcgagaaaatataattttgcagttttgacaaaaaaaaacataatttggtggatttggcataaaaacatgattttacagttttgacgaaaaaatatgatattacagttttggtgaaaaaaaatgatttagtatttacgtaaaattaaatttacggttttttaatttttttatttttctggcatgatataaattttgcgattttttggatttttttcaaataagaagtggttaaagaaaagaaaaaaagagctccaatatttactgacagagaacttggtcatatacatacttgctggcggctagatcatgaagaggttaggaacgtaaataaacacaaatcgaggggcattttaaactcaatc

SEQ ID NO: 14591 - DNA, 846 bp, Arabidopsis thaliana landsberg
gactttcttttgtgcccgttcaatggatttggtgatcatgctgtgctggatcacctctccttcttatatcctgcaaagtccatcaccttggctatacgctcactgccgaacatacgcatcaggtcatcttccagcgaaacaaagaacagcgatgaaccgggatcaccctggcggccggcacgtcctctcagctgcctgtccacacggcgcgattcatgtctttcagtacccagtatcgccaggccacccgcttcttttacgccaggtccgagtttgatatccgtaccacggcctgccatattggtggcaatggttacagcgcctgcaagtcccgcctcggtcactatctgtgcttctcttgcgtgctgttttgcgttcaatacattatgaggtatctgtttctgccgcagcatcctgctcagcagttcactgatctctaccgatgtggtacctaccagcacaggccttcctgcttcgcgcagccgcacgatctcatcgatcaccgcgccgaatttttcgcgcttggtcttgaagataagatcctggtcatctttacggataacaggtatattggtaggaatgctcaccacatcgagcttataaatatcccagaattccgctgcctccgtttccgccgtaccggtcataccaccgagcttatgatacatacggaaatagttctgcagcgtaactgttgcatacgtctgcgtggctgcttcgatcttcacgttttccttcgcttctatcgcctggtgcaggccatcggaataacggcggccatccagtatacggccggtctgttcatccacgatcttcacagcgccatccatcaccacatactccaca

SEQ ID NO: 14592 - DNA, 686 bp, Arabidopsis thaliana landsberg
aattggcgtaactgtcgatcaacaccacccctggtgacgcttgacactaatatttgacgacaattcgatttcgcgttttattaaagtattgaagatttgcatatttgtagattcgccttagaaattctgcctatattcaaagaagtatgtgcacgtttttaagaccttatatatatatatatatatctaaccatagtctaggatgatagtccgtccatcagttcattgtccgctacattaattcaattttgaaatattttttcagtgagagaagaagaaaaagaaacatacgatttaataaaatctaacaaaatacacaagaaacctaatgaactagcaatacaaaaaaaatcaattgtgtgcagaaatcgaaaggctagaaaaggaggcaaaggaacgacagggtgtaaactactctcaactgaagctaaatgaagaactcatcgctgaagtaaacagacttaagctggtgagggaatgacaaacccttgccagttcgagggttcaataatgcaaccattagacccaaacatgtttctgcaacaactcaacattaatgagttcaatcagcaacaaccattggacccatacatgttctatcaacaatgcaacatcaaatgagttcaattagcagcattcatttggctccaacatgcttaaacaacaactttacatcattggtttta

SEQ ID NO: 14593 - DNA, 429 bp, Arabidopsis thaliana landsberg
caaatctcattgaaactcttctaagctggctagattatatttttatcaaaccaaccgctcacctcttcgtttccggttgatcggaatggaagtggaacggggatctttgctggtggccggcttcctgtagagagatctggcttgatcagaaaaaggaaaaatccaacctcgaaataaaataaaatagatgatacaagaatttacaatcttatacaagttccaaaggaaatatcacagaccatctgtgccaactggccaactaggagcattggtcggagcatccaaacgctctaaaattgactggtcggccttcatgatcgatatcgaaaaccctgagaagggaaggagtatgagagcacagcacaaaatcagtgactctacatagaccgcgcccacacagtcacctgccatatcaagagacgacataaa

SEQ ID NO: 14594 - DNA, 754 bp, Arabidopsis thaliana landsberg
taatcgataaacgtttaccaagcaagacaacaaacttaaatagaaagcaatactaagaataacaggctttaaacaatataacgcccacaagcccaattcatgacctatcagtgtcaggttggaaaactttgttgaatctctaggtttttctcttggtttctcttaacttgatgaggacatttaatttcttgtatcagtgatctcaatatttcggagtcttattttcttttaaaaatttcactcgacaaacatatgaatgttccaatatgaaatcgatgatactaaactcataaattgaaattttcacagtagaaattctatttttttttttaatcgattactaataattaaggcccaagaactcattaagaatctgtcttcttcgttgttcaagtcagttaaatagaactgttagtgcagagagctgtctgtaacgaacaactaaatcttctcatattatttagttattcattataaaattctggcttgacaatctctcttggctattattatcaaagtccgactgaaattttgactacataactaacagatatttcactggccttgagcgaggcacaaactagtggtctacttttagagatcaccgtggtgaaatgtttgatttcaagattgtgtttatggaacaatgatggaacttaactagagacttcgagctaacaatgttttaggatcaagtattcaaattgattcagttagataagatttggctgtatgattgtctaaatgattttta

SEQ ID NO: 14595 - DNA, 593 bp, Arabidopsis thaliana landsberg
ttttttttgatttttgatagaagttacaagaagggttgggttaggtacaaatgaaaattcacaagaatgtagacaaaacaaatagccaaagaaaaaaacataaactcatagcagaaacgatagaaaaaatatcaattatgaaatgtcaaacttggaaatttgcgggatttttacagttcaaagttataaaagagctggagtctcatcctaattgctactagcacactctaacaaagactagtcctcaaaacctctgaataagatgcctacaacttctctccaaactacatgtatgttttgttaacgcaaatggcattgctatctctgcaaatcatgaaagacagcttttctattctatctcccacaaaagttgaaataagactcaactaatcccgttgacaaaataaaaaataaaaaagaaccacatacataaattagaaaaataaagaaactacatgccgtatgtcttatccaatgttaaaataatatggaattatacacttatatattttaaaatcagacttcttcggttcatgtaaattacttgcttccttaattatgtcggatcatataaatcgtgatagcatattatg

SEQ ID NO: 14596 - DNA, 534 bp, Arabidopsis thaliana landsberg
aggcaatttcagaacttgagtttctgacttgccgttgatctttgaacaatcttctccaagtcgctttggctaaacttgagagagatcctatgacttagaaaaatatctcaagtggttttccatctagtctaagtcatggattataaacattttgattctttcactcatatttcttcttttgctcaaactagcttcaaaatagcgatatgttgattttgagctttccaacctttctagaagtgttgaatacgttcctcggggtattttgaacttatccaaagagtagaactattggtagttcatctatctcatgttttacccctatttggttgagtctgagttgattccgacttagaaactgaactgttgaatcttatgaacctgtgaatcaaagactgggcaaactagttagtccgaatggttgtgatggtcatcaagcaccaaaatataagaaatggtttaaggccatatccctttcacaaccttccagacatgtccagtaataaagaaaagtttagtttctatatgaattaa

SEQ ID NO: 14597 - DNA, 534 bp, Arabidopsis thaliana landsberg
  unsure (1)..(534): unsure at all n locations
tattggtacaaaacactattacacatctagtggataagggatgcgaacaaaattaagtcacaagtcataagctacgtacgtcaaaaccgccacaaaggtagaaacagcgagcagccgtgtatggatgtttggattgacatacccaagccagtctgccacagtcacagttaggcacaggaagttcaggaggaataggagcatccttactagatacgtccggatataactcccgaggacaacctctcttctgtcacaacgcctcccggtacatgtctttcatctaataaacgattatgattatcacttgtacctaataggctttataataggtttacacaaactatcaaataaaatatactcatcatattaatgatactatatatattatgagaaacattggaaactaataatcgaaaaagtacaacctaatatacaaaatgaatcagttgaacaccataccttggtctacgaagtgtaccaactcgaatatttgaatccccagcatttttacgaagntttgaaatgagaggaaat

SEQ ID NO: 14598 - DNA, 1094 bp, Arabidopsis thaliana landsberg
gagcactggttatgtattgccaaacaagtttctccttgaaataggtatatagagctaagagttccattttaccatctggcagagagtgaatttgttttggcaattcctaagttcctaacgtaatctaatgttgctatcctaatagccaaggagatgcctgatagtgttggaaaattgcgtcggatgttgaagtcaaagcatccttatatcgagcgtaatgttgattcggtggtcagtgtcatcaggcaatcaatgcaacattatgcagcatttgagtctgctgctctatctttaaaagatgtgtctcctggaaatgtgagatatctctattgatttagtttctattccctttttgtataattattattgtaagctttcggttgaggtgtataagctagttgaaagccgattagggtattaaaaaccctctaaaactcaacctgcaaagaaaacaagagcctagagttggaataatttactgtcaaagactaattatgaatccaaatttcatatttctgaaacctcaccttatggctcgaattcagagtgcatgtgatacttattggtttcaactgttttcctgtattctccatgtctgtttaaaatgtggccttcttatattgtaggtaatggataagaatattgaacctataagagagaagaaagacctgcacacaggagatgtggcttctccaagtctgaaggaaaattcttcgcagcttgagagtaccagggacctaattatgggtgcagcaaatactaatgaagggagaggtttaggatccggcttgtttggttctgctaaggtgacacctagttgtttcttttggttggtgctctttagtatccatgccgggctctcaaagacatatctgttatttattaggtttctgcggctgttcggatctctaagaaaccaagcagtggtttaggagctttgctgggaaatgcagcctccaagaagaaatctcgaactgatgagaaggtgagtttatatatgtgaaaactctatagttggttttggttgcagaatgattgataaaaatgttttcaggtgaaggaagatgtgaagctccatcagataagatgatctg

SEQ ID NO: 14599 - DNA, 460 bp, Arabidopsis thaliana landsberg
aatgtttttcaatcgttgtacgcagcggctgccagggttcagacacatgttccgaagctctttcaaagattgttgcagctttatatttttgtcagcttcggcttcgtattttgtttgcaaattttttttctcttgttcgaagatctctgatttttagacaagttccttgcttaatttagcattttcggcttgaatttctgcaagtgaaccctccattgtctgaagcaggaagtccttttttctctagagaagcttcgtagtctttaatcttgttttcaagccctcgattctgatttcgtttttcttgtccttgaggtcttgttgcatcctcagtgctttactcagaagcataatctgtagaaataagccttcatcagaaaactttgctttgtcataaaattaaaagaaactaataggaatttttaccttggaaatgaaaagaacagactgtcgatgatat

SEQ ID NO: 14600 - DNA, 416 bp, Arabidopsis thaliana landsberg
  unsure (1)..(416): unsure at all n locations
acatacagactaataagatacatggatcttcgagaacaagtttttgttgagtctagtgaacgagtttaagaaagctaaagaactgattctgctcgttttaccattcgcatccgccgtttatgaatataggagatatcgcatntnccttnttccaagaagttatctatctcaaacgtgaaactcgtctgctcatgattctccatatctcttccgagacgctttcttaggcttttgttacttggaagaatctcacacgtctgtttaatatttatagacattgaaaataaaacaaaactttttaaaaccctatctcaaaagatataaggaaaagctgaaaattaatatttttaaaacaagtcagaagcaataattaattaaccaaatataatcctattcctctttaatactaagtcatg

SEQ ID NO: 14601 - DNA, 560 bp, Arabidopsis thaliana landsberg
tgaagcaaagttttctgatgaaggcttatttctacagagtatgctgttgagtaaagcactgaggatgcaacaagaccacgaagacaagaaaaatgaaatcataatcgaaggcttggaaaacaagattaaagactacgaagcttttgtagagaaaaaagaattcctgcttcagacaatggagggttcacttgtagaaattcaagtcgaaaatgctaaattaagcgaggaacttgaccaaaaatcatagagcttcaaacaagagaaaaaagatttgcaaacaaaatacgaagccaaagcagaaaaaaatacaaagctgcagcaatctttgaaagagcttcgaaacatgtgtttgaactttggcagccgctgcgtacaacgattgaaaagagtcttaagctcggttggagccaactccgaagagtttacccctttggctgaagacatactaaacaccttcgaacatactgaaaataaagttgaggcacttgatgaagtgatagccgggcacggtgacttctgtgccttactagcttcttgcggtacgactgtagcatttatga

SEQ ID NO: 14602 - DNA, 712 bp, Arabidopsis thaliana landsberg
acaaaaagcttcctaatttgaatcacaaacataaaaccctgatttaaaaatccaaactttaatcaataacaatctaaaaaaaacagatttttgatatacctcagatccaggcaaacactcttgaacgaaatcgatttcttcatcagtcaatttgaaattggctaagaacttaacacactcttctaatccagcaaacacagtgtactcaccaccaaatgggttcttacgaaaatacagatcgaaactgaaaaggaaacaaaaacaatttcaaatatacaaaaccattcagaattcaacatcaaaagcagagcatgagaagagattgtgtgttgtacacggatcgttcgttgtgtttgccagctttccaataagcataagccatggtgaattgataaagatcattgagtaaaggtgtgaccattggattcgttggtccgtcaatgatcttctgacccaattctgagccgttctctttcggctccattgtcgtcgcttccaatttgtgtggaacaattggcttcgtatgagtgagtgtgtgtgtgattaccagagagtgaatggaccaggaacactggttcttggttgtttatattggagtggtccaaggaaaaagaaaaaaacaagtgggtttaaagaaagagacgacgaccaccacacaaagggaaacttgctttggaacttgacctagtctttcttttagagcccttattgg

SEQ ID NO: 14603 - DNA, 431 bp, Arabidopsis thaliana landsberg
catcctctcttaaaacaatcattagaaaactcccagggatctggaactacttttcgaaatccctaaaaccaataataaaccaaaataagagctcactactaaaaaacctaataactgaaaatttcgattcaaacgtatattgagactcacgtaagtattgagctgacgaacaaaactcgagaagttattatgtttgaagtatttgggaagaagatctctagcgaattcagctggtcgccacacaataaaagtggttccatcttcgttccacgagatcaattcgtcgtaaaccggatcttccacaagctgatacgttttcgtcaaaaacggcgtcggaattgacctctgtgaatctcctcctccgccaccaccttcaccactaccaccaccgtcaccaccagcaccacatccactacttccaccactattcc

SEQ ID NO: 14604 - DNA, 734 bp, Arabidopsis thaliana landsberg
  unsure (1)..(734): unsure at all n locations
ccagggcgacggccaacccgcccaagacaatgttgaatggtgtgggagtggtgagtggctcggtgatgggtccagttgtaaagtcgaagccagggaaagcttttttctcaatggttccaggggaggttctattggcttcacttgatgctcttagtaagttaaatttatatttattagctccacattgacattagattagattatctttgtaatgatgaactaaaaatagtttgatttgatctttgaaattagataaattactagacgctgctgaagccgcagagagacaaactctttctgctacgtccaaagctactacaagaatggttagtgagaggtaagtttcacagacaaagtcctcaattttgcctcacgtttagtgtaaatgtctcacataagtgaggttacattaacaggttaggtgagagcgcgggagaagctacgaaagatgtactaggcacggttgggcaccgcagccggcactgcgtggaacgtcttcaatatccgcaaagctttctctccttcctcttcagtcacatcggggatcctcaaaaacgcttcacgaaagtgatatttggtgtttgtatttatttgtgggcagagaccataaggttaaaattaagtcagaatatgcaaatgtgtaatcttgaatctcaaacaaaggaaacctctcttcctttaccaaattatccctcatgtgtctagggatacacaganctcaacatataaacaac

SEQ ID NO: 14605 - DNA, 613 bp, Arabidopsis thaliana landsberg
tgtcttttcgtagggcgaggtcaaaactgttaacagagtctggttgcgtactcaacaagttaatagatagggtatcggtgtagttgtagtagtacttattcaaagtcaaaacgttaagaggaaaagaccaaactaatcattcggaccgaaacaattccaacttaacatagtagtaatacaatatttactgtcgtgacgagcagatcttattgatctacgaatcagaatctctaaagtgtaacaacttcttcttctctttctctcgctataatcaaaatcagaatcttattgaggacgttaacattatgaatatcttcacgagatatcaccttcctcgggtcgtatcaggtgttatattgccgctcttccttttccatcttttgccttacgttacatgtcagcaagagtcggtaccaacaaacagcattagacaaaccaatctctcagctgactcaataattgcaatcgttgtgcttgcaatatttatatcattaggcatggtctcttgttgcttgcactgcatattctatagggaagagattcgggcggcaggtcaagatgtattacacagtagagcagggcgtgggctcgagagagaagtcatcgagtcttt

SEQ ID NO: 14606 - DNA, 984 bp, Arabidopsis thaliana landsberg
atttttttgatttaaaggtctcttcacattttggtttggtatgatattttagccgttcattcccgacccgccaaatgatctattcacgttatcgttttgatatgagaccaacaagtttatagatgttattcacactatttcgaacaactagagccaaatcttacaactccaaatttatgtatggtctaatatttatgtgaatatattagtgtcttcattgtgttactgactgaattttaaatccgaaaatgcattttttgttggaaaaaaaaacaacactaagtaattaagacgacatttcacggaaataaaagtcataatgtttgtaaaatacggttctccctagctaacactacatccaaaatttaatacgtagaccggcttggattagtacttatttagggaggggtaatcttgtagtgagggaagggtaaaaaagtaactaaagaacaaggtgaaacgagttattgagtgaaaatgatgatgatgatgaaggggagggtaataggccgtcgtcccccaaagagtcgcaatgatggttggggattggttcgaaccatcatgattcattattcaatttcaagttttctatttggaccattttcattgctctcttttactcctttcatttcccggtttggtcaatattggtttagtcaacaatactcatcataagccataataataacacattttagaaggtgttcgtgtccgattctcttcatgaccctttatttcttttcctttcatcatcccttatttagataaagatcgaaataattaaaaagaaaattaaagagagaaattatgaagaggaaagttttgggaccccaaaaaaaactataaggaaatttttttataactctccatgggttatgagtgtgccacagcgtgaaacatcatagtttacaaggtggattgtttttattttatgggcactttcgtcaattttcatcatataacttagtttcattaaccatatat

SEQ ID NO: 14607 - DNA, 471 bp, Arabidopsis thaliana landsberg
agggtttgatagatacgattggaaatatttattcgtgcggggcatcatcgctagatatttgggttccaatctgaagagaatctcgtctaggagatctaaaggtaaaccattgatgatggaagatgaatcgaaatgatcatttacatgcttctgtttttctcttcgtaaaccatccatgattcagagataaatcaaaatgcgaatctccctacttttgctttgcttgttgatgtgatttttttcattaatttatcaactgtttactttggaggttgttaaatagacaacaaattctagcttgaaacaaaagaaaaagggtaacaatcaatttcattaaatttttaaagcaagacaatcaccaatatgtgttagtagaaataaaatttattacattttgattgatttttaagaaaaaatcaataatctcaattatctttgatgaaatcatgaataattgaaaatattgtaaat

SEQ ID NO: 14608 - DNA, 504 bp, Arabidopsis thaliana landsberg
tttttttagtcttcgcggtcccgctcaagctcggatcgctgggaggcgaactggtgggacgccgccttggtgtgctcctccatctgggtacgccagtcgctaaggcgctggtgttcggcctcaagcgcctcccactcccgcaggatcgccgcctcagtctcatgaagagcctgatgggcacgagacatcacccaggggaggggaaccatcattgcttctggctcggcgccggaccggagccgccgcccaaaaaccacctcagtctcctccggagtgggcggcgggatggagctggacacgcccccgcatcacctttcggtggcgggggtgggtgcagttaggacctcctttgccgctgtcgacggtgtactcaacgacatcgccgtcgatgaggctgtggtagccgtcggagcagttgtgaccctctccgccgctgcggcgccacttgacgttggcgtctctgctgccggacccccagctggagcatgggagcctggtggcgct

SEQ ID NO: 14609 - DNA, 535 bp, Arabidopsis thaliana landsberg
accgtcggcagcggcagaagaggccccaactgcgcccgcccccgccattgaggtcaacgcaggggggcgcgtcaagctccatcccgccgcccactctggaggagacggaggtggtttttgggcggcggctccggtccggcgcatgttctcctcccccgggtgctgtctcatgcccatcaggctcttcatgagactgaggcggcgatcctgcgggagtgggaggtgcttgaggccgaataccagcgcctcagcgactggcatacccagctggaggagcacaccaaggcggtgtcctgccagtttgcctctgagcggtccgagcttgagagggaccgcaaggactacaaaaaggacctccagaaggtgtacgcccgggagttggaggtgggcaggaaggagaagaggctggccaagaaggaggaggccttgaaccagagggaggaggtcgtcacaaagctccaggcgaacgtgagtgccttcaacaaaatcctagagcagcggttctagcagaccgcggctgtggagaggctgcaaa

SEQ ID NO: 14610 - DNA, 843 bp, Arabidopsis thaliana landsberg
caggctatatttacctgctggtttccttcttctctaccatagtgtcctaaaaaaaattcttcaactctttctctcgtcctttagtgactgcgaaaaggattcagttcatatatctttgtttttgtaataatcaattgagtctcggtaagtagtttaaccttgattacaaagtttttttattttgcgagatcgattttgtaataactagggtttctggttttacttccctagatgggaacgcttgatcttccccctcgtctcgtagcttttaaggaagaacctcgcggcgagcgagttaatgtgtaccagaagatgaaaatgttgtgtgctatcttcaacgcgcttgacgatgataaacgacatgaactatcgcggtcttctctcggagatcttttggattttcctaacaaatcggcgtggtctcccaattttggaattttctaccggtagagaaaccgaatgagatttggcttctttttgctggtaccccaatccgtttttcattgagggagtttaagattgttactggtttaccttgtggtaagttcccgacaacaaagaagaagaagaaaggcacagttgggaagataaaacttttctacaacaagttgtttagtttagaagatgatgtcactgttgaccgagtaatcgccctgctgaagaagaagattgtttctaatcctgatataaggttgggatgtgcgtatttaatactcgtcgatggctttttactgccgacatcccattatccaaaaattgtgaaggcccacactgaaatagcggaggatctcaatgcatttcttgcctttccatgcggcatattgtcatttaaaagatgattaa

SEQ ID NO: 14611 - DNA, 463 bp, Arabidopsis thaliana landsberg
ttcgtctgagtctcaatgagtcaccatgcggagggagtccacgctagcacccccgctaaacacaaatcttattgtcctcgatttccaaaaccacaacagttggtgcgctagatagggtgtcattagcgtgccaatagacactcatcactacgatggcctacgcctcaacgttcactgacggtgagacctttgcgccagggagccacatcatgtttggctccctcgacttccttgccaccgctaatggccatctccgcctcgctgactccaacatgtatctcaccatgggcacacgacccgcacgccccaccaggagtaaggaggagaatcaacgcctcaacgggcacaccaacgcctttaagtagcgggcggcggcatcctcgccttcaacactagtgttcgtcattgatcactagccaacatttgtccttgacttactggaggatgattcaagccacgactc

SEQ ID NO: 14612 - DNA, 436 bp, Arabidopsis thaliana landsberg
  unsure (1)..(436): unsure at all n locations
tgtgtccttgggataggccttattgaggctggtgtagtcgatgcacatccaaagcttcccattagccttggggacgatgactggattggccagccatactgggtgatggacctcttcgatgaagccagtgtctagcagcttccgaacctccttgcggatgaagtcctgccgctcaacggactgtttccgaggcttctgactcatcggtttggcgttagggtggatcttcagatggtgctcgatcacctccctggggatcccaggcatctgtgatggttcccatgcgaatacgtcagcatttgcctggaggaaggcgatgagcgtgnnnnnnnnnnnnnnnnnnnnnnnnnnnnnnnnnnnnnnnnnnnnnnnnnnnncgtgctgagccggatggtcttgacgggaccgccgtctactccagatggctgcacctttg

SEQ ID NO: 14613 - DNA, 624 bp, Arabidopsis thaliana landsberg
gaccattttctacacatcacgttagatgatagcattaaaggaatgaatatttctttaggtttattgctattcgttaagtattttagacttatatatatccaggtggtgtacaatgcaaatgaattggctaaattggtagaagacaagaagaaaatgcagaattggttagattactaccagttgaagtatacaagaaacaaggaacaaaggccacgggtaaaggtaaatactttgacaaacccgaaaagccgacacacatattgagaccgaaacttttttttgattcgcagatgggatttctcgggctatggggcaaaaaagtagatgcaatggatcattatacagcagagatcgagaaacttagcgagcaagtaagtatctttcttgtgtaggggtgcacaatgccccaaacccctaaacccttaacctttcttgtgtgaatttgattttcatagataatggaagaaaggaagaggataaagaaagatgacacaagtgtaatgccagcagcttttgtgtcttttaaaacgcgttggggcgctgcggtctgcgcgcagacacaacaaacgaagaatccaactgaatggttaaccgaatgggctccttgagcaagagaaaagtact

SEQ ID NO: 14614 - DNA, 625 bp, Arabidopsis thaliana landsberg
gggctcatgaacctcctcaacaccggtcctgaccacctccgtcctggtattcaaacttcccatgcatgttatgttttttgtttgttatggttaattgcgaagttctgcacggaatctttcatacatctttttaggaaacgtaggatcctgtttatttttctaacatgcatctaataatttggtaattttgtttgtttttgcagcgatatttagatcattgttgtacgaagcatgcgggaggattgtgaatccgatatacggatccgtggggttattgtggtcaggaaactggcatctttgtcaagcggccgttgaggcagtaatgagaggctcacccgtgactccgatcgcatgcgacgcagcggttactggtcaagcacctccttttaacaacaagctttgcgacataagacacgtgtcaagcagggacgagaacgttaagagacggagccgtggtgcatgcaaggaagagagaaacgtgaggtctttgagtcatgagtcgtcactgagtcacgagtcaccggtgtcttctgaggagacgacgacggagaaaccaaagacttggatcgggcttgagctgactttggggttggagcctttagcacgtggaaatcacgtggtggta

SEQ ID NO: 14615 - DNA, 742 bp, Arabidopsis thaliana landsberg
gtgcaaggaagtatttcaccaaaaagttccccaaaaatgacaggctagatatccgttggggaattggtttagccccaaagacaaaatgagttggaacaaacttcagacaatgcacgtaaactagctcagcctgaggcagtcttcgacattgtcaaagacattgatgagctctcagagcaacgaggtcctcttgctagcgtctcttacaatcttacctcttcttttgccagtttagtttgatgtcccatgtttatattaacatgtctcccttagtagttcttttgtctgttattttttcctttccttatattccctaatttgtttattgattgaagttgtatgtattatttttaagcaaaaggttcatgatgtctttgcattattgttagccattaacaatatcaacaagagattcttgttcatatagaatcacattactattaattttgtcgatatatttcacattattagagacggacttacacattattagtatatgatacattttcttcttattagtatatgatacatattcacattattagtatatgacacatgagttccagagacttaggatcttccaagccatggctaaaacagagaactaacctttttgtttctgtttgcggaaaattccaggctctcattattctttatgtatacaaaccttcatttaccctgttgaagccttctcattcttcatgatcatatggaaagatttaactttatcttctccaacgat

SEQ ID NO: 14616 - DNA, 480 bp, Arabidopsis thaliana landsberg
tttggaaaagtttagacggacggaggcagacacgatatcaaaatcgtgataaacgaggttgattaaaaattagtgacctttacattcacagctatcacgtgttaacgtccgcactaatggtcgagcagacgataaacacctggggtgttacactcagctcttattcatgttgttgtgcacgcgacacctctatgttgcgccacacgtcatggtagttgttgatgaactagcgtaggtcaccctctggataggtcgacagaaggagatgatttgccgtccgagtgaggatttgtcggtaaccctctatgtcgagcgtgcaaggtatatcgttggtgatccgagctagtactccaccgatctggctcagactctgcatggttcgagcaaactcggactatagattgcgggggtgaggtagatggtcacacgggagcttggcgttgcgctcagccatctcacgctcgcgctcataagcagcgc

SEQ ID NO: 14617 - DNA, 812 bp, Arabidopsis thaliana landsberg
tgaaatcaagcatactggacgaggaagggctcgcataattgggggcgtagtcatatccaggacaactcgagttccagaagtaagctgttccttgtccaccttgctacgacaacccaccacataacgagggccactacttgccttaacaatcactaaaaagaagaagaaaaaattccacctttagatgatagaaaacacaaagcgtagtattcaatcaaaaacataaggtagcaagatagaaaattacatcgctcgttatcaagaggacgtagtacttctacaataatctggccaacgctttgaagagacttcaaatcatcctcagttttgttgaattccttcttagctgctcttaaattctccctagctgcatataaccacaagacccagtttataagaactataacaagtgaaattaagcttgagatcgacttcaaaattgactaatcaagtgaaacaaacggtggaaccaattcaattcgaaactccaaaacccctaaaatacggtcactaattgaagtaaagtctcgagagtctaatgggaacgaagagtaggaacaaaccctagattcgattttgacccacaaactaaacccagaaaacgaaagaggagaatgaggaagattttgaaatcgaacctgttcggacacgggattcgagctccttgtgatgaaggagctttttccggtaatcagtcaccgccgcggtactgcgtttagcaggggcgttttcggcgctcatcttttacagatcttagaaatttggccactgatgcctattatcaaccttgttttttttttgtaaagtaattt

SEQ ID NO: 14618 - DNA, 695 bp, Arabidopsis thaliana landsberg
aatctaaaggcaagtctctcgaggaaatgtccggtgagaacgaacaaaatgatgaaagcagcagcagcagcaacaacaacagtaacaacgcagtgtcaactgcatagagaattctaaaagattttgttttttactcttgtatctttgttttctatgtatttcttcaggtttcttctcactagcaacttaagttctctctatgtttacttattattgatcgttaaatgcaataggatctgattctttttacatatagaaccgcttttcttctgttcattgtgacaaacgacaatgggttaatggaaaggtattatgatgtaactgtgtttttctttgtcatcactgaactaaagaagaattgtttgaatcatacatccatttgtaacaacacaaatccaaaactgcattgtttctgcttcttcagcgaaattttgttcaatcaaaagcaaaaaatgcgttttctttttctagaaatggttctatgagcagtgacattatgaaagatgctgcaggtaggttttgaaggcaaaaatgaaagcaagagtagaagaaaatgaaggtaaggcaggacaaagatacaagaaatcttcttatactctatacacatctttgagtaaatgatggacaatacatgaagtactactagacacaatacaattcactggcggtgaaaatcaatcaaattacaccaatat

SEQ ID NO: 14619 - DNA, 1648 bp, Arabidopsis thaliana landsberg
gattttatgagtaaagttataacaacttactttgtttgtttttttggagttgtgtttattaatttgactttatctatcaactctgacaaagtagggtgtatgcatcaaacatatttttactcattgacttgattaatcaaattcatgccttgcatagatttacacatatgttcaaaaaaggaaacaaaacacaacaaaattatgtctacatttcctaaaacttaaagactacaattcatctttagcagacccatcctttggtttcaactcttcgttgataaaaacagccatgtccttcgcgctcaatttcgttgatagctttagctgcaaatgaaaaacgggtaagatacactacggacaaagcttataagcaaaaacagaagtaatgatgtctaaaagggattgagctagtgagctctttcaaaatggttattaccggtttctccttttcgccagatttgtagagcaagatcatcggatattcatcatcagcctgtcattaacaatcaataagattatcgtggttcgggaagtgctagtcttgttgcagtaagatttgactcacctgtagtttaatatgctcatttgcagatgcatcaattcttccaaaaacaagattcccaaagcctttgaaatgcttagccaatttctcgacttgtttgcttaatgcctcgcagttcacgcaccacggtgtatgtatctgttttcggttttaatgtcggtttcagttagtaaaaaacagtttggtttagcagaaaggttatttgggataacaaacctcaacaagaacattcttgcggctgtttaataccaactcatcaaaagtctttcctaccacagtctttatgcttgcgttttcctgcagatgcaccgagtcatttgagcttagctcgtaaatgttccaagtctcttcagactagacaatatcacaaaaagaacatcaaaagaggattcaatatctcatacttacattatcaggaactggctctgacctatagtaacgtgaaacagttttttgagcaagtcctgaacaaaactcctaaatttctaatcgaaaagagaatcacatgaatcagataccatacgaatatttgaaaaggaaagaagaaaaaaggttaaagcaaattcatacttctatactgtttggtgatggatctgactcgagcaaatacttggagttcaggttgttatcaaacgcagcaacctgttgataaaaactacagattagtcccacataggcttgtagctttaccatcagttgatcacaaagtgtcaattacacataatgaaacaagtatcagaaacttacaacagttttattcccagcttctattccgaataaggtcaagaatggcattgcaaggttctcatttgttatatcgacatatataaacataagctgcaagaaaaggatatacagttaagatagagtctaaagtctaaacacaatatttttgctgggctttaagattcagcataagagatttaccttcgatttaaattttcttgcaatatcttcaagaggctgagcaagtttctgaaaaacatcagccttggagaagaacataacctgacaaaaggaattaaaaaacaggactatgattaaaaacataattcaaaggcaaaaatgattcaaactgaaaataca

SEQ ID NO: 14620 - DNA, 420 bp, Arabidopsis thaliana landsberg
  unsure (1)..(420): unsure at all n locations
cctccaccgctattcgactctacgtcggctagatccgtcttggttggcctgccgatcacaagacaactcttggatctcaccttaacaaacccagtcatctgctaggagggtgaatgtctttagatctcttctttgagctgtnnnnnnnnnnnnnnnnnnnnnnnnngcggtctcgagatgccccgggaggcttgctgacccgaagcaccctaggctctccttcaaggggcgagatctaggttcttgcaaggaggaagacgaccctgcaccattgcgaacgtcctccctagagcacggaccgtccggctcgacacaggcaagaagtgacttctgtcatgaggtcgtgggtcgtccggtccaagccgcggaccattcgcgccgccgtagggagcgctaccaggcgacctagtgacccgtcat

SEQ ID NO: 14621 - DNA, 708 bp, Arabidopsis thaliana landsberg
tgttttcatgtctttaccagaggaacccacagacctatcaccagaggaagctaaaatatatttcagaagatttcacacggcatttgaggaagcatatatgaaacaatcatcacgagttgtaccaaatgcgaaacttagggacgaactaaaggtttcaatagcaaagaaacttgtaccagaatacagagagttttacaggaagtacttaccaatgctcggccaggagagaaacattgagatcttggtgagattcaagccagataatttggagaattacatctctgatcttttccacggtacaccaattcatgcatcctcttctttttcttcatcttcttcctcttcatcctggaaatcacttgggtgtgtttcaggctgagagacttgatccatagttttggctaaatattccattctacatgatgtgaagtgaaaaaaatgtagatacgtgtgtttgcattgtgtgtgcaacagaaaatgagaacaaaaaaaaaaaaaaaagagattttctttacataatttatgacgagttcttcattatctaagaaaaaacaaacttgcgatacgctttaagaataaaacgagtagtctctaataaccgaaactgatataaatctgataaagaattcgattcagtgatatacattcaagaagccaatttcaaatcacaaaagaagaaaaaggcctaaaaaaatcacacacagcata

SEQ ID NO: 14622 - DNA, 523 bp, Arabidopsis thaliana landsberg
tgatgtataaatacaacggctccccaggttctggagctaccagtattggtagggacaccaggtgcttcttcaactcttggaaggcttgctccgcctctttggtccaagagaatgggccggacttccgcaacagcttgaagaagggtagcaccctctcagccagccttgaaatgaagcgactaagggcggccaatgaccccgtaagcttctggacgtccttgatacgggccggaggcctcatcgtctcaatctctttgatcttctccgggtttgcttcaatgccctggtacaaaaccaggaaccccagcaactttcctgcggagacaccaaagacacacttgtctgggtttagcttcgtgcgtgttgcccgcagcttgtcaaagactagggttaagtcttccactaaggttgaccctctcttagtcttgaccatgatgtcatcgacatatacctctactctgtccctaatcaggtcccctaaagtttactcatcacccgcacaaatgtcggcagggcgtttttc

SEQ ID NO: 14623 - DNA, 677 bp, Arabidopsis thaliana landsberg
tattaaatctaatctcttaaccatttttattaaacccaaaccgatatataattccgtttaattacaaaatctaaaccctaattcttttttgtaaatctaaaccaccatttaaactcgtttaatcgtaaaaaatctaaatcttaatcgtactttctaaacccaaaccgacatttaacctcgtgtaattataaaatttaaatttttttataaacccaaaccgatatttaatcttgtttaatcataatatctaaaccctaatcctttctaataaacccaaaccgatacataattttgttttaataaaaaaatagatttttcaattaaattaaaatattattttaattattaattggtaaattttgattagctaaaattaagaaggtgaatataaaggttcacctttaggggggtgaacccaagttttttttattgataaactactacgtaactgtcaaaaatttactaaaacaactgcataatctcgtatcaagaatttctgtataataaaaggaacggatatagtagtggtagtaataatggctaatggataaatggctaatgaatgttattaaagagtagggttcgaaaaaaagagacgagaagaaaaatgtaacatgggggaaggtttacatgggaaattggcacgtgaatttgtttaaaacaatatcaaccagacc

SEQ ID NO: 14624 - DNA, 313 bp, Arabidopsis thaliana landsberg
cgggaaatcgggtgcatcgatctcgctcgcccaattgaaccctcacccgccgccatgaaccgcagacttggccccgtgcaatcttggagctctgggatatataagtgcagggcgccgcaaacaccagctcgagctgggaggcaaacgaagagggagaaacccgccgtcagattagtgcacaccgaatcaacaacttgaccgtcgtggggcatagaggcaatcccgagtgactaccgaagctaaccatggccttccagggcggagcaaaccaccaggccatcgcgaattcttcgccggagtcatctcgccgacg

SEQ ID NO: 14625 - DNA, 638 bp, Arabidopsis thaliana landsberg
aactattgaaactgggctgagcgagcggggcagagaaagatatctgtttgaaaagataaaagagcaggaaagtggtgggaatggtggtgaagcgtcacaagcagtgatgtactcaaagatcagagaaatgctgcatggatacaatgcatcgtcgccaagggtagatccaagatcaaaccagcgaaatcctttcagatccaatccttagatgtttgtattgtctctctttgtttgtattaaaaaaaaaatccgaatcaattaaggttggatttgtgtgtgaagtattgtggtctttgtattcaaattttgcacatgatcgtctatgttgggccataatgttatgcaagctttgccacagagtgttgccaaaatctcgatacttattcactcggatttagagaattgtggatttcgctaatggagggagatccatgttaccttaaatagtttatatttgagccaacatgagagccaaagaacatcgccaccgactttaaaaagaaaatattttgcccaaatggatattacagagtagttatttgcaataacgtcctcatgtttgggttataataacgatttgatttcttacggggtataaagcaaaaggaatcaaaacgtttggggaaataatgtaatat

SEQ ID NO: 14626 - DNA, 367 bp, Arabidopsis thaliana landsberg
tttcgtttacttcagatgatattaagctacgcgccgccatgaccgatgctactctcgtcgccggtcctactttgaccggtctcgctctcgctgtagagaagcctggatccttcatcgtccagtacaacgtccctaaaaaggtcaaaacaactcttttgatttgagtcaaagcaaacaaatcttagaaatttttcaattcccatggaaatgagattgattgcttacgattaaacctaggattttagtcaaagcaaacaaacctagaaattttgcagctaatgcttgaattgaagtaggatttacgattctggagcttacggtttttaaattctccacaagttttaagagatactggaatctatgtact

SEQ ID NO: 14627 - DNA, 1021 bp, Arabidopsis thaliana landsberg
tgttctgtttttttaattcagattatatatattgctggtgtagggtcacgataacaaaatgtactacataattagcagtattgtggaaaaataaaaataacacttttcaatattttgagtagtgtgcgttccttaacttgaaattgaatgatcaaggtcttggtttttaaagcttaattctaagaatttattgttataagaaaaagaattagagatcaactattattactacttactaagtttttccatttcactatacaaatttaaagatcaactattttatgattacatgaaatattaataaaataaaagttagtaatagtaataatcttatgccatgaaatattttgaaaatgaattgtgaagataaaataaacaaacaagaaataataatacagaagtgggttttgttctgaatgcacaacgagtcaaagacccttgtttaaaaaaaaaagtgcaatcaaatggaactagtagcttcactttgagaccatcttctcaacgtgcaagccaccaagttccttcctgcaagtaaccctaactttgtcttcaagatagctaaccctagcctaccaccacctgcaactcccaaaccaccatcaccatcaatcactggcggagcctcctcctcaacaaccgtctcaagaactctctgatcaccaccatccaccaaacccacaccattggtttcatcatcatccatactcaccaccaatgtcatcctccgttcacgcaaccattccctaacttcacctgtaaccaaactacatttcttcaccttcagtttcaccaacttaggacagcctaaagccaacgcctggacccctacatctgaaatcaaacatcccttgatacagaatttcctcaacgtcacacatttctccgcgatacaaccaatctccgcatccccaatcgtaccactcccacaaagagctaaccgttcaagcttcttacagtttgaagcaatagcagacaagctcatatacgtcgcatcaacaccgataagtacaagctcttgcaa

SEQ ID NO: 14628 - DNA, 698 bp, Arabidopsis thaliana landsberg
tggagatgaatggtgtgtgggcgttcgaaatagatattgaatacactggtggtgcgggacttgaagttgaaactcgggttgatgctcgagaggaagatttgcagaaaggcatagctgagggaaagttgcagccaaattctgctggggatgttccaccagatctccttgaaggtcttgcagattttgaaaagcaattaaatgttcccggaggaactgttgatgcacaagatgtgaaaagtggtggaactgataaagctggttagtacggtatttgctgattggttttatgtaatcatctaatccattttcttgtggttttgcataatgcttagaagcattagactaaggatgagaaattatatttattttcatctgtgcagatgaatcgaagggtccaaaaggtacaaaaacaggttcgagcaatggatccaagtggaagtctatgctgaagaacatcgttgaacaagtttcccaggttgatcttcgtttttctgttatgtttagaagacagtttcgttgcttgttgcactcttagttccctcactgcccaagcttcacaagctcggattgtggcatgattaataggatctgcaagcagaattagaaacactttttcttagctcttgtagtatcttagactatctcgttttgtaaaagtgcaggtcccaaatgaaggcaaatcaagcggggctgggggg

SEQ ID NO: 14629 - DNA, 258 bp, Arabidopsis thaliana landsberg
cgtggcggggttgagggggtagtccgcgccccaccgcacggcggcgcgcgcgtcgcgcacgcgcgccttcatccgcccgccgtgctccagcacgctccacgacagcatcgtcgtcgtgaaggccatcgggaagccgaacttggcgttgtcgccgccgtcgtagtacccgccggtcaggtcgacctgccgggcgcgcacgtcaacagacagattgagagactaagaaggtccaggtccagtccaagccccaggtcaggt

SEQ ID NO: 14630 - DNA, 460 bp, Arabidopsis thaliana landsberg
tatttcactgtgctacaaggaggcatggagggggaaagagcgcataatggctactcttcgcgggtctactcttcgtgggtcatttgaagaagaatatcgccttcttccccaatactgtgatgaaatcagaaggtctaatcctgggagtgtcgctgtggttcatgtgaatcccattgatgggtgctttcaacacttgtttatttctttccaagcatcaatctctggttttttaaatgcttgccggcctcttattgcactggacagtacagttttaaagagcaaatatccagggacgttgctgcttgccactggatttgatggagatggagctgtgtttcctttggcattcgctattgttaacgaagagaacgatgacaactggcatcggtttctctccgagcttcgtaagattctagatgagaatatgccaaagcttaccatattggccagcggagagaga

SEQ ID NO: 14631 - DNA, 505 bp, Arabidopsis thaliana landsberg
tacaaacatctgagtgcgaagatcaaagaagaagagaatgccagccagctccgccgctaaccaaatctctttctcccaccgggctcccgtcttcctacgaatgcagcatctatgtcgttcttcatcaccattacattcatgaatcatcaaaagtcgcaacttttgttccgatttcatactcgatgagatcttcatctatgctgagaaatataattaaaaaagctgatgtgattgccacaaaaacattgttatgcacattctcttctccttcaacatactaacgaatcatctctctgctataatattatggctttttttattattattatcttctacttaaacgttgtgtgtgattcttcttatcatgaaacaatatcacaatgcacggttctgcaaaccaaccaactgcattgtttttaagaaagctcgccgatgaatttttgatatcgccaccaattttctaacagtttctagatatagtagctcgatatgagctgaacgaaaa

SEQ ID NO: 14632 - DNA, 565 bp, Arabidopsis thaliana landsberg
tgttagaaagggatgaccgaaaaaataatggtacgtaataataaattcattaccgcaaaagttctaaaccaaatctcttgattgtcgcgaggcatatcattgtacgtcggatacggatgtttgagcatcccatgcaacatccataaaattgatttggatatgccatttttagaaaaaccaaacctacatatagagataaataatatgatttctactttaaaatatttctatattaaaaacagaaaacaaaatttacttaccatgtgctcccttcaagcctttttggatggagtcgtcggagaagtgtccgccccggttgttgtactagctcctcaactgtcatcgatggaagagcaatggactgctttgactcgggaacgaacgatggtgatggtgttgtctagtatgtctgattattggatcgagtcgtagacctacgaaaatcttggcacgaagtcctaacaaataaaataatattattagtacatagtttaatataattaacattcgtaatgtcaaaacaataatagatatcatagtaaaaataaatatcgaagtaaaagat

SEQ ID NO: 14633 - DNA, 535 bp, Arabidopsis thaliana landsberg
  unsure (1)..(535): unsure at all n locations
ataatggtacgtaataagaaattcattaccacaaaattcctaaaccaaagctcttgatcgtcgccaggcatatcattgtacgccggataaggatatttgagcatcccatgcaacatccataaaatcgatttggatatgctatttttagaataacctaacctacatatagagagaaataatatgatttttactttaaaatctttatatattataaaaagaaagcaaaatttacttaccatgttctctcttattcaagcctttttgggtggagtcgtcgaagaagtgtctgccccgtttgttatactagctcctcaactatcatcgttggacgagccgtggactgcagcgactcgggaatggacgatggtgatagtgttgtcgagtgcgcctgattattggatcgaccatcaaatgtacaaaaattttggtaaaaaaccctaacanataaaaaataatattagtacacagtttaatnaatataaattcgtatgttaaaaattataggtatatagtaaataatatcagtaaaattatt

SEQ ID NO: 14634 - DNA, 630 bp, Arabidopsis thaliana landsberg
  unsure (1)..(630): unsure at all n locations
gggacctgtggacccatctcttctcctgtggagttctctgccgtgtcaacggacgtgaagaaggtccatatggcggtgcgggccggcggtgcaccctctagttgaggtcggggcgcgcacagcagtacatccctgtctcccttgtgtcttcgaacaaggggtggcagaaccggtggttttatctccggaatgacgacggggtgctaccgcccttttctcaacgannnnnnnnnnnnnnnnnnnnnnnnnnnnnnnnnngggccacacgcgagaactaggagaagctccagccccttctccgtgccctgcagaagctccaagccgaacgcttaccgtcgtgggggtcgtcgccgctatccactgccggagggtgctccctttggtagagcgacggttgcagctttcggaaatgaagccgggggtcaatttggagggttcacggatgtcaccgacccccctctccaccgacgacctcctcagacggatagcgggcacgatggtgaggctggacgctggcgtccttaaccagcccccgatgcgtcccgaccacgggtatgtgtccctggtaagtgtctgacccttcctctgttttgtgccttgtttctcacccccttcgctcttacccttggg

SEQ ID NO: 14635 - DNA, 585 bp, Arabidopsis thaliana landsberg
  unsure (1)..(585): unsure at all n locations
taaatggggcataggaaacttaaacaatcaaaattttttgaaacaaactttttttctagaaaatcaaacaaaaataaacagaaggagtattaattttgctcgctctcgaattagttttcatgatatccttaattttccaaacataacgaagcgccaaaatatgatagatgttgtcaatcttacagacttacatggagcaatgaccatatatggcttgcgattaataatataaccaaataagtcaagaaaagtttaaatcctttaccaaaaacaaaagtcagtaaaatacttaatatttgcgtgtccctattgattattgtgtggagcctatatattattatgtttttgaaaattaaattagacagactttgacagataaaacgagtaaataaaaataatttgaatacgactntggatagaagtaataaaaatagtttcgtagtcattctttaaaatagtttctttttatatattgacgagtaataaatatagttcgtagtcattctgattaaaaattatttctaagttgggtcaatattctttataaggttttcttttttattgacgagtaataaaaataaattt

SEQ ID NO: 14636 - DNA, 858 bp, Arabidopsis thaliana landsberg
cttattcaaaatattcagtcagattttatttcttttagttcaaggcgatcaaaatttaaataaaaaatattcggattttttgtcaagcaaatttctggtcgatcaaacagatcatgattctataattatataaaatttcgagctttttttcctcatcatcacaacacaacgatgttggttttataggttacgttgatcaaaaggtcagaagaaatctttatattattaagtagggagtttgtgtttttttttgcactttacgttgagaattaattaatgaatttgttgcttgggagttaatgtaaaccgaaccaaaatttgttttataatgatttagccggttttactttacataaaaaaaccttaagataaatgcagtgttgcacaaggccgactcatataaactgtaggcccatgaaaacgaagcccatatatataaatgggacgatattcaaatttttcttcgatttaggactttggaaaccctaggcgtcctagtcgattgcgagatccaaccttatctctctggtaagtttcttgctcctgatctctctcgctatttcttcatcggaaaatacacgatttcggctgtgttccaatctcttttcctaggtttggttaggttaggtttttagaagaagattcgtcttgaacgatgaagaagcctacgaacaagcaggctaaggcttaacattggtcttttgggacatcattaactctccggttccagatggttgtgaccctcgtgtggtccgtccgagtattaaacggcttttggagaatgaaggctactgtggtcctctcaccgtcactgctgttggcaaactagcgaacgtccctactgacaccctgagagca

SEQ ID NO: 14637 - DNA, 628 bp, Arabidopsis thaliana landsberg
tccccggtaggtaggccaagagcgttaggatcagacatatcatgaattccgtctgcacgtcaaatatggacaatttacatatttatgagctcttgattcagacaaaaccaagattcagagataaagaatacttacagtgcaacagccatgcctcagacaaacccctagaggagggatgagtatggcgatcattatttcacagcaaatctcgcacccattcgccatttctcaatgttttgatccttttatttagttactttgtttgatccaaaggacttcttatataatgggaagagagacagaaagagaaaacatagcctcaaagcgacagcgtttgaaaccaattgaaaaagaaagaacacaaattaagaaaagaagaataactattcaaatgtacaaatatttcttcttctttttttttacaaagatgtacaaatatatattacttaagtattaattgttactagtacaaagagtgaagctatttttaagctctttgtgttggattgtgcagaagatattctctcatattttatgtcatgccaacaggatctaaggagtgatgatggacatgtttttgttggaggcccgaccacacaacaaagcattctttggcaaagggtattca

SEQ ID NO: 14638 - DNA, 554 bp, Arabidopsis thaliana landsberg
taatcaaccacccaaaccattgtttgcatcgtaaccaattcagcatttaccaccaaattattttaccatattatattttaagggtgatttgtattatcagatactttcgaaaacatgttgagcaaaaaagacagtttcggcgacaggcacacttctgatcaattataagggggaaaaagacttaattgaccctattaattaaatcaagtaaaatcggttatttagggtaagagtttggggaaaccggtttattttgtttttgcaaaccggggaaagcatgaaacgaataactatgtcatcgaagtttgaatgacgatgaacaaaagaaagagaagctctgaagtttgaagcaactaacaaagatatcataacgatggtaagaaaaaatggattggtaacaatagtagaaaatattcgctgatatattattgactgtctaagataaaaaatttatatattgcagggaactgaggatggcttctgttatgtaatatgcgtggattggaattgccaagaggatgagaagtggtatgttgaggttaataaggtaatga

SEQ ID NO: 14639 - DNA, 544 bp, Arabidopsis thaliana landsberg
ctttcagttcagtgacgagcatctcgtctccaatctcacccctatagcactcaatcggtctccccttcgttgtcaccaaacaacagaagtcatgtgcaacatctctgaccccttaagaggctagcaaaaggctctagatcttatggagtgccttatagagactctatctctattcttagtggatctgagggctcaagttgatcagtggatcacttgagagggtcgagagagacctcatcctttaggagttagtacatctcaacggggacgtaggttcttcagaattgaatctcggtaaacaaatcatgtgtctcttgtgttctttactttttatcagggacgaaaccagacaataaagttattggggtcagtttcactaatcgtcatctaaatacactagctaacactatatttgtatagtattttcttaattttatagggtcagcttaccccaacaaaactccctagctctgcccttgttttttattatgatttgttcttgtctttctccctctctaagttcttctggttggactttgatata

SEQ ID NO: 14640 - DNA, 571 bp, Arabidopsis thaliana landsberg
  unsure (1)..(571): unsure at all n locations
tatgtggatagtaatattatcgcaaatacaaatttgtagttagtaaatgagatttggaattttgtatgtaaaatttgaataaaattagtggagtcaatacggagaaatttggggaaaatgttgttagcgtaaatcttgctttaaattcttgaattgagtttgattttggaaagtttgattaatttcaaatattttacttgaaaatattttagaaataaatatcttctaagttgttttagattgttgtgtacgattatgtgtagctaattttaagaaattgatttgaagtttgttgtttggattaaatttgaatgataatgtgattgatattttaaatcaagaattgaaagtaaaatcaaataatttttaaaagaaacatttaatgctaataatattctttgtaaatatataaaaaaatggaaaaatattacaaaaatagatatatagatatgtgaattgctgtaaatgttattaaaaaattatgttcggacctaatatatttatatagttaagacanaactgatagaatacaatgtgttgcattgtggtaacctaaagaatgtgctgcacg

SEQ ID NO: 14641 - DNA, 502 bp, Arabidopsis thaliana landsberg
gcacaacctggtcccatgttggagtgttgcacctcctcattgtgctacacctcctcgttgtgctgcacctcctcattatgttggacctcctcattgtgctgctcttcctgtacatccaacttaagatttagataaaggcaaatatgtaaataaatttattagtaagaaatatgttaccacatctccatgtgcagcgctcaacagctcacgatgtctactactactcgaagaactaccctgaaacaagcccagacccgttaacaaccccttcactcacttcttcaactttggcggcatcctgcatcaaaatagaataatttcattagtgcaatgtttaaataataacaaatgaataaaaaatataaatgacataatacttcaaaaataaaaacaaatgaagaaacatattactttacttgttatatatcgtcaaaatcaggatctatctgtcctctacttgatgggcaaggatatatgtgtcgtgcgcttgaagcactttatc

SEQ ID NO: 14642 - DNA, 628 bp, Arabidopsis thaliana landsberg
cccgcaaccaagttttccctgcagccccaccaaatcgacgcgccgtagtgctcgacaaaatgtgcagcaagccgcgtgctgccggctcgctgttccgtgaagcacagtggacagcacgccgtcgacgcccgccatgtgctcgctgtcttgcgcagcctatccgcgacgccgtcgaaaaccgtggtgagaaacccccgctgttctcgatgtttattttccgatgtgtgtgatgttcgatgaactgccgccaacaaatttgtgtgttttcgcagctagtggtcgacgtcacaccttgcacatcgctcgtcggcaaagagcccaaactaatggcatgcatgcgcacgacgaatcggccaggttgttcgccttgtatggttgcgatttattttacttacgtattcggtcgatgatgtgcctgcgtgtttatatgcgtgtgaaaataaattgtatgaatgaacacgtatatagaagaaaatgaaatagaacaagaactcggatgtttttatatgtcgataggaatttatgcgatacgttgtttgatgtgtgcgatttgtagtttgtctatgtacgtttggttgatgtggtgtatagctgctgttgattagatgtgcgtataaaatgtttgttt

SEQ ID NO: 14643 - DNA, 422 bp, Arabidopsis thaliana landsberg
taaaatataattcaatggacctgaacgggtcgtgactagacgcatggctgtccacatggctcggtatttcgtcgaacgggcaaggcacgacgtcgaccactagctgcgaaaacacataatttgttggcggcagttcatcgaacatcacacacattggaaaataaacatcgagaacagcgggggtttctcaccacggttttcgacggcgtcgcggatgggctgcgcaaaacagcgagcacacggcgggcgtcgacggcgcgctgtccatggggctacacaaaacagcgagccggcagcgcgcgaagttggggctgcgtagatcggcggtggagctcgctgctggaattttatgggcgccctagacagtgagctgggtggcattggcctctcgccatgggtggagctcggatgggggaaaatgc

SEQ ID NO: 14644 - DNA, 732 bp, Arabidopsis thaliana landsberg
  unsure (1)..(732): unsure at all n locations
taagccagcattgttagggcttcagatgaagaagagatcatcgatttggttggatataggataatatttgttaggtacacaagatttatcagctcgttgtttatagttggagctgagaatattgtaaagattgtgtgcgtgtattagcacaacttgattcttattgatggatcatggatcttatatatatatacatattgaaaaggttcttggggcattgatctttgagatatatagtctttaatttctttacacttcttcaacaaaagcttcatagatcaacaagcctgttttccattttccggtccacacttcatacaaaccaaattggagcttggtgtcttggtttattgctaccttgggacttacaaagatctcaaaccgaccatcagtctcatctggtatgttaaccggtccggttccgcctttgagtttgtcaaagttattgttaaccgatttgatcctcttccaaattgtcctccctttctttccaatttttgctgacatgaaaactggagcttggtcccatccggttgcatcagctgtgaacgagattttaaaaccaattcggtatgttttgcctggttctatcttgtcgtacgaaccggttacttctaaccaactcactttctttagttcagcaggcgtcctgaaaacaccaaaagactccagtttattattttacttttaacatggaaaaccaaaanaccgtttattcagaatcaaactgat

SEQ ID NO: 14645 - DNA, 796 bp, Arabidopsis thaliana landsberg
catcaagaattatcattgtgggcagggttggaggatttccaaagcgacaaggaacaattcacaatcttctctttatgtttaatatcttgtaatgcaaatgtaaaagcggacaattcggcacgaaaaatttatactcaactgcttcgtattacttatgtaaacaatattccttaggattgactcctctaagctctaaataaaatctgatgtaaaaactctaaaattaaggacaacaaaccaacatgtatgagctagtaaaaaaacacatagttttattgaaaaaaggaagaacgggataaaacaaaacataaaaaacatcatatcgtctgagagaagtctcacgattactattagtttttactctcaaatgaccacgaaaataaattagatacactgaaaaaacttaaacggactataactttgatccttaatcccactgaattgttaaagtcacctcaacttcgttagattcgtccattaaaaccagggtttgcctccgaccaattgaacacgtttgggtccattacttgcatgtttgatttgtcgaattcgcgacggttctgcaatacttcacatgttgtcatccctagattttggactttttcattcccttttcgttcgaaattaatacagcttttagcctttcaatttctacgtgcaaatgttcggtcaaggctgcaacaatagagaaaatagaaacaaatattctacagttaaaaaggaagacgttttttgaacaggtgttgtggttaagattcaagtaaaaagtttcattcataatgcgttattttgtttt

SEQ ID NO: 14646 - DNA, 478 bp, Arabidopsis thaliana landsberg
ttcaatgtgttgctggcccgtcgatgagtgttctatggaatggagaaaaaacagaaggttttaagccgtcccaggggcttcgtcagggcgatcccttatcaccatatctgtttgttctttgtctagagcggctttgtcatatgatagatagggctgtagctgtcaaagagtggaagttgattggactgtctcaaggagggccaaaaatctcgcatatttgctttgcggatgatctgatcttgtttgcacaagcgtcggtctctcaaatccgagttatacgcagaattttggagaccttttgtatagcttgtggacaaaaagtgagcttagacaaatccaagatcttcttctccaaaaatgtctcaagagatttggagaaattgattagtaaagagagcggtatcaaatcaacaagagagttggggaagtatctaggaatgcctatttttcaacggcgggtccaccaagatacgtttgg

SEQ ID NO: 14647 - DNA, 5421 bp, Arabidopsis thaliana landsberg
attgtacaggaacttagatggaataagtgcaagagctccaacagtgcagcagataagaagcagacatcatgggactagagaggtatatagggttaatgataattcaatagtattttttaatcaataatcggatgattatacattctaacgtacatataaaactaataattttcaggtgatagtggacaatgggataatcagagtcagtttctcgaatcctcaaggacttataactgggatcaaatacaaaggaattgataatgttcttcatccacatctccgagatagagggtgagtaattttcagtaaactaatattgtagtaatcaattattatttctcaaaaagcttatgtaatgtaagtacataaaattgtcctgatttattactttgattttatgtaggtactgggacataacatggcaaggaacaaacattcgccaaggcggcttagatcggtaattaaactagcttagttacttaatacttcgtctgatttgtcagtttaaattatttaataaaacatacacacgttcacatttatagagcaagtatctaacttatcttagggtttataattttaatgaatcttttctaatttataaactcatatttatttttcggttcagaatcgaaggaacaaattttagaatcatcactcaaacccaagaacaagtggagatatcgttctctagaacatgggaggatggtcatattccattaaacgtagacaagaggtatatcatacgtagaaatacttcatgaatctacatgtacggaatcttcgagagacttcccgaatggccagaactcgacatgggtttaattcgaatcgctttcaaactcaaccctgagaggtatcttatacgattccaatgttttgttaattatttgtttttataaaaaaaaaaaaaagagtttatctaaactatcacaaaatatgtttgtagatttcattacatggcggtggcggataatcgacaaagagaaatgccaacggaagatgaccgtgacatcaaacgtggtcatgccaaggctcttggttataaagaggctgtacaattgactcatcctcataactccatgttcaaaaaccaggtacctagtcttttgcatacggttttggatgcaatatttaattgttcttgcatccgaagtctcgaattttgatcgttaatttgaatgatatatattaggtggatgataagtaccagtacacatgtgagatcaaagacaacaaagtgcacggttggatctcaaccaagtcccgtgtcggcttttggatcatctcaccaagcggtgaatatcgctccggtggaccgatcaaacaagagctcacgtctcacgtcggacccacggccatcacggtaaagacatcgtccaaagctattaagcatagattacatttttggtactatatatagtagtattaatgttttcgttacttaactgatttgcatatgcagacttttataagcggacattatgttggtgcggacatggaggctcattacagaactggtgaagcgtggaaaaaggtcttgggacctgtttttatttacttaaactctgattctaccagcaacaataagcctcaagatttgttatgggaagatgctaaacaacaggttatttttttaaatgtcttttactttattaatttaaagtaatttacaaagataagtcattaattttagttatatcaattttcagtccgaaaaagaagtcaaagcctggccgtacgattttgtagcatcctctgactatctttctcgtcgagaaagaggaagcgtcactggtcgtctactagtcaacgacaggtatatatttattttactcgtagttatttaatcaaaagttaattttgaccttttattacaacatcggcaaatatttttcagattcttgacgccgggaaaatctgcatatgtcggtttagcaccgccgggagaagctggttcgtggcagacaaatactaaggtttattattattacacatttacactttgatccatcttcttcaatgtaactgaattatcaataacatgtatcgatcgttgatttttttctttttttgcgtccagggatatcagttttggaccaagacgaacgaaaccggttacttcacgatagaaaacgttagaccgggaacttacaatctgtatggatgggttcctggttttatcggggactttcgataccaaaaccttgttaacgtagctgcaggttcagtgattagtctcggtagagtcgtgtacaagccacctaggaacggtccaacgttatgggagattggtgtaccggatcgaaccgctcgagaatactttataccggagccatacaaggatacaatgaatccgttatacctaaaccacaccgacaagtaagtcttcaaatcctcatagttccagttcacattgttccgaaaccggttttggttctgatgattccgatttggtttggtttgtttcacaggtttagacagtacggactgtggcaacgatacacagagttatatccaactcatgatctcgtctacacagttggagttagtaactatagccaagactggttctacgcccaagtcacaaggttagaagttacatgaaaacaaaaagtttgaaactttcagtgaattcttgaattaacattaacttcgattcgcttcttctgcaggaaaaccggtgatttaacgtacgtaccaacaatatggcagatcgtgtttcatcttccatacgtaaactcgcgaggcagctacacattgcaggtagctttagcctcggctgcatgggctaatctacaagttcggatcaataaccaaaactcgtggccgtttttctcaacgggtactatcggaaaagacaatgctatagcaagacatggaatccatggaatgtaccggctttataccatcgatgtgcctggaaggttgctaagaaccgggaccaacacgatttatcttcgacagcctaaagcacaaggaccatttgaaggtcttatgtatgattacattcgtctagaagagccttctagagcttagaatcatacagtatagttaggattttttttatttttttttaacactgttgttaggaaattgtgtagatcaaaaaggggttttgagatttactgacttttgatggatttatttataaaattgatttggattttgaatatgatttgtagcattataagatccataactgttttcaagtttatattttggttttacaacctaaacaagattttgaagcatgtacaagaaaataccaccagcaacagagacgttaagagattcaaagtcacctgccatgggaatgctcactagcacgcatactttccgtgcctgctcagacaaaccattcccttcactacctaaaatcaagcataaaggcttctctgctaaagattgagcaaactctaccgaaagtttggagacaggtttcagtttctgagtagtcgttgctggatgaccagctaatagcttcatctggaactcattttctagaagcttaagatggttccaattcccggaaactataggtagctgaaacgaagcacctcggcttgctcgaagagctttgtcgttgtacggatcgcaacaacccggaagtagaaatgcaccatcctgacaaaaacattagccagatagtgataatcatctcactagagatttctatcagatgccatttccaacgaattgagaagaaaagctgatcatatatacccaattaaaagccatagctgatctgactaatgtgccaaggttccctggatcctgcaacaacatcgaaagacaactattaccaatccaaattcccttccctgatcaagacatgatcactaaactaagcgtcaagattttgttctctaaaacaatccagcaaaagctcataaggataagaagttacggttaaacctgtatgctgtccagaacaagaactctgtgagcagaagggaaccatttgttgcagtctgttatgatgtctttatcatctttaagatcagtaaagctgctagggattctcatcaaggcaatggcttcaacagattcagtagattgcactccagagagtttcttcatcactaaagaacttactctaacaattcggatacttagactctctaatccttgtggaatcttagcttcctcatgaagaagtaggcactcaatttcagtggtcattccttgcttattcgtttgaaacatacatacttccctgtgaacaacgcctttaaagttatctccttgaaactcaatttcacatgaaatcaatcgaacacagtaaaaaaggaaactactttccacaattctctcagtagcaatgaaaaaaaataaagagtacaagatcactgatacatacctgatggggatagttccgacgacaagaacagagccatgagcgtggcgatacgaggaactttggcggagcttcaagcagtgtttgacaaaagggtttgtagtactggtgatagaatttacatgagacggcaacgaaactctattcgccggagatttatctgaaccgtagatagagagatcatctgaagggtttatctgaatctgggttctcggtaattgggctgacgaagctcgaagctttgacgcataggttttaatttcaaatgggagaagtgatgacacagtttgtgaagcgaatacacatccgcaatgcattgcacttctgcaactaatccgattgatttctcttctttctccggtgaagcctagagtctagagaggtctaagaattttatagaaaagcccaatctgttaaaaagataggcccaataataggcccaataagtggttttaacggtaaaccctcttcgtcatcctcaggttagctctctgtttcagtcttccgcttcttctccgtctatgaatctgcaaatttggttctttctgtgaatcgaactcgttctacaaatgcagattaacatagaacccccatgtgattgtttgatcactatttgcgactagatgtatttgccggagaaatcagttcttctggaattgatcagccgatgcagctctcttcgcgttttcaaacagatacagactcaattgattactcgtgatcttcttcgtgatgacttaatcatcaacaaagtcgcgacctttctgggcaaatccgcagattttgcatcttacagctctgtaattctccacagtatccgttctgtgttgagctctttctcatacaacacgcttttatcaagctatgcagtttgtgataaaccaagagtgacgatttttgctgacaaaacatttgtgagtaatgggttttcaccggacatgttcacgtgtactccagtttttaaggcttgtgggaagttttcagggatcagagaagggaaacagattcatggaattgctacgaagatgggtttttacgatgatatctatgtgcaaaactcg

SEQ ID NO: 14648 - DNA, 530 bp, Arabidopsis thaliana landsberg
catgccaaatcagatctatcatgtcacgtcagcattttttaacggttaactaacgtcaaagttagtcaatatagattttagcactttattatgagttgagataattaatttaaattttgttaatagttaaggttgaaataaacattctcttatggtataagtaggaaaaagcaccgttaaaatagttgaagttaaaatacaccctttaccttcataatacgtattttcccaaggtgaatctttggtataagatgaaaaatcactaatattcacttgttatttctatttacgttaccaaagtacggtaacgttatttaatattctttctgtaaaagaagtcagtgccatttaatattagccaacttattagtatattttaaccactaggttgaaaattcgaactaaattatgtacaccatatgatagactaactaagaaagaatgacttcaaataaaacgggaaaaatgtcaattaatatcctaactttcaaaaaatagctattttatacatcaactttgtatgcgaccgt

SEQ ID NO: 14649 - DNA, 704 bp, Arabidopsis thaliana landsberg
tataataaagaaataaagggaaaacgaaaaaaaaactgacccacatctctctcacacgctatatctctttctctcctcagccaaaaatatctcctagtaatttccaaactcccccactaccccacatgtgtttctatataaggcagttgtattactcaaaaaaacaaacagtctgtttctacaattttgaatagtaaactgtctatattgacaattaagtttacaaaagtgactactttgccaagagactctttatatatggcttaacttttttttttaacatgaattgaaggagaaaaaaaatcttggacatgagttcgtggtgagtggagatgctagctacttgcagaagcttaagtctttgaaggatataacaaattcgagagaagtccagatgctaagggacattttagttgcgtggaatggagtaatggaagagctccatatactatttaaggtactttcattttatgctttaaatttagtacttagaagatttgatctattttcttctatcttttttttaatttttatttttatcttctatttcttttttgtttaatgagttttaattttatgtatctatcaaaaccaacacaacatgtttatgtatgttcttgtatatatatataggataatcatgtctctaactctaaggaagatggtgaatcttcgattggtgaacacaaaagaaaagtgggaaa

SEQ ID NO: 14650 - DNA, 405 bp, Arabidopsis thaliana landsberg
gatgtggagcagaagaagagacgatcaatcacttgatctctgaatgatcatcagctagacaagcttgggccctatctaacatcccatcattccctactttgcttccttcaccttcacttgacaatacttaagattatgcgtcttggcgtggtaaggacgtgggtgcggatgaggagatcttaaagatttttccatggatcatgtggtatatttggaaggcgcgacagcaaacgatttgtgataatacgagtgttccacctcatgaaactttggatttagcaattcaagaggaaggagagtggagacgagcaaatcaacgagaagatcctaaatccgagacaaacccaccagtgcaaatgacacaaattccagagtttaatccactatgttttattgacgggtctt

SEQ ID NO: 14651 - DNA, 470 bp, Arabidopsis thaliana landsberg
actgttcaagaaatttcggtttacatgtccttgaccacccttgtttctaaatgatccatgagcggtcatttaattttgcacgctcgtggtaatctcgttgcttccttataacttctctcggtaatgaattcttacttcaaccattctattgaaacatcacctatcttaccttgattgttttctccacttcgccacttcgcgagtcctgccttaactctatccttggttatgcttttcacgatcatcatctttaccctcgtcgcctctatatcttaccttgatgcttatattatacccgtccttaaaaaaaccttttctcctccatctcaatcttatagttgtattttacctatttacccttggtcgtattctcttccttgtctcttgcgagtttttaactccaccctttgctgtttgttattacctttaccttcatcgtcttttcatcttaccttgatgactatcttatg

SEQ ID NO: 14652 - DNA, 475 bp, Arabidopsis thaliana landsberg
gtgtgtaatgtcttttctcctgtgcgtcaaaatcggtcggagtttatgttctttgactcgattcatccattttaagctacctataatgtcataggcaatcgtctggatcctctgattcgtgggaagtttcaggcttaagtgatcatcacgatttgcaaaactgaaacaatgtttttttcttgtttcttaatgcaactatttgtcgacttttgtttttaaatcaaatgtactttggctcatatttgtgcttttaaattagccaaatatgccacaagtaaatcaattgatttcacttttttttttaacatctaaaactttcgtcactcattgtgatctttaactatatagtcttgaaataaaaattcattaatacatcgaggaggatacaaataagaccggaaagtttggccttaaatatttgccattaaaattgatagatttatatattttaatttgccaaactgttttatatatg

SEQ ID NO: 14653 - DNA, 459 bp, Arabidopsis thaliana landsberg
attcttaataaggttcctgcttgacgtgtaggcatagagatgtacggagagctagtggatcttataagtgttttttctagagcattaccttcacagctaattggttcagaccattgagcgaagatggttagggaagccagtgattcctttttgttagattattggggcatttggtgaaaaagggttttgttttttcggttaagaatcttaagactttcttcatgatgtaagaatgttcttatctatgatatgagagagcaagtatttgcaggttggtctaaaattatctctaactaaatacgttttttgagttgaaagtatttaaaagtatttcttgcatctgttggatgaggtttttgctgatctgctctttcagacttaacttaagtcacttaagtgacctatctgcagatcacagatttttaaccttgtctaattctcattcacgttttaaaatgc

SEQ ID NO: 14654 - DNA, 566 bp, Arabidopsis thaliana landsberg
gtattttattctctatactaataatatttataccaaatcatgaacttgttgttcattacatatattttggatcatgatatcattaatcattatgatacttattgattatgagaagaacaagtatattggagatgaaacccgcgggtaacccatgggtacccgctaacccgatgggtacgggtttgggaaaaatctcaaacccgtcatgggtacgggttttttaatgggcatagatatttttcacgggtacgggtttgggacggcaaaacccatcgggtttgtacccgttgccatctctatatgcagcctaccaaaaacgtgtcctctctaaggacgtgtttaggaaattattatagcccttcaattatcttacttccaaacaaagagcattgcgtgactggcgacacgattgcttttgaacacaacactatgcattcaccgggggcgcgcttcggtgcggcggcgtcgtggcaggcatcatttggcttccgttgccagtctagcaggttggcctctcgcttgaaagccggccagggacagcggcttttttatgcacgacacgcaac

SEQ ID NO: 14655 - DNA, 433 bp, Arabidopsis thaliana landsberg
caatgagaattgttatatattatcttgcactaatgtcttacctgatttgttgcaatatgttactgatgattatgtggtgcctttacagaacaacttggatgaacttttcatgctcatgcattttcttgatgcggggaaggtatcacaggaatagcaaagataaataagttcgcatacttaacagaattttatgtagctaacatgttatttgattgcacaatacttgcagtttggaagtttggaggagttccaggaggagttcaaagatattaatcaagaggagcagatctcaaggttgcacaaaatgttggctccacatttgctcagaagtattaaccaaaactatttgttcatcttttttaatttatatgtgtttcaaaagtttggttggagggaatctttcatagtaataattttatgatcttaaccatgc

SEQ ID NO: 14656 - DNA, 478 bp, Arabidopsis thaliana landsberg
gccggtccgaagaagagaactgtttcatctcatcctacttacgaagaggtacaaatgagattcgatttcgtttattcgtgtttcttattaagccggattctgattttggaatttagaaattgatttttgtgttctttgttgatgcgatttcagatgattaaggatgcgattgttacgttgaaagagagaactggatctagccaatacgcgattcagaagttcatcgaggagaagcgtaaggagcttcctccaacattcagaaagctgttgcttctcaatctgaagagactcgttgcttctgggaagcttgtgaaggtcaaagcctcgtttaaactcccatcggcgtcggctaaagcatcatcccctaaggcggcagcggagaaatctgctcctgcgaagaagaaaccggcgactgtggcggttaccaaggcgaagagaaaggtcgctgcggcttctaaggctaagtaaaccatcttcg

SEQ ID NO: 14657 - DNA, 588 bp, Arabidopsis thaliana landsberg
  unsure (1)..(588): unsure at all n locations
tcgcttgtggaatctgctgttctcgtgagtaagaagccaatgattgcagtagtcagacaaaatagagagaggtctcgcgccatatggttgtgtacagtgatcccaatcacaaagggagccaatccaccaagcacaaaacaccacatgccttgaaaagtgtcgatgatagatatcaacaatagtcgactccttatgatattgtctatgaaggttgaaagcgatgaggttaacacagctcctccaaagagatatgcgaagatcttcacttgggtagctgagaacacatcaacaaattcatattgaatgactaatataattagatcggggataagttcaaatcgattgagtactcaaattatattgggaacaaattcaaatcgaataaataataaattagattggagacaagattgtgaaccaaaatcatgatgacgtgtagctgatttaacgtcgtggacaaaaaatatacaattaatcaaatatatttcaaaaccagatttaaattttggtagagatgaaaatatatgagaagaagaagacaaaaactttattattcttaganaanaaaattaaaataaaagaaaaaat

SEQ ID NO: 14658 - DNA, 782 bp, Arabidopsis thaliana landsberg
ttttcctggagtggttcaatcaaatggaggaactcagggaagtgaaagccatacttggtaatgacctaattgggaatgcgcagctgcattacaaagataacatcataaaacagaagtggtacattattttaatgaaaatgcaaaaagacatgagactttcttcacatttcttaccatattatattttatttgccgatgctggttcactgtaaagaaagggttcatgtgattatccagatattgtctgtcatgctctccagaagaacctatcaaaatttatacgcaagaaaataaaaagacagtgatgctctcagtctcagttaacttcacaagacaaaagtttctattatacctttcttttttttctctgtattgactcctctccatctttctttctcagcatcagcatgatcatcgtcaccataatcttgatcatcatcatcatcatcatcatcaataactatgatatcttcactagatgtatcttcctcaacataatcttgaacatcattaatatcatcattatcagcatcatcaagagctgtaatatcttcactagatgtatcttcctcattataatcttgaacatcactaatatcatcatcatcaagaactatgaaattttcactagatttaacttcttccccataatcttgatcatcattaacaccatcatcattgtcatcaagaaccgtgatttgcactgaacttctaagccttttacacgttgcacgaccatagatacagaaattgaaacaccaagagccatcaaactcaaattc

SEQ ID NO: 14659 - DNA, 529 bp, Arabidopsis thaliana landsberg
tcagtcttgcagttctggcgttggttagaactttgatattattgtcttcttgcaatcatcccaggtggtgattgagtcatggggcagaatcttctcccagatgtgtgctttgtcgcccaaggagaatggaaacaaacggagcttgaaaacatcttcactgacaccattgatttttgttaggttgcagagcctatcaaattcatgaaggtggtcaagtggatcctccatttgcagaccatggtatttgttcccctgaacaatcgagatgagaccactcttaatctcgaagttgttgttctggatagcaggtggtgcaattcctttcctctgacgatggtcccttggtgcatcttcagcaccaatgttggcagggtcattttgttgattctgatcgtaagccatttcgagtgcttgctgtggtattacgttggctgtgtttctccttactttgatttcccgagctatgcgatcggtgttgtcggtgtaaaggaggctcagattacctgctgatctattttgcatacagtag

SEQ ID NO: 14660 - DNA, 535 bp, Arabidopsis thaliana landsberg
atagaaacttacagggtttcaccagcttcacgggtctgattcggtacaacacgttgctgcattgttctttggtggtcctgatgatcgtgaggctctgtccttgtgcaagtggcttaccaataactctcagattcacctcactgtcatacagtttgtggcggatgactcaaagacagagaaaattgtcggagacgcggtgaccaaggaaaacaacgaagtattcttggagattgttagtgaagatcaaaccgaaaacgaaacagatcgaatcttcttagaagaattctatcacaggtaccttacaaatactctgctcctgcaaatactctgtttttggcatgactagtactctgtttctatgttcctacacacatactctgtttccgttactctgttttttcatttatagagatggtttttatttgtcttgacagatttgtgacgacggggcaagttggattcatagagaagcgagtgagcaacggaatgcagacgctgacaattctaagagagatcggggagatgtatttcactg

SEQ ID NO: 14661 - DNA, 881 bp, Arabidopsis thaliana landsberg
gagcaacttccaaccttaagttacccataatgttttgcaagtataattcatagtaaccatcaattatttgtatattatcttcgttgttcccatttgggatttcaaaattaatgaagaaattctaatgttttcgacgttgaattttacctttagtgtaattaaccgaacgtatacccatcattagctctaacttctatacaaaagaaaaaaaatatcttaaaagacaatcttacctttgaaaagatttgggagtatcatcaagaaaccaccattggaagaaagaaggttgagccaacaagcaagagaaaatccaagaaaatagagaggtttcttaaagaggatcatgagtttttgaataacgatggatacaaagataatccaccgtcgccggaatctggaaagatcatcctcaagcctctcttccgaagaatggatgaactttctatctccgagatccgatgagaagagaagatgtataagatccgagacggtggcttctctcggatccaacacaaagtagtttttggttctagacatttttttttttgggttgtggtctaattgtcaacgttaattaagcttcaaaacgtggaagagttgttttgcaaggtaagtcacgttagctttgtgtacttataatgttaagagtaatatatttaatttcatattaagccacgagtctatgcttttgatttgtttattgtataagtaaattatgattacgatggtcatatcaagaaggttggtgtatatccacaagtcaatattattcacacatgggttgtatggtaggcttgagagttaaaatgaatttgatttgacaaatcttcaaggtattaagaacccatattgtcttaatattaattaaatatttagaattt

SEQ ID NO: 14662 - DNA, 616 bp, Arabidopsis thaliana landsberg
  unsure (1)..(616): unsure at all n locations
gcaatcattgcagagtctaaagttcttgggttaggccgctttaggggttcatagtgcaagcatcttggagctaaccttattaattcagttccatggtcaccaaaaatttgcccttcctagcttgaatccatcagcatgtgaatgttcctgtcccgtatgaggtccaacgcctagaacacaccatacaaggtaatggattagcaaaatactatactattcaaggatattaagttataacatgcttctctcaagctcagggagaatgcttcctagtcagaatccagtaacagacactaagaaatattaccaattcaaaaggatatttggaaaccttacatggcttggaggtatatgctttccactcagaaggtcaagtaatagagttccaaagctgtatattacactttcaggtgtcacgcgacctgtagaaataaacacataacccaataaaaaacagaaaagcagccacaatccaaataaagcattcatgttttcatgaaaccttagctgtcagctggaaaattataaatagcaagaaaattttgataatcccaggaaacaatttangtagtgaaagactcgatgaggtatttgcacaatcttttgtcaaaatata

SEQ ID NO: 14663 - DNA, 487 bp, Arabidopsis thaliana landsberg
aattagcaagagaagtacagaaggaattggagaattagggttggaaaatggaacctgagagctggtaagaatggtgagaagtactgcaacaaagtaccacggagtagccgccattaatgttctctctcttcttcgtctcttcgtcacttcacacaagctctctcatttttgtagctcttcttcatgaactcccttctcacacgattcgcatcatcaccgcgtcataggaaaaaaaaaagaaagataagcgagattttgagatttgggcctttgggtttcactattatcaaagttatgggccttaacaaacctaaagaattcttctaaacacccaagagtggccaaggtaaattggtaactttccgattataaaatttgggcggtgacatcgtttcaatgtttagaagtcgataccaaaagaagttgatgttttaaaacttgaagaatcttggagtctgattgatgaatgggagcacgtgagttttga

SEQ ID NO: 14664 - DNA, 720 bp, Arabidopsis thaliana landsberg
tgttctcaatttgcggactgagaagccgtaacctgaaatcgccagattttgtataaaaaagttgacgatgattcatatgattcaagaagaatgtcttagccacagacgaaacatgctctaagcaacatgaaaaaagaaaaagctcggttagcacatgaaacaacagatttcaatctgtgaaaagatgaggaattatactcactttggttgtatcgatgatttttgtagccattagatctttgtatttgccagttgcagcgttgtaaccgcgtttaggattgtcgctagaaagaacctttcaacaaaaaaaaagcaattcacttagtttcaataacaaaagactcaaatttgcaatcttataagaatattgattaccttctcactaacgacgataccattttgggtgtttgatgatgttctgagacgtcaagctttatagtatttataggctagtaaattaggtcacaaatctcttgaatgccaatcaaaatatattcgatattgtatctaatatagaatcaaatctataaaatcgttttttatttaggaatatgctgtcgttatatattttaagtcattaatttgtttctaaaaatcaatttcttgcagatttcgggagagagaatatctcaagtaggtatgtgtgtgagtaattggtttaaatgttatataaaaagtaaagatatttttaaaaaacgaattgattatgtgctgattttt

SEQ ID NO: 14665 - DNA, 509 bp, Arabidopsis thaliana landsberg
atgaccggcccagggctagtgctattttcctctaagtaagccaactcccgtctaagatgtccaatggcgctgcaagtgaaaaagtaaaaacatgaataaaaagccaggcagaggtacgcgattggacatagattcaacgggagaaagaaacaagaaatgtttcatttggtaaataataataaaaggtaggaagaaattcaaacctaggatatacaaaattagacccctcagatccgctcatatagtccttgagcaactgaggatggtactccagtatttctctgtatattagttctctaatgtcgtcctttgtcaaccttcgcctctcaaattcaaactccattttcgagatttgctgacttgaaagttctctttcaatcttagaaagacccttgaagtaaggatcagctaatgcctattcgaaaaacaaaaagatagcaaagtaagcagagagatacacacaggacgcaagggcagtttacaaagaggaccgaaaagaatctattaca

SEQ ID NO: 14666 - DNA, 788 bp, Arabidopsis thaliana landsberg
  unsure (1)..(788): unsure at all n locations
tatgtagtgttcttggaaacaaagagctttgtctatctagtacatgcatagataagccaaagaaaaaagttgcggtaaaggttgttgcaccagtcgcttccattgccgctatcgttgttgtgatcctcctttttgtattcaaaaagaaaatgtcatcaagtatggagtatttacaacaacttcttaaatcaagaaacagtcatatattactatattttaactatatatacttacatttgctttacatgtaggaaataaacctgaaccgtggatcaagaccaaaaagaaaaggtttacttattcagaagttatggaaatgactaagaacttgcaaagacctcttggggaaggggggtttggtgttgtttatcatggcgatctaaatggctcagagcaagtagctgtcaaactactatcccaaacatcagcacaaggctataaagaatttaaggcagaggtacaatatgttttaactgttccacatataattaagtgttaagcaaaacaaaatgtaattattttatgttttgttaagtcaatgtttgtatgtctgtgtgtgtttgctttacattgccgccaggttgaacttcttcttagggttcaccacataaatttggtcaaccttgttggatattgtgatgaacaagatcactttgctctcatctatgaatacatgtctaatggagacttacatcaacatttatcaggtgaacacatatantaactcattgaatcttttatggattaccaaatgaagataattaattaaaaaatggttgatttaatgg

SEQ ID NO: 14667 - DNA, 481 bp, Arabidopsis thaliana landsberg
tgagaattttctaatgtggcccggatctattctaccactgacgctattttaagtgttcattgaatctcaaaaactactattaccaacacacaccttgattggcacaatgtaaggaatggcgtcagcgttctagtggtagaataggaaaaccaaattacaccgaagcagatttccaaaattggttcagctaggaattttgctatgaatcataactcagaaggctaatgaaaatccaaattgaacaacaaccgtataaataaatatgtcaatgttgtttgttggtaatttatcaataggaggagaaacattgatagacagacaattcaaaattgaactaaaccagaactcaaaagtcggttatagcttcacatttagcttccaatatcttcacagcttcagtgaagagaacctctggaggcagtgatccggtggactcaatgttaactgagaaaaagaaaaacaagaaactcaattacgatat

SEQ ID NO: 14668 - DNA, 818 bp, Arabidopsis thaliana landsberg
  unsure (1)..(818): unsure at all n locations
agtaaccttgtgattctttttccgttaaagattatccacaaatatttcctagagcatgttatattttattacgtactttgcaaataatatatgtttacttgcaaagatgcatagcaatattagtatttattgacatttgcattactctaaatgtgttgcatactataggctaagcagaaacaaatagtttttaagtaaatatattatcgactctggtcattttattaggaaaatattatactacacctactattacagtggaacaagatctatctactaagaaaatccaaattcattctctattcagtttttttatatatataacttgtgaatatatattaagaggaaaagttatttatattgccaaaaaggtaaacagacccaaaaaaataataaagccatagatgaaacacgattagctcagccaaagagactaacaatgagagaaccattgagacaaaagtctcctacaacctttctctatccatttgatatctcttttgtgctattctaagaaagtacattatcttatgtccatctttttgcaagaaacatcttcctatttcactatatgtgtttttactccattttagtttaaaaatagtttaagaatcttaactaattgtttttaagatattacatgatctagctttccacttaaatttcttcagctttgttgcagcaaacattaatatccataaaaaaagttcatcctatatttcaagtcaaattggtctttatgcgttagcacaagtccatgacttnaggaagaaactgcatcaagagctttgtattcatagatcatgtacaataacatg

SEQ ID NO: 14669 - DNA, 632 bp, Arabidopsis thaliana landsberg
caggattaactttctcctttaaccaagctggcctattaggaagatctataggaaccaatttgatctcatcttgcagaccctaaaactccccaatgtcaaacaaatcaacaaatcttgcttataaatttttcatctcgatctcaatttacatatataccataaatatataaaaaacaagtaccttgaggtttcttgtaatccaaacacgttgtgcaaatgggcaagtgtagcttatgtacaaccttgtggttccgtcgaacagagcaggtggatcagaggtagcatcgagcggaacctgacgatcttctacgaaaaattttcttgataaaggaaaaaaaatcaaggagatgaatatagatttaacaagaaaaaacgactttatactaatcaagaaacctcataaagtaaacaaaaaggatcttacggaggagatagagccatggagaggatttgataagagttgtttcttcaggggattattattacagatatgatgttttaaaggaactatggatcaaacacataagactacgtatatatattatatatatactcaatggaaattggaattaggaattaggaagaggcttggttcatgcttacccaatggtgactaccaatagaaaaaggtt

SEQ ID NO: 14670 - DNA, 356 bp, Arabidopsis thaliana landsberg
agatgacgaacaccaatgatcaactagctctcaaggcgagaggatctagcaattacaaggttctagaatattcaaagattacagggttattcgatgaaaagaaagtgacgagttacacacgctcttatagtgactaacgacaaattctgatctgcgaatcctcgcttgtcacgtgtcaatcccagattcttttatttttcccactttgtttcgcacgtgctaactctcacgtgtaatactgtatcatttcgtcaatggacacacttcaggaaacgattacggttgagaaaaaccctattcaacagaaaattgcagaagactcctccgataatgtcgttgaaatctttgaggagagg

SEQ ID NO: 14671 - DNA, 845 bp, Arabidopsis thaliana landsberg
  unsure (1)..(845): unsure at all n locations
ctatggaacaatagcttacacttttcgctgatattgaagatcaagtttccgttcaacttctttccgagtctcactgtacttttcaacccgggctatggcagagagagacgtttcaatctcattcattatttctgtttcaacaactgatacttgattcctaatgtcgtcctgtaattaagagaaccaaatgctcaattaatcaagtgcaccaagcgaaataaaacattccacaatatgtacctgttcattaacaaaacaaaacaaatctgcccaccttgatttcggtttggtggtcgttgataacctcatatagggcactctcagccagacccaacttattgatcatatactcaggctcatgatcaaactcatcatcagattcatcactgtatgaacaaaaaataatcaataaaaacatcaaacaacactcaatacgcctttcttaattttgaaacaaactaacaaggaagagttggtgattatcaccttaagtaaagctcatcacaggcaaaacgttttcccgctgtacagatttgactatgatcttcttcttcttcctcatcatcactctcttcaccttcgtcactctccatctcatcttctgagacatgcattacaaatcctccaccactccttcccatccttttaacataccaatgaacaccaataccaaacaaattaacacaaatatttctaaggccattgttattggtcctaattcaatacagaaatccagaatgaagtaaacatagatatatatatatataccgtaaggttgtgttagtaattggctgaggatacattgagaagccattgagcttnctttcaacagaagcaatcttagc

SEQ ID NO: 14672 - DNA, 769 bp, Arabidopsis thaliana landsberg
  unsure (1)..(769): unsure at all n locations
aggctgtgatgtcgactgtgaagtccatatcgccacatttgatctgatacttggtatgtctggtcatccatctttcacaaccttgtgcaccagcaatcatcttctttatcttagcatgagctcttttggcgaattgactcttcaggctctctactattacatacctcttttgattctacaccatacattgccgcctaatatcttccaacatatcatgtagaggcttccttcttgcttgtctgatagttctgttgaaagattcactaagattattgaggttgtcattgcagcaacttcctatcctgacgtaagctcgtgaccatgtcctcggattggtcttcaacagagactcataagcgcttggattgtaattctttagttcaaccatatggttagtgaattatccttcagtgtaactcctagcaatcttctagaatagtcgatgtaactccatgtcatgactattccttttccagttgtccataatgtgcctagcacattacttatgttcagcttgcgggataacagtatgaatagctttcaccaaaccctgaaaatgcatgatacaaataagaatgtcaaacaactaaaacatcaaaacaaacatccatataagtattaaaccaagagattctcaccaattgcttgtctgatatgacagctacattactcccatctcctaaccctaaagaagaagagagcatcttaagaaaccagtcccagntatcatcattctcaatntcaactacagcccatgctatgggaacta

SEQ ID NO: 14673 - DNA, 719 bp, Arabidopsis thaliana landsberg
tttctatacgacaaggaaactgaggtggtagttgtagaatgatcatgggagaaagacactaatagaagtcaaagaggtgatcattgcttcattttcctcaagaaagttgtttgtgttctggatcaacttatttattaacgatttgtttgttttgcagttcgagctggagtatcccagtgaatacttgatatcagtggagggtagatatgataaaatagatggaattgaatcaaaagttttagtcatgcttaagttcaagaccaacaagcgaacctctcaagcctttggactcgatatggtttcaaatttcgtactccacaaggaaggtcataaaattgtagggtttcatggaaaagccaacaacatgcttcatcaaattggtgtccatgtcctacccattaccaactaatcatttttcatatcttcccaaactctgttcaactctgtaatgtatcatgactcctatgtttgtataaacgcgagtgtctttcgacatcgacaataacatgtcataaattaagtttcaatgctcctcagcaagcgttactcatttctctcaagcttcatatcagattctctccacacttttcttatgttttggttcacaaatttacaaactttaagctatatctatatacacatacatgtcgctttaggcaatgcgtgttacttgaacaagtaagttagtgtttctacttactttcagaaaaagaaggaca

SEQ ID NO: 14674 - DNA, 700 bp, Arabidopsis thaliana landsberg
aacaactttcctatagatgtctacttgcttatatatttttgtattgaaaaactaattagaaagatatgattatcgttaagcaaatataaaacaattactaatacgtcaagaagtcaaagtgatgacaatgcgaaacgtagttgcttacgaaataaacgttaaggaataaaattatttgagaacttataatttatattcacacccgtttctcacatgcatcgtgtttattaacaacaatctatataatattcttttctacgtatttttgtggttgatgtttaaattttttacaaaacaatttttattttttttaatttttgtttttctcaaaactaacacattgtttataatctattataactcaaacaaaccaataataaaatcatttacataatagaaatcatcaaaaataaaaataaaaattaattggtttgtattaaaatttgaaaacataatttaattgcaagaaaaaaaaattcctaaaacatcgactataaaaaatacgaagcgagtataaagtatactgtgtcctccttgtccaagtaaacttagagcaaccttacaaaatgtggaggctgagaactggaccgaagcctggagaggatactcacctgttcacaccaacaactatgcagggaggcagatttgggaatttgatgccacgcaggctctccacaagaaattgctgaggtagaggatg

SEQ ID NO: 14675 - DNA, 574 bp, Arabidopsis thaliana landsberg
tctaataatgcccatcaagactatgaattggtaattaacaattacttattacaaaagttgatatccttactcatttttgtttcattaggccagatgtatttattttatgtaagtaaaatctctcagaccaaatgtatttattttttatatgtaaaatctcttaggccaaatgtatttattttttataagtaaaatctttcattttttattgacattgtagccaagtaaacttgttcgtttaaaggcatatacttttaaaacctctataaattaataatattgggaccaagaaattttattaatttaaaaaggtattaatttatcaattaattaataattattaatttatagagaaattttataattataagtcttcattacttttttttataagaaatgcaattgattaattctttcttataaccacaatttttttgaaaataagttaattaatcggaaaatgagctagagatccaattttcactattttgttttgtattaaactaaccaacttgcattcttttagttgaaattagttgttactatgtaatatggcctaaaaactgtccaatcc

SEQ ID NO: 14676 - DNA, 1076 bp, Arabidopsis thaliana landsberg
tccagaagcaactttaagttctgctttgctttatcactctgaaattgtgtatgaaaaaaggacttactggggacaagatttagtcgtatcttgcaacgaaactagtcagcgcatgtacagatccatccataacaacggtttcagtcgcatacatttcaatagcaacttcgaaatcagcaatagtttctttcacagattgagctaatagctttgtcagattcagagcatcttcttttatctcagtacaaggtttgcttccaaagatcaactcaaactatgcttccaagtttcaatcaaaggaaaataaataactaataaagtcttgtagaaatcaatgttactaacctagtgatttgaataaacatcgatattggaatatattcaagcatttttaatatactccaaaatggtacatgaatttttcctagttaaaaagtacaaagaactaaatttcataacgatcgaaatcattcaactataaaaatttggttggatacaccaaaatatgttctcaattgttttgcgtttacatttacccatatatgctatgtatgaactcgcagtattgtatgatactgtacatgttacctctggttgaagctctatcattatctcatacatatctaagataacaaacactttttccggcgatctcctgctgatagcgatagcatatccgaaactaagaagcataccaaaactaatagtagtgatttcagcaaaagattgatctctaaatggctcaacaccatcaagtatttggtggcagatttccttctccgcagcaaataacagtttcacctgtctcaacgtcaacaaatcaacaaggatatcattacaatctatatctataaaggtatatagttatattatggtttttggaagtgagtttttgtacagatattcgaatgtaatggatccaattcataatcttggcctcgaagacgtcctgattcattctctcaacatcatatttgctatgtctctctacacataatttctcaaggctctgcgccaacactgccctacgaatatcccttaaatattacgaaaagtaaaatattattaagaaacag

SEQ ID NO: 14677 - DNA, 684 bp, Arabidopsis thaliana landsberg
gttaacgttatctctgatgacaagttcaaaaatggaacaaagatcactcctttgcttcctttatctgctccttctattcaatttcactctcagagtcgctggaaacgctgaaggttcttcttttttgtgctactctcatgaaaagtcccttcctttttggtggttgttagatttcgaaagttcataactttttttgtttgtttgtttgttgttttggattatgaatacgtgtacaggtgatgctttgactcagctgaaaaacagtttgtcatcaggtgaccctgcaaacaatgtactccaaagctgggatgctactcttgttactccatgtacttggtttcatgttacttgcaatcctgagaataaagttactcgtgtgtatgtttctctctctctgtctctgctgcttgttttatctgaatgaatgattcaacaattcctttgggaatctactgtttgatgtttgtttagtgaccttgggaatgcaaaactatctggaaagttggtgccagagcttggtcagctttcatacttgcagtatttgtaagccatctcttcctcaatgtctattaactctacagggtttctgttttttttcattttatgtaaaaaatatatagttaggacgtatttaaatttattatgcatatgcttcatcttgcttgtccaattactgagccataa

SEQ ID NO: 14678 - DNA, 550 bp, Arabidopsis thaliana landsberg
cgtggcttgatttaatgtcttcgttttctttttgtctatgtcgcaagcatggtttgttgcagtgtgcctctttttaatgtgtctcttatgcttgttaaattcggaactgttggagatgagcaagtgttatttcttgttattctttcaggcagtggcaaattctacttcagctactttcttgcgtgttgtcggtagtgaactgattcagaagtatttaggagatggtcccaagcttgtgagggaacttttcagggttgctgatgacctttctccttctattgttttcatagacgagattgatgctgttggcaccaagcggtatgcctaaatacaacataaacatgatccattgataaacaatgttcttgattttgctcaagagatggtatctaatatgtgatataaaatggtggttgaaacaggtatgacgcaaactcaggtggggaacgtgaaatccaaagaaccatgttggaactactgaaccagcttgatgggtttgattcaagaggagatgttaaggttattctcgcgacaaacaggatcgagagtc

SEQ ID NO: 14679 - DNA, 698 bp, Arabidopsis thaliana landsberg
gcaatctgtccgcccaattatatcatccaacttttcatatcccagctgagctaatatgcccctcacctacaaaaattagatgaaatattagtgttaaaatcaatgaacttttgtataagagaaaatattcctgaagattacctcctctgcaatatacaagaagaagttgacaagatcaccaggaagaccggggaaacgtgcacgcagttcctctctctgtaaccgaattcagggaaatcttagtggaaattggttatacattggggaaatatacaataacaagtaagaagagaatccaaattacctgactggcaacaccaacggggcagttattagtgtggcaaatgcgagccatgatacatcctgtggcaatcattgccagagtaccaaaaccatactcatcagcgcccatagctgcagctatcaacacatccacaccacttttgaatccgccatcaaccctgataataactctttcccttagtccatttccaatgagagtctgcaaaagaatgaagcttagctatcaatagacatcaaggagttaataagagactacacggaaatttgaagctgataccagggcaaactaaaatgaaaaacatattctcacgacgaagttatataatataccttctgggtttcagctagtcccagctcccacgggccaccagcatgcttaatggaacatatagggc

SEQ ID NO: 14680 - DNA, 614 bp, Arabidopsis thaliana landsberg
caataatattgagtctatatgtatttcaaaagtataccttatgaaagctttgattatgctagatgggactttgtcatagtggcactaaaaattcttaatcccaaaaatattcataaattgtatccaatagtgcatttaaactctaacttttctagtctttgtaaatgagatcacatgagatttttttcaaagcacacacggtttaaggtaggatgacctgttatctccctacctctttatgctggctatggaggtgttcataccttgttgcactataggtttcaagctggttatatccactatcatctaaaaatgcaagagctctcaatctcccatttaatgtttgtaaacggcgttatggtttttacgacgatcgtagttcttctctacatgtaaaaagtgaagtccaaaagattttgctacttggtcttaattccaggtcaataagaataaaacaaacttctatctggcagattgaaccaatgtgaatcactactattgaaagtatagtccctattggctttctcctatttgaacttgggattacaattatgtggagaaactaaaaatttgtaaagacggtcactcatagcatcagtgatatatgggtatat

SEQ ID NO: 14681 - DNA, 680 bp, Arabidopsis thaliana landsberg
tctccttcggtcaatgtaacgccttattctgtagaaaaaattcaggagcttctctcttacaggtgtgactcctctcttgcttctcaactttctcttatcccgtctgaagaagaaattactcaggttttcttctctatgccaagaaacaaagctccgggaccggatggttttccggatgaattctttttggaagcttggattattgtgaaggacagtgttgttgctgccattagggaattctttcaaacgggcatccttccaaggggttttaattcgacagctattactctcattcccaaggtgaccggagctgatagtctctctcaatttcgtcctgtcgcttgttgtaccacgatttataaagtgattactcgtcttatttctagccgcttgaaacttttcattgatcaagcggttcaggccaatcaagttggttttattaagggtcgtcttttgtgtgagaatgtacttcttgcctctgaactggtagataattttcaggctgaaggagagactactagaggctgtctccaggtagatatttctaaggcatacgataacgtcaattgggagtttcttattaacatcctcaaagctattgatctgccgccggtcttcattaactggatttgggtctgtatttcctccccttcttacagcattgcttttaatggaggact

SEQ ID NO: 14682 - DNA, 1018 bp, Arabidopsis thaliana landsberg
  unsure (1)..(1018): unsure at all n locations
cgtctcagccattcctctatagcttcccgatcgtacgtgtacccatccgcagccacgcacggctcgttcattactccctgttgccaacaccaaatataattaggttaaaatcaatgaggaaacaaggtttcttgtgtaacaagtaactaatcatggttttagggcttattttgaaccttcaaaagtgggcaaatgaaatgagatggaggaccagacggagttctcgaaagcaagttttgagctttgtcggcgactttcctgagccgttccaaagccgggatgatttgatctttaagatccggtctgtctctgcgtctcatttctgtacaacacagtcccaaagcggctaactcacgagtatcactgatgggccaagacccagctttcttatccaagattgccataaattcagcatcgtctccgatagcttcttccaccatatgagtaatcgctatggcgggtttcgcggttattagctgcagaatcacaactccgagggagtacacatccgatttaggtgagataatcccggttcgctgatactcagggtcaatgtaacagagcgtgcccacgggactggtttgcttgaagatagttctagatgaaacatcgtcttggttaaccannnnnnnnnnnnnnnnnnnnnnnnnnnnnnnnacgaagttgtggtcaagcaagatgtttcctggtttgaggtcacggtgaatgattggtctaggcttggatttgtggaggaatacaagcgctgaagcgacttctaaagcgatcctgaaacgctcaaaccaagggatcggtggtgtgtcgttgactagcatcaaccggtcatctaagcttccgttgtccatgtactcgtagacaaggcagccgcgttcgggacacgcccctagtaggaggactaagtgaggatgtcgaattttgcttaagatctcaagctgttaaaacagagataaaataaaaccatttgaactctaattgcgaaattaacttgaagtaactgaaaactctcagaatggcaaat

SEQ ID NO: 14683 - DNA, 748 bp, Arabidopsis thaliana landsberg
ttcttgagtagtctaaatacatttgccccctctttcccaaaattcagttatcagaatactaattcttctgttgccacccattaaaaaatccttttttctatgaaagaaccaaaggaatagaacactgtttttcatattttaagtttccccatcttttatttcttatcaactacttaaatgtgtttgaattatcaacaccatgcaagtattgaatcactgtgttttgttttcatgggcaaggataatcttgtttctgacacttttgttttacatggatgtatttatgtttgttcaaatggtctaactaagctgattttctgggatgaactccataggcattggccaagcttgtagctgtgtgcggcccatatcatagaatgaccgctggagcgtatagtcttctcgctgttgtgctgtaccatactggggattttaaccaggtattctctttgaaagaaatttggaccgtctccaagacattgttcaatttcacctactccgtttccagcagacagcactaaccagtattgttttttcaggctaccatttatcagcagaaagcactcgacataaatgaaagggaacttggacttgatcacccagacacaatgaaaagctacggcgacctggctgtcttctattatcgtcttcagcacacagagttagccttgaagtaagctttttgcatttcccaaagcgccaactactacaaatttaattgcttcggtttgctaacatgtttttcctt

SEQ ID NO: 14684 - DNA, 1078 bp, Arabidopsis thaliana landsberg
  unsure (1)..(1078): unsure at all n locations
ttcatttaaacttctttttcacttaatgtttaaaaatatacttctgtagcacgatctaaacctattaaccagtttgattttccatttacttatgttgagtatgatagagttagagaagtttaaagtattaagagtatttcggtaaacaataattttatcaggaaatacatttctaaacttaatttaatgtttaaaaatatccgaataattatattgatgttatatcaccattagttatcaactaggcaagataagcaatcatactttagtaataaggaaaacaaatcatgatattaaacttatcgattattatagtattacattatgtataaataatactatattaacctggtattatttatacatatgtgatatgttgatttgctatacatattttgtacaagaataaaagtggcgcaagaataaaagtggatttgctatacataagttgtaaataaaaaaaagagcaagtatctaattactactttccaccgtcatggttaatagatatcgttaaaatgtatgggtgagtatgctattaagattcaacccttgagaatttgattgcatgcgtcaataaatctttcatatacgtacgtcattactcattaacaaacagttgtcttgatttgctaaatctaaaacttacctccaagtctccaactatatatggagaaagtaaattgtttacctatgttctatatttctttattattcatgatcaaaagtctaaacaattcgatcggtcgatagttgcctcgaaatctagaacacattgaattaatttttcgtatccagagtcatgtatttaaaactggtttatccagtaattttctaatacgttttctagttaacaaaattttttttttacttaaaggttagaaattttaattcataaattatttagctttctgtaatcctaactaaatggttatgaacctttggaaaatttaaaatttaagttattgtttaagttgttagcaaaatctaaatttgacatcgatttaaaattaaatataaattagaaattctcattcaattaaaataagataagaaggtcatcacacnntgaattgat

SEQ ID NO: 14685 - DNA, 718 bp, Arabidopsis thaliana landsberg
acatactataaatggagccaaccaccaagaattgaagcacaaattcccatcgaaaagcttataaagagtgaaacttacagaaaatgctacaatggctgaggagagtgcaagaaacccatacttggccatgccctctgagaggccaacaaacgtactagcaattccaaacataatccgccaaaggaaaatacatacaaaaacacctgcagctccaaacacaacaagactattctttttccaaaatgcatcaatgtgcaaccctatagcctcacggtatctagcaaaagtagaactaacagctttgacaggcttatcaacaacctttctcgcaaaactcccatcaacctttcgaaatccagagctcttagtggataccaatctaaacgccgatgcaaaactcacattcacacgaggcaaacccaaagcttgctgcaacttaggattgagcttaggagacgacagaatctgatataatcccacgtttttggaagtgggtttcgaggataagctgtggaagctaaacttaggctgaagctgagaaacaccattggagggaatagctggagaagacaaagctgatgggtttgatcggccaattgtgacagggttgacccgagtgtaatgcagccgaataaacccttgaattgctttgaaatccgatggtttcaccatattctatagccttttagatcgatcacacaaaagctcgaaccgaaga

SEQ ID NO: 14686 - DNA, 571 bp, Arabidopsis thaliana landsberg
atatgtccatgccaccaagaatcactactttgtaagtcgaaaatttagtggtacccgcattctttaaggtctgatagtaattatgatccttaacactttgaatgtggttttgaacatttcactagaaacttgtcttcaagtggtttaaatggaaacatagcagctttcattcaaagtctcacgcaactagaaacactgtaagtatataccattgttcataggattgtgatagtttggaacaaactttgatttctttatgctttcttgctaacattagggacttgtcgaataataacttgactggagaagtgccggactttctaggcaatatgaaatcattgttgttcatgtaagtttctctcaatatatatgctaatgattttcaaatcccaaatcaaatcatagacggtttttattttgaacagaaacttaagcgggaacaatcttaatggctcaattcctcaagctcttcagaaaaagggactagagctatcgtaagaatctttctacgtagcttttgaacttttctcaattattatctacgacccttttataagcatttattgtcatg

SEQ ID NO: 14687 - DNA, 667 bp, Arabidopsis thaliana landsberg
ggtttaaccaaaattaaggtcaaacaatacagctaatcagtggattcaaacataaaaatccaaaaaaaatccaaagattgaccaccaaatacccaattatgagcacaatgcaactcacccatcaccaactaaacgaaatataacaaaagctattccaattaactaattatacaagtaattagagagaaagagaacaaatcaatgaagttttgaactaaaattctcagcaggaaactgagaaatctcgagttcaaatcccagaaaatgactttacgagctacaataagatagatgtgaagaaccgacagcaaaattcaaaacataaacaatccaataatcgcgtcgattcgcagaagatgactcacagagatggagcttaagaatctccttgaaaactggagaagaagaaacaaaaggaagaagaaacccctagattaagcaaaggttgataagtcgtcttcttcgttgtagatagagaagctcttcttcaattcggagaatttcgtctgtctataaatgttcccatgcacgctaagtcctctcagtctcaaagagtcttcttttttgccaaacttttttttttttttccgatctgtttttccctttattttttggatttataaaacattttgtaaaatttcaaaagtattggtttttttccagtttt

SEQ ID NO: 14688 - DNA, 629 bp, Arabidopsis thaliana landsberg
gcagataaaagcgattacagatgttattcttggatggaaatggtactcgtttctgtttggccaagggacatattacacaatgaaaatcatctttattcctttgtttgaaaccaagtacatctgtaacaagatctgttttgacattagatgaatgacctagtctactatgccataaactagagtcaacaagaattgcagaaaaaacaagtggttaagttgaattcttcacgagaaattgcgtatccaaaacgtagagatttgaaatttgttcccctttaccaatcatcaacctcttgatatgatcttgtatcatgcaacaactttcatcataacttacacgatatcccaaatctttggttaactgactcacactcagtaaatttaaccgaaagtctggaatatataacacattcttcaagatcatatgatcacttaactccactgaaccaattcctgttattttaactccataaccagtaggtaaggtaacagaatcattcatggtttcagatcatgcctgaaataatgttatatcatgacacacatgatgtgtagctccactatctatcacccatgaggatgaagataaaacatttcctgtagctttcaaggctacaataaaacgtaat

SEQ ID NO: 14689 - DNA, 771 bp, Arabidopsis thaliana landsberg
aacacaataacacgtctactcttcttagcgactagtattttgtcaaaagtcggaagaaaatctccggccaagtcaacttctatcgctttaaaaagcgcatgttagctattaaaaagcgcacgttagcatcattttcgggaaattgctaatcaaactttccactttcgtcttcttcccgtgtatatctttaatctcctctgtttggtgactattatccattttccaccgatcttctcctcataaaaacacctcttcctcaacgaattttttatccatgagtcgcataatgggattgttcgatctcgagaaacacttcgccttctacggtgcttaccatagcaatccgatcaacattctaatccacatcatcttcgtttggccaatcttcttctcagttttacttctcctccactcgtcgaccccaattttcgacccctctcaattagggttttctcaatcgttgaccctcgacggcgttttgcgatttaacgttgggtttatattcgccttgatttatgctctgttctatatcggtttggataagaaatctggatttgaagctgctcttatgtgttcctctcgctgggggggccccaggcttcttgctgttagactaggatcttctcttgccttaaaggttagactgttcttctctaattgctagttagggttattgacaaaacttcatttttggagaatatgattgcgcttaagcatgttcatgaggagatatgactatgtgcatccatgagtagctctatgtgtatatta

SEQ ID NO: 14690 - DNA, 608 bp, Arabidopsis thaliana landsberg
ccccctaaatttatggttcattgggaggcgggtgcaaaggtttcgcctttaccaaactttccctttcgcttttgttttttttttttaaaggttgccggttaaattgtggttccccgtttttatatctaccataccagctatcttttagatgtaatcatttgcaaatatttcttaaaaagttgaatatatatgttaagatctaagattgaatgagagattggtctattatattatttaacaatcccgcttcgagcattcattctctaaactattatcgttaaactattctgatctatatttaactttcacaatttttaccaagatcataataattagtttatattgcctctaacagttctcaaatgatgtttcaattattattgatttcttacaagtttgataatattgtgcttttgaatttatgaaaccaagcctctcttagcaactgtgactttaaggccatgtttcatgtgaaggattatggaagaagctggctcgatcttgtgcccttcaccgaccttgatgtcataatttcgtatgatcacaacaactactgtcttcatctgcaagaaagataaatttttccccaagcagtttcttggtccaga

SEQ ID NO: 14691 - DNA, 568 bp, Arabidopsis thaliana landsberg
ctctacgaatcaaaaggatcagtgaagagctgatccacatatctaacattctccgttttccttttgtgatctatgaatgacgaaacgatccactatctttacggtattaacagggtcttgttgtgctgttgaggcaccccatttacttggaaactctctctcatagctcatcttgaaactctgtttcggctctgaatcccaatctttgtccagtttccagtcttttggcacctaaaatcatataatataacacatctttggttaaagttctttaaccatgcactcaactactaataaatcaataaataagaactaatgacataaagattggatcattagtagcagcaagcagcattatcaggtagcaacggtcgcaagtagagttttttcttaccttatcaactgcgagcgtgaaaacttcaatatctccatcttctaggatgtggaaacgggtgaaagatttgtaattggcaatgcggagtgaagagaaagcttcatcaaagtgtatgtggaaccagttgatgcagatatacaaggagcttccaaataccataagacacgacagggg

SEQ ID NO: 14692 - DNA, 861 bp, Arabidopsis thaliana landsberg
  unsure (1)..(861): unsure at all n locations
ttggtcgtctttgaaatactaatataacttattttcttcatttaatgtgacagcaacagcaacctctttatgctttttaaattttatatgtttaactcattgtatataatttgatgtttttgaatcaaaatattaaatggagatgagtttttggtaaactctagagaagatatgttacccaggcccactagacttatacatgggctctaagtttaataacaaaaacctatattttaatacatatgggtccaaaagtatgaaacaaattctgtctggatattgtggatatatacagcacanaagcacctttgacacatgaaacattgttaatctaacatggaaaataaaacactattttataagcatatattttgtttttctctggtgccaaataccaaaatttaaaattgattttgtgattgctccataatatcttgaatgagcaatgtgatattagaatctgaagatcctccttttttcaaagccttatttgccaagtcactaagttctgtcacttttcttcttctctcttgtgcttcttcactatcacccattagctgatccacagcttttctcacacattctctgctcaccatcactcctatctgctcttcttttccatatttcatcaatttctctactcctatctttaaccctgcttttagtatatgcacaactaacttctcattcaagaattgttcagcaaacaaaggccatgtcaataatggaactcctgcagtaattccttctagtgtcgagttccatccacagtgagtcaaaaaccctccaatggatgcgtgtgagaggatgaaaacttgcggcgcccaacctttgatcaccagtcctctatctttgatccgc

SEQ ID NO: 14693 - DNA, 866 bp, Arabidopsis thaliana landsberg
ctgatgacttaaaaaggctttgctgaccctgaggagctatttaagaaggaagaacaaagtcaccgagtcaacattatgactaaatgttgagagtctttaaagtatatatatagagagtctctaattctgtgagagatcgattatccaatcattgaattggtgtgtttcagagcctgaaactctgcagttctcttcattgtaatgcaagttatttgatagatcaataaagattgcttctcttgttatgctgcaacaaaacaaaacagaatagtaagatgtttcacttaccatgatgcctcagaatcttcggccctatgcgatgggaatttctttagctgttgcttagttatcatggaatcaacagagaaagcttcaccctccagacatggatatgaaattgatgacgattcctccccgccctaatggaagctccagatttggagcggtcaatcctgtgtctgttactgtttggccacagggtaagttgaaatcttcttcagagtttcctaatgacatctgtataataaaccaaactatcgattcttttagatagtggccttcctgaaatattaaaaagaaaatcgagagatagctttaatagttttcagttcaaattatggcaaaaggcttactcgcatccgcttcttgctactactctcattctctacagcatcacatttttctccagactgttggttgtactctgctttagagcttccatcactatcattcgcatatggagacacatgcaggagtcgtacgccgcatcctttgatcctgctccctttaaacttgaatatacacattatccaagacctttacctttggatatagagtatttttaactgccggaacttaaggaacac

SEQ ID NO: 14694 - DNA, 474 bp, Arabidopsis thaliana landsberg
ctatagtgcgttgctctcacgctataccaagtcagaaacttctgtctgaaattcttatttatatgtcctgaacactcgagttgtcttatgatcttcacacaatgctctaatccactttctggacctccattcgctgaatgatcaccgttgatacaggtgtctttcatcgatatttcgattctagcttgacggttcttgatttcatctgacctgaagggagtaattggcaaactcgcatctgaactgtttcgattaccaacaagacttttcgtagtaaccacgactggagtttcagattccgtcttatccagaacagcttcttgttcttcatcatccaacaacacaatctgctcaacgtccttctcaatctgtacaatgtctgagtcggttgtcctctttattcttttcgcagcactttcattgactgaaggagaattggtgtcttccttctttgaagatggcttttttgggaca

SEQ ID NO: 14695 - DNA, 991 bp, Arabidopsis thaliana landsberg
acggcgacgtgttttcgaactattgagtttctcggatcttaatcgaactagatcagtttgttcatcgtggcattctgttttgagacactgcgtcccaacacaaaataaaattccatgggtaattttattccctcgaaacaacgtcaataacaacaacaacaatagttgtgtgttgcttgttccagatgatagagatagtctttacaaaaccaaagatcttggtgttggctttatgctgagtaattgtctagctacttacggtagttggatcctaatgatggatcgtctctgtaatctcaacattttgaatcccttaaccggtgagaagattgatctaccacgtacaaagtttgatctaccaaggttggaatctagtgtagcatgtctttggatagacgagaaaacaaaagattatatagttgtgtggaagataaaaaactctttagtctacgccaagaaagggaatcacacgtggcaacaagttttctctatgaacgaagaactatccgtagaacaaattgtttacgaacacaagactcaaaaactttacgtacattttaatgattctactttaagtatttggcgtttgtctagagaggatccacatggtgtttttgaaaattatattccatttgactttgtttttcaagacttccttccggatagaagaagtgacgaagagttatatgtgaaagagtatattgacacgaggctaaacattgcactaacaacatctggagaactcttgaaggtagctagtgtagtgcaaaagtccaaaagatggctctttcgcatctacaagatgaactatatcaagcgtcgttgggaaagaatcgagtctttgggcgatgaggcattgatcttagatatgggtattactattgttgccaaagacatccccgggctcaagagaaactcaatttatattagtgggtttgattatggtagaaaacatctagaccatatatttatctttgatcttacaacccac

SEQ ID NO: 14696 - DNA, 866 bp, Arabidopsis thaliana landsberg
  unsure (1)..(866): unsure at all n locations
ccctctgcttttctcctccctccgtgtaatttcacgattgagctattcatcacaacagttgatcttgacaaaccttcgtctctcgataatcttttcaatggtctagattggttctcctcctgcatttcaaaaagaattgtttcagatttcttaatcatttcctaataataaaagaagataaagaaaaagattcatattcatacatcggagaggttaagatccaaatcaagtctcgtccttttcaccacctgatctccttcaccactactaaccgaagacgacgaactcaccaccggaagttcttgctccaccgcagccggaacaacctgattctccacttcttcttcttcttcatcctcatcgctttcctcatcataagactcagctccgtcgttacaaccaatgatctcttcttcttggttaagattctgatccctcccggcgagggagctgttgttattcttcttacgagctaaacaagactcacagatagaaacagttgggccaagattcagcccagaagctttccaaggcgtgtgtgactgacacgcgctacatagaagacaacgcatgtgtttcgccaccagaaaattagctccgtgaactttaccgtcacaatcccaacataaactcgcttgatctgactcacaatacattctcgctacaccacaacataactcgcacttcttcttccccatctctagatattatctcgcacaaccacaaccacaagctctctctctatgtctatctctgtctctagatgtttgtgtgctataaatattcttggtaggtcttttgcttctctctcttctctcgttncttctgcggacacgaataagagacagcgtaatagagaattgtaa

SEQ ID NO: 14697 - DNA, 576 bp, Arabidopsis thaliana landsberg
cgacatcagctccatctgactgggagaaaacttttgtccattggcttcgacccaagcatcaccgttagttgccttatacaatcttgtaaggaaccattttcatctgcttctgagtctgtggatcatcaaaacgtctcccaatcaaacgtttagaaccgaaaatcgtgtttgttggattggtcacggcctgacgtttagccggtgttccaacaaggagttcccctttttggttcatagcaacaaccgatggtgtggttcgacttccttccgcattctcaataaccctagcggtctgcaaaaacaagatcaaagtcaatacctttagaatccagaagccaaaatcttaaaaaaatgatcacagtgctgagacaaattaagagagttttacctttccctccatcacagatacacaagaattggtagtacccaaatcaataccaataacatcattccccacaggcctcgagctagatatacataacatcacacaaacgtaagtatgagatcatacttcaaaagtgatttagttcttcattcaataccatatactcagaggttgatgttaccagaaaggtc

SEQ ID NO: 14698 - DNA, 197 bp, Arabidopsis thaliana landsberg
  unsure (1)..(197): unsure at all n locations
atggccatgctttttggctgatgagattcgctgagatgttagctgacatatacatctaagaatgtctcacagtgattatacgttagggtcgtgcatatctccatatgtnnnnnnnnnnnnnnnnnnnnnnnnnnnnnnnnaatagacgttagggacataggttcatatacatggactgtggggtctattacatcctt

SEQ ID NO: 14699 - DNA, 903 bp, Arabidopsis thaliana landsberg
gcattctcatattttatcaagtggaactagtctttaaatgatccactcccaatttctatatttatatgttacttttaccattattcaaagtcttctcctttttgtttaacaatattatgtagatgttttgttagcgagaaagctgtatttttgtattcaagactatgtcataacgtgtgcaaatcacatgctttctcattgaatgactttccgatacagtcagaagcagggaaagagaaaaagagattctttgtgggtctcaagatgagttcaagaattgaagtctttgtgctcttgatcttgctttcgttccaattttgttctgtatctgcgcagacaaatggtttcgatggtaatttatagtttgatgatgatcagagtttttcagatacaggaatttcaaagtcgtttgaatgagtttcaaaattgttgcagctgatgctttacaatacctgaagagtagtttgaccatacctcctcagaattggaaaggcattgatccttgtggaaccaaatgggttggaattacatgtagcaatgaccgcgttgctagcatgtaagtatcttatttttttgctgcttcttccaataatcatctgcagactttaaccttgtgttgttacttgttgcagatcactaggcaaccttaacttggaaggaaagctttctgcctttattacgacgttgtctgaattgcataccctgtactcttcttcttcttcttcttcttcctttccttacaaatgattttttttcttcatcttatgatcgaatatttttagggatttgacatctaatcctaatttgactggaccgcttccaccaaatattggtaaccttaaggatttgacgaccttgttagataactagatcatgacccatttgtaacccgtttgtcttata

SEQ ID NO: 14700 - DNA, 673 bp, Arabidopsis thaliana landsberg
aagccgaagagggttgaaagcagcggcagaaacaattcaccaaaatgttacttgtatagagatcaggtgaaatttcaataccttgagcattctcaatacgtttccagagattaatcacaacatcatacatctgcatcttagcaatagcagtcaatactttattgaattcaacaattgaaggtagagggtaagaataagccatgagtacgaacaaatgaaatgcatcgtcgaacttaatattgtcaagcccacttctcaatacctctcgataatcaatagtagtaccagaaaaagctcgtacccagaaacgaaatctcaacgacggagaaagaacaatcccaggattactgttcttcagaaaatggtgatgaagatgaagaaaccccttagccgttgaagcaatcgcagtcgcaatcgaccaccgcatccaatcgtttcgacttcagcttgatttgggttcgttcccaaattctgtctcagggattttgaccataaaccctaaaccctacagtgttgaagtgtttgagacttgagagaactgaaagaattgaacagagaagaaataaaactttaaccggtttagaaacaatcgagcctttttaggtttttggtttacaaataatcgaaaccgtacaaattaataaccaaacgcttaaacggttcgacgaaaccg

SEQ ID NO: 14701 - DNA, 619 bp, Arabidopsis thaliana landsberg
  unsure (1)..(619): unsure at all n locations
tcactactcaaccttccctgcagattccttggcactgacactgcatgtctccatccaggaaccatcatcatcatcgtcattatcactgccatcatcatcaacaactggagaacatacaatggtgaccagatattttgagaccattaaacctccagcatttatagattttctaggagttggtcactaaagctctaacatttagagtgggaactaatcaagaagttgcttactcctgtcattattatcaaagtctctgacttttcttttgttagccattaacatgacaagctaaagacatcaagtatcttttcttttctgattcaaagttttaaatcagtattacaaaatcaataaccagcacaaaattatctcaagtagtggtggctctaacggtctaacccgaggtaaagaatcgagaaccaaataaactatagcaatactctcatgtgttttgaatggtatcagccattgcttcttcgagttcttccatcgtaagaagcctcgtagtcttcaaatatcctcctttcgcataggaatcaatatcttcaggttcacttgcttcaatgtgaatggttncttacagctnttactgtcttctcaacnaatctgatctttcaat

SEQ ID NO: 14702 - DNA, 822 bp, Arabidopsis thaliana landsberg
atcttaccaaatccatgagttcctccagcatgagtatgcttcaaagtttcattataatcttcttcatgcatgaaaataataccagcaatcaatcgtaatgtatcattgtttcctattgttgaatctgctaaccattccttcaagcttgaaattgttgattcctgaaccaataacaatcgttccatataagcatttgttattatcggaatgtgttaggttagttttatcggtctagatgattttgtattacggtgatgttaatcggttgaatagtcattgtatatatacttgtacaaaatacatttacggaaatttaatcagaaaatatcttcttcttcatctgtaacaaactttcttatctctcgatcgtaatatggtattagagccatcgaagcttaaatttcttcataaatcatctcatgtcgatctaagaagcaacatgttatttctagatactgagcattagctcttgctacttgtgagttggtttggttgcatacattgctcgtatcttaaacggatactacttcgattcttatcttgttttcagacagtacagatgttatctatattgcaatcaattatatcttccatgagaggacgaaatatattgagattgactgccataccgtgcgtgacaagttggatgatggtgagcttaaactgcttcatgttcccacggatgatcaaatagctgatattttgctaaacatttgttctcacatcagtttgaacatctaaagtccaagatgagcattctcaacattttcgaatcctcatcttgaggggtcatatcagagagtgttgatttaatttatcggt

SEQ ID NO: 14703 - DNA, 647 bp, Arabidopsis thaliana landsberg
taaacccttattttgggcccttaacaataaatcattaacaatggtaaagaccaaagagacattgtatgtttgtttcagacaaacttaaaaccaagccaagctagaactagttcctctccttatgtcatcgtgtattcagctgcattccttctcataatccagtcgagaaaaaccgaatagtttcagaggaagagagagagagacattattttattttgtttaagtagctcagccactcagatgttgacacgtcaggggcccttccaagtgcttaaacctcttaaacaaggggcgtctctctccaatattaggtattttgatttaattttaatcctataaaacctagagcccttgtttaaagtcccgtgttggacatgctctaagtactagatggttaataaagtattatgatgatgttatgttgaaaattttgcatgcatgcatgttatgttatgaagtagatgttatgtaaacaaaaaaaataaaaattactcaaacaaatgaatgaagagatacatcctatttttgaaaatgaggtaactggtcgagaactcaacatgaaatcatcctgaaaagcaattcgaaaccaaccaccacaaaatctaaacctattatcgcagatcataacccagtttattagcctcgtc

SEQ ID NO: 14704 - DNA, 645 bp, Arabidopsis thaliana landsberg
aggcctagatctgggtttcggtgatgtctctttcggtgtgactccatcacttcacccaccgtacaagtttttgatattcctaagtcaacgaagcctctttctccaagcttatcatataaacatcccatagagcaccactcatcaaaccagaaagatgttagatacccattattaacctccactcgataaaactgttttgctatacccctgtatttgagaatcttgtgccacatccatgagccccgagttgtgttgccttttatagaccagaacgagccatcacggattagatatttttgcacccagttcacccacaaagacccatgtgccgagaggatatgccatattagcttaaccatacataccttgtttgcttcgtctattgatcgcaaacccaatcctccttcctgttttggagtgcagacctccgaccaagcaactttagccttctttgggtttagagatggacccgaccatagaaacgctgaacagagtttatctatttccttgatgcatgcttttggaagacggaaagcggctatccaaaaattggtgaggctgaaagttaccgaacttaagagttgtagtcgatcagcaaacgatagcgtacgagtcgaccaggagctaatttgcgacttgatcttt

SEQ ID NO: 14705 - DNA, 331 bp, Arabidopsis thaliana landsberg
gccgccaggagcttctaagttctacacattataactagcatcaaaattacatttaacagttcttggtggtggtggtgtccatcgcttttgagcagcggcattggtttggggtcgtggagaactattgggttgtatcctggttgcatttagccattcctttgtctctgcttgtgcttttaaaactgttgtggaagaactttctctgaagtcattgaataccgaattgtttcgtgctttccaaattcgccatagtaaccaaaaggataggagcttctgagaatctgtcgaagtattgtcttgagttaaacttagcactgttgagatgttttcc

SEQ ID NO: 14706 - DNA, 997 bp, Arabidopsis thaliana landsberg
cggtctttattgttgtccaatttgtgttattgtgaaattcgcctatttaacctttttatagagatagaaaatttgttacaaaagtgacataaaatttgtagggagataaagaaaatttgacgttcaacttttgaaaagcataatcattagcctctgcttattatacaatggggatgatgatgatcatggtatcctaaagtagagttattggcattattatgtccaaacaaaggctgtaaaaacacaaaacgcagcgtttaatctatctgacaaatccactggcataaacgtacccaaatcagtattagggtccacttgtctctcaaaaaaaatcccgcgatatccgttagtaccaacaatattataatttccataattattatttctcatctctaataatttcttccaaatatttctcagtataactaaatttcttccatatttactaatttacagaatattctcataccttaaaacagaactgaaacataaatataaaagaatagaaccacatacagtatcaagaatcttcttcaaagccgtaattaacaatcaaaatccttaattaagaaaaaattaatcttacgtttagtaatcaggcatagattgactaatcttaccttcttcttcaacaatcttcttctcagtaatcctcaaccataaacaaacaccagtaaaactaatcatcaagctcgcgattccactcccaagtccaatcccaacaatggccatcacagacaaacctttactcttcatcatcatctcctgcaacggataaccatacaatcctttattccctataaacgaactcgcgttaaacctcgggaaattcccagtcctattcgacaaatacgtcggaatctgaccggaaagtttgttattcgacacatcaaacgccgagagcctcgctaatagacctaattgctgcggaatctgaccggataattcgttatcgtggagatcgattacgtttaagtaagcgcaaagagcgagctgc

SEQ ID NO: 14707 - DNA, 621 bp, Arabidopsis thaliana landsberg
tctaacgaaatagagtaatgaaacaagattacatatagcatacaaataactttttgcaactgaaggataagaactacacaagtgaaataatatggttaatttttgttgcagcctttatcaggtgattaaaaggtagttaacctctaaaactgaattatattgctccaacttattaatcattgggctggaatccactccaaatatgtgtcctgcatggtcctgcaaatattcaaaattcagtgaatcaaggagatgagtggcaagatgatgacgaaaaaaaagatgtaattgtccgcataccacgccgagaaaatgcgcaattagaacatcccaatcatctttgaaaagggttgggaataggtgctcaatgcatccattgtcaacctacaaacgcacaacaacccgtatcatatataaaagtctacacaaacaagctacctcagaaacaaacataatgtagaaaagcaaaacatgaatcacttacagtatccaggtctttaacattgaaagaggggaaaggatatgacttttgaaattgatttgggaacaactgtgtccaagtatcatcacccatcatcaccaaccgtttcccatttagcactaactatgcatagagagaac

SEQ ID NO: 14708 - DNA, 764 bp, Arabidopsis thaliana landsberg
gtttctcgagcgactagggagaaccttgcattgtcatcattcaagttcaaatctgcattatacattgtttaaataaattcatatggaaattcaaagaaaaatacataataccttcgtacattgtagtggggtaccggggatgttcgaacttgggttatggggtgtaaatgacactagatttaccaacttagctactatctctttaataaatttcgtgcattaaattgtatttgtagatttaacctgggtcaactgactcatcttctccatgaatgtgtccgccactgatacattgtaatttcatcaaattgttaattttgtctattgttttgattaaactaagagaaattttgagttaaataaaaaaaaacgtattttcggataaatttatatccatagtatttgttctctctaaaaaaaactttctgcaattaagaatttttgaaattgaaaaacaaaatcgaaccataatctcactgttttcgaatatgtcaattcaaattaaacactgttttaatagttaaaaggaaaaggggagacattaggaaagtacatagcccatgatttgaaactgatctttaatttcctctttatcaatttttcaaactggttatacgtatatagataaacgtaaatttttaatttaacaatatacataaacacattaaacttatagctctaagaacaaacgatcaagatttaatttgtagttattgtgtcattcccaaacttatgaaaacgtgtgatagtgggtgtttaaaggt

SEQ ID NO: 14709 - DNA, 617 bp, Arabidopsis thaliana landsberg
ttacgtctcctcactgctctagcaaacgccattttcttatatgttaatcagttctctgcatccaaaaacaaaaatcctcaatttgataagtataaaattccttcctttagatcatcaagaaacaaattctgaacttgagataatcaaacgcaagtcttaactaattaaaccctaaaagaagagattaacttgactagaaatagatcgacgtgaaacgagatcgaaatagcttgggaatggagcttacccggcgatgaaagttgtttggttactgtgataacgacggtgatggtttttgtaaaatacgactgaaattggaaaagggtttaagtttataagtatgggcccattgatggcccattaagagttcgataaaatagttgtttttgcagaaacttttagtttagggtttatgatcatggagaaaaagcttcccctaccaatttgcggacaagaagctgtgaatcttctcaattgtgtttcggaatcgaaattcgatcaagagaaatgtctaattctactgcaatctctctgagaatgtgttctatctaaggtttgttcttttttttttccaacattttctcaattggagttttcgaacaattgtttttccatat

SEQ ID NO: 14710 - DNA, 392 bp, Arabidopsis thaliana landsberg
gtctgtcatggcatgaccttagtatctctccccgaacctgagaaacagagcacttgttccacgattgtgacgtacagtatattcagctcgcaccataccgagtttcacacccaaaccatacgatgaaccatgtcccattttcctgtaaagccctgttggattccctttcacatcctttgaacttcccaaatcgtttccatgctcagcaaatgcatacacatgtgtgttcttgacaggaattctaatctcagcaccaagctatatacaattagcaacataccaaaaaaaaactatatacaattagcattatcagattttataaactgaaagaccaaaacaaaagcatgtttttcgtaattatatttaacctcgagaatgtttttagctgcacc

SEQ ID NO: 14711 - DNA, 575 bp, Arabidopsis thaliana landsberg
ttttaagggttagtttaaactaaattaaaaaaacctagtttaaacagagtaatttggtgtgtgaatattttatttttgttttctttgccgtttatggaagtgattaatacatgttctgatgaaactcagcactacttctcgccaattagccatcaaataacaaagcaaaggagacttttgtttgtatactcaattaaaatatttattctgttcattggtgacccttaggccttagtggttatcatgttatgttaaactctgacatctttgtaagtcttacttacaagttacaagttacttacaaccctgaaaaagacagattacagatatatctttgagttgcaacttaatttgtaatctgtctttttcaatttttttaattagtccaagatatactttgatcatctccatttcctttcctcggaaccctttgatctgtaacttcttcactggaaaagatttataacaacctttgtccttgtggaaaattcagtcacaagctttccctcatttattcatcacattgtgttagagacctctgtatcagaaaggcttgtttctcgatttgttttaga

SEQ ID NO: 14712 - DNA, 941 bp, Arabidopsis thaliana landsberg
gcttagcttcttgtagataacactaataaagttcatcaacctctcaagtagcacatgcttcacctagatttaatttcacataaaataccacaattgttatataaagaaagacattgttaaggcatatgcactttaataaattgcatatttggcattttatactcaaaactatcttatatttctttcattgctcacagagttgattagaagctcaaacggacatttccagaaaataatcaaaacgggacactctgaatcagatcttcatttaaattaccaaacaaaactatgctcttaatgatgatagggatctttgaatctttactggcatttataatagctcacaagatactatgagcatacctgtgagcaaagaaactccttataagaggcaagctctcgaagtgcatttatgaatttggatataacgggccctggtgtcactcaaaataataagaatcaaataagttaaatcatagcaaatagagtcatattcaacaaatgagcaagaccacagacctccaattgaaagactgataggatcatcaggtccacccccaaattcttccagacaagctgcaaaagcactttctcctttagatgcctctcccaaagtccccctagaaagcaaagtaaatttcattcgtatcagcaaccaataacatgtctggccacatagatacaatgacaaaagtgcagtagcaacaaaacaatgttacgatgttaacttatcacataatctaagatttacatgagaatggtaaaacaatcgagaaagctttaatggtcaatccacatttgctaattaagtaaaagacgatacaaattggtaattccaacttccactttcagaatatatgtcactctcagaaaacattccacaattgatactctaagaatcttcagtcaacagaaagatcagagtgaaacagtagaaagaa

SEQ ID NO: 14713 - DNA, 706 bp, Arabidopsis thaliana landsberg
ggtgtattctttattaagctccagcgctccaagtatcaacacctgattctcggatctcactctactcttttttcttcattgctcacctcccaaaccatgctgagcactttgtattcatcatgaacaggatcgtgtccaacatagaacacattgttatcattattgcctttcataacgggtaattccacaacctgtcttgtgttgaggttacaaattcgtactcttctccaatttctgtacagagctcacgaagcggccaccctctattgtcggaatggtcagatcttggccgattacagagaccgatgtgtccgagtgatcatgattcgaagatgtgtgcaacgcatacttgctatgtttttcgctctccacaaaataggtgagataacgacttcgtggtgagggtttaaggaatcagttggtcatatctgataagaatctcgatcaacagttcctcccgtaaggcggcgctcatgatcagctcctccttctctttctttttcctcacgtatttttgtgtttacaaacctaaatcatatctttctcttttttttaagaacaatatcacctaggggtgaacttattttacccaatcagaagccgccacctaatcaaaaaactaaatacatttaattataaaatctaaatcttaaatttcttttataaccaaatcaatatataattgcttgtaattacaaaatctaca

SEQ ID NO: 14714 - DNA, 631 bp, Arabidopsis thaliana landsberg
aagtggaggagaacttttgtttcagttagaaggttcgacgtgacaaatggtgtctgctgtggcaaggctttgggcttttcatttgttaaggcccttatttggtgacttgatcttattttgtgaatgttcaggctgaagcttgtgtcattataatctcacagctatgtctaacatcaaatgatcaaaattatcaatatcacagcaacaaattattccataagacattgaagaggaatcatcacaatgcagaaaaaacttgggatctgggtcacatgctcagctatttttattcaaagcacttaaataaacatttgaaaagaagagaaaaactaaaacaaccaaacacacctctctttgtaagtttgtgtaattcatcatcagcagcagcacaatgcggtataagtggaatcatcaggccttgacggtttcttctgcagcagcagcattagtctttgcttgcttctccttgtagtctctgaccgcggacttgatagcgtcctctgcaagcatactgcaatgtagctttaccggtggcaacctaagatgcttagcgatttccctgcaaatttaagaatcccaaaacaatgactcattcatcaaaatgtttaccatatcactagatgtgggatat

SEQ ID NO: 14715 - DNA, 492 bp, Arabidopsis thaliana landsberg
aaaggctgaccttaaaggtaaaacaaagtttcgggaatcattaaatagttgtgattagctcgtgtttctaaggcttctcgtgttttttttttttttgttttttttgaggttatgacgacaaatccgaaaaactattgcgttaggcctaattatggacttattcttccaaagtcgacttgtaaagtccgttctcaaatctttttcttgtggaaacttttttttttcccttcaactgccaaacttgttcttggactaggaatttgatgaatctttgtttggtgtttatctagtaaccatgcaagctcaaaaggaagcccggcccatctgatatgcagagcaatgaaaagtttatgattcaaagagtaaaagctagtcctgcagtcacagccaaagaagttactcttgagacggcactgatcactcacattgttgatttgatgaataattcaaaatttggtttttgattccttaaagcatttgtttcattttcct

SEQ ID NO: 14716 - DNA, 442 bp, Arabidopsis thaliana landsberg
ccatccatacagatctttggatgaaacaatctgaatttgcaactcttactgggaaaacaaagaatgacgaatcatggcaaaattttagagtgaacacataacacataaattcaaaagcttacttgaacttcgttccttttaacagtctcgagagaatcatcacgataacccgttatcccttcatcaatagacaaaagaaaaagatcgagtccgtaactgtgacgtctgtttagttctgataacacatatgccagcactgaagaatctgcaccatcacaaacttttgagttatggcgcaaacatcaaactaaaacagagtgattcgtaaaaatttgaactttgaagcgaaaccatcattggagtgtaaagaaattaccttttccaccggaggcacctatagcaactcgttcaccgaacttaaacaaacgattcccaacaatga

SEQ ID NO: 14717 - DNA, 601 bp, Arabidopsis thaliana landsberg
attttatcctatattttattgctataataatttaattttctcaatgattaatatcgtttctgaaattttgggatattatttgggtccacttgcaacgggtcatatccaaataaatatagtatcctatttatcactacgattcatatttattatttcattatgaaatattggcttggtcttttttttcggcttttgtgtttcttatattattttcacaattaatatgaaaaaaatgaaaaatcggattcgagagagagaggcaaagcccaaggcagaaaaggacatgaaacaaccaacatttaattttctcatatagtaatcgacatgtcaacgtgttgtttttatcacatccacattatcatcatgtaactctcaatctttcacatttcttacgtagttaacaaaataaaataaaataaaattgaccacagtatatgtatactttctagtgtagtggttactggttaattagtagagtgattttggtttaatttgtagaagtggtaactgtacaaaaactgtgtccaagatagatttttttaactccagtggattgttgatatctagtaatccctgttcttctcataactcttctttatct

SEQ ID NO: 14718 - DNA, 567 bp, Arabidopsis thaliana landsberg
gaatccataccttctttttggtcttgcttacttcttcctcctcatcttcgtcgtcttcttcctcatcttcgtcttcatcttcttcatcctcatcttcatcctcatcgatatcatcttcatcgtcattgtctatttcaaactcctctccctcaatagcctcaccagtaaaccatgagacagcatgaggtatgatcttctcccggattgtagaactgcaagaagcaaggaatacttgaatcagatactaaataatgtattaactttccgataaaagatgctagctagagctcttatacagttggtaataagttagacggaatatattaaattgacagagtttatgttcaagaagacgaacccaatgtcataatcttgttccatcagattctgaagttcctcggcctgcaccaagaacagaaaacattactacaaaagtataatcaaacatagtcaaaatagggcctgtcttaaaaccaaatgatatcatactctttcttcgtcaatgtcttcatcatcatcaggaacttgtggaggattgaagaagttaagaagcttcacaatttcagt

SEQ ID NO: 14719 - DNA, 562 bp, Arabidopsis thaliana landsberg
aatctaacaatttactattcaaaaaagattcatacacatagaattcagctatagaagaatcaaagacaaaggtgatcaaggaatggtacttacagatttctcgtagcgatcacgttctgtagcagtgcaaacctcagatgaacaagatagtctatgctcagccttccagtaaatatctgaatgaaatcaaaaccaaataagcaaaagcacacaaaggtaccaaatccacagaatcactcgcggctcaaaaccctaactatacatattccgactacgaaatagatagatagagcgagagagaggagaggaggttaccgaggagctgaaatccggcgaaggcgacgatggaagcagcaggttggagaatcaatgagacaagctgaactacacgtttcttaagaagcatagggtaagggagagtcaacacgagggtgattactacttcgacggccaccacatacgatagaatcagccattgcaacgccattgttgatcgtcattttctggatctctctctctctctatctctattccgtgtgaagtagacgaagaataataatag

SEQ ID NO: 14720 - DNA, 706 bp, Arabidopsis thaliana landsberg
agtttctctgagttttggtgatagatcagattaacaggcagagttttgagaatgtcgacagtgggaaattcaacgaacatattttggcaagaatcccccattgggaaaactgaaaggcagaagttgttaaatcagaagggttgtgtggtgtggatcacagggctcagtggctcaggtcaatcttctaaaaaatcttaaattcttttcccattgtgatacttacttaagatgccttctttatatctctgtctatattctaaaatcttagcctcaaactttgtgcagggaaaagcacgttagcttgctcgcttagtagagagctgaacaaccggggaaagctatcatatattcttgatggtgacaatcttcgtcatggtttgaacaaagatcttggtttcaaggcagaggatagagtggaaaatatacgcagggtcggtaagtagtacatagttgcttattatcttttgctttcagttgatgaaagtctgattccgaagaaactcactaatacaaatgcaaatcctttaaaaaggtgactcatatgtagtgatagtttacatggtaccaataccttattgatatacatatgggtagacacctaaaagctgaaagattctgggtaatgtagaaagaaaccctcctaaagggcaaaatactaaagaagaccaacaatctggtctaaaagcaggagaagcagccaaaccct

SEQ ID NO: 14721 - DNA, 632 bp, Arabidopsis thaliana landsberg
gatgagttctgcacctagttgacctccgcttttggagttgatgtattcgaggattgggttctcaggtgcagttgtacaactgatttgcgcctcaggctcgtcttcaggcgagagaacgtacgaaggtatgaagaatttcttaaggaaatctgataaattcttgtatttttccatatgactgaaccattcacatatcaacactcatcaagtattcatatttaagattaatcaaataacaaatatataaaatcgacatcgttaatcatgcaaaagacgatcgaagtagacatcataccatgaaatctctcaaggggttgaaagataaagtttactatattatcgtgtcttgaaaaagtaattagatttaaataatggagatcctgaagattttataactttttgttaatggtattgctataccaagactaattaggagttagaacaaggttaaaggcacaatgttgattttcctttttcttttatatagataaaaacactagtactcttaaatggtctttatgcacatgaaaacgtgatctttaacatgcatatctaattagtaattactgctttttttgtttgtcaaaaattacagtcttttttcattaccttttttggtaaagggatttata

SEQ ID NO: 14722 - DNA, 587 bp, Arabidopsis thaliana landsberg
aactccgttgcatactattagtgattctgagaaatcttcttatgttgctcatatcaataattatctctctggagatgagtttctaaacaagtgccttccgattaatccgtcttcgaatgatctatttgaagttgcaaaagatggtgttttgctttggtaagcttctcccctcagattattgaattgtttttactttgatgatagagattctgaatttgtttctggtgtgatgtagtaagcttataaatgtggcggttcctggaacaatcgacgaacgagcgattaatactaagagtatgcttaatccatgggagagaaatgaaaatcatacgctttgtcttaactctgccaaggctattgggtgtactgtggttaatataggaacgcaagatatcattgaaggaagggtatgtgaatcaagtgactttgtcatcagtaatcttgaaattttggtgatggttatgactaacatttctctgtttctctaattgcagcgtcatcttgtgctcggtgtgatctctcatatcattaaggtgaggctataatgtctagataccgctaatatgttttgctaataatgaatgtgt

SEQ ID NO: 14723 - DNA, 908 bp, Arabidopsis thaliana landsberg
ttcgtatattattcgatatctgtggttgtctgacaaaagatgagatttcttattgcagattgttctgatacattatggggaggacgttttacacattgtcactcaccgaatttacttgctttttgatgaagcaaagaacccaaatctagatcaagcgaggagatgtttttaaatcaaaatcactcactcgttgctcaaacttcgaatgatatacgaaagcataccgccatgattatagtatgttagttccacttgatcaattccaatcaaccaagtcagaccattaaatatatggtgacaatcaaatctaaacaaaagcttttgtgattacctctgtgtctaaccgcaaagtgcagacaaaagatttagcagtgtcagtagtcacagttatgtcctggcctggttttatctcattgatattactaggaaggtggattgtgtagagttcatggccaattagtccaagggtttctgcatcttcaccggacttgaaggccattaaccccaattcctgtcgaattcaagctgcatcacaaatttggacaggtttctctatgcagaaatttaggagagttactatggaataagctatttaatcctacttaagtcataaattatggccaacagcgaaagattcgtcacattacaacagcatagcgatgaagtcattttgtaaaccagtggatcactcccaagacgcctcactgcattcctcatagaaacaagatcaaatttagccatgaaccaaaaaaacagaaagcaagaaaaggtaaaacaaaagttagtataaaattgggaaaagaaaggactctaccaactgcctttaaagtaatcatttggcatcttggggatgggatctcaactttcttaaggtcaatcaacatacccaatccaagaacacaaaagac

SEQ ID NO: 14724 - DNA, 666 bp, Arabidopsis thaliana landsberg
aaacgcgcaaaaaaactgctaaactcaaaagcatcctctgacactaacccctctcaaactttgtttctcaggttttgcaacttgtctcctccttacctgactactttccttggtcgtagtcgtagccatcggataatcttcattatccgattcttcgataatctttttcaatctttccactacaatttccatcgtaggtcgctctttgtcgttctttttcaggcaaagatcagccaatttagccaaactcctagctccagcagctggataattgttgcgtaaccgagggtcaacgatcatgctgaaacgttgactatcagcaggatactctttgacccaatccaatagccttcgttcagccactggcttgttcctctcaatggttctgcgtccggttatgatctcgtagagcacaacaccgaagctatagacgtcgctctttaaccgaagatgacctgtttgcacgtattccggagccgcatagccgtgtgttccaactctctatacatagaaagaagaagaactgttaaaactttgtaacagattcatcactttaaagtacgagtgagcttataaaatgcacatttatatatcaaaccaaacttactgcggtagtgacatgagtattgtcgccatcaggtccttctctgcaagcccaaagtccga

SEQ ID NO: 14725 - DNA, 489 bp, Arabidopsis thaliana landsberg
ctttagagcaggtggcatcatgttgatcttctctttcaattccccatggagaaacgcttttttgacatccagttgctccagttcaagattttcttgagccactattgaaagtaggatccggatttaaacttgtttcactaccggtgcaaagatctcatgatagtccacaccttttctttgagcataccttttggcgacaagtcttgccttgaaccttggttcttcaactctaggaatacctctcttatacttgtatatccatctgctcccaatgattctttgtttctcaggtcttgtgactatagtccaagtatcattcttcagttgagactcagtttcctcattcatagcaagtttccacttgtcccagttttcatctctaacagcttctttgtaatctgccggttctactgcatcaccatcttctgatgtgtatagagcttctacaaaatagtcctcatcatcaaatcttcttggtgctctgattac

SEQ ID NO: 14726 - DNA, 559 bp, Arabidopsis thaliana landsberg
tttattctttagctgggcactaaactcgtttccaattatttgcatcgtggttgttttgatttacaagctacaaaggatcaaacaaatatggttttgcatctaatcaatccattataacgtaccagtaccaaatcacatcccctaatcttaattatgttcttaagagtgttcaacagttgtctatatatctcatataataataccaatgtgttatccaaaatgtgattttgttttgatttcaaaatacaaatgattttactatgtgggcatagatcaataccctagtgagacctaacaatgcacaagatatattttgctttgatttcaaaacatatatggtttcacccggtcatatcttaagtttagtaaattataaaccttaaaaaaaaaattgacaatatatcacatccaaagaaatactacatggaaaaagacctgaaatggggagcgacattcaaatgaagaaagagttggagtttgtacttcttcaaagacgactataaaagcttttagggttcgatagttgtataagtgggattgtgattttccccccccgtaa

SEQ ID NO: 14727 - DNA, 687 bp, Arabidopsis thaliana landsberg
caaccccctagatcctgtaagagtaaatacatagaaactttgttatatcaccaccatctgtgaaataaccaaagatatgatgctaaattacctttccaagtctccagcaatgttttcaaatgcttgatttgctttttttggactcttaaaaacaacaatcgcgctatagtagtgacggtcttgttttttcgacggctgccaaaagaaaatcaagaaacaacgagagcctcataaaatacagaatttggataagaaaatgtatatgttgagtggattcataccttaacttcatgtgggatatccctggaaacgactccatttaactcttcatatggaacattgcaagggattctatgaaggtagagctttgacttctcagcttccaacatctatatggaattatgcagacaaaacgttatgcttttataagtttagattgaactaatgaagtttgtgcaatccaacttacctctttagatagtggaacggaggtctctgctccattatctagtatagcaagtacaagtttcattgcagcttctgcattatgaacacaattgtgtggaacaccttctttctgcacttcatattccaatatacactggaaatcaaatcaaataaacaatgtgatacatcgggcatgttcatacgagaattcatttctcatgagcagaggggttgagcttt

SEQ ID NO: 14728 - DNA, 584 bp, Arabidopsis thaliana landsberg
ccaagcaaacacatgctaaatatagatgtcatactactatgtgatgatcatataagactttacctcgagattaagagggatgcctttaccagaccactccttctgccattgctgaatcagctcatgagctgctttagtattcctcaccgccataacaacacgagcaccagcttctgcaagctgcctacaaattcacacaataacaagtaaaatcttacattcctcttgttcccaatccttaaatcaaaccaacacgaattcaatcaaacctagcggtttcgcgaccaatgccactagtggagccagtgacaatgcaggtgaggtgattcagtgaaggtagaggaagtggattctgtagatgagaagccatgaatctctggaagagaaactcgtggaacacacaactccatcctctgattgactctatccatcccaaaccttccttcttcttcttcatcttcttcgtcaacgacgacgtttcactgctcatcttcttcttccttcttgagatgattgatgagagatctgtttcagagaaaagacaaaaacagtatttgcgtgattaaagatttgattatttcatt

SEQ ID NO: 14729 - DNA, 526 bp, Arabidopsis thaliana landsberg
  unsure (1)..(526): unsure at all n locations
cggattaatgtctccagacgggaaataatcacaaaaatattttgaaacaaatctttgactaccttttaataccatatcttattaatcatcacaatatttgaaaattttatatattattaaataattatattagttgcatcatgtttaaataacattactagattgatatttcttgatgatttttgctgttaaaaactaaatttgctagctaaacattttatcctattttattgttttgatgttaccactctataaatatttggactatagttctacatatgtcaatcagtagtgataatacatgtagtaaataagaaaaacggntataatctctatcttcaatccattcagattttttttataatgttcatgcattaaagcttgatttggaagtttatattttcttgtattaaaataaagataccctatataacaaatatttgtaccttctcagtactacataatactacacattaacaattctcaaaatatacaaaaaaacattttaatgacgagaaataaaatg

SEQ ID NO: 14730 - DNA, 992 bp, Arabidopsis thaliana landsberg
tttgacatagaaataactcaatgcctactccacctcgaaccatacacagtttatgtaaatttaaactctacataactaatcagcttacacacctcaatccaacatcagcttaaaccacaccatactcgattcggattcagatcacaacaaaatcaaattgaaaaatgaacacatataagttataacatagatatacctgtaagatcacggtcaagataatttgagtccaaatttatatatagaagctcatatagtaaatgagttgagcttagctagttcatgaaatatctgaattcattacgagctaagttgaattgagcgagatagagtattttgatacttcgtagattatatacatgcatccataagaaaacaaaagaagattttacgatggagatcgtgactcacaccatgtcacatgtgaagtgtagttgacataacaaaataataaagaagaataagaaaaaagaaagacaatatagaaattggcattatagaaattggccccatcaaataattagacaaccgcaaaccaaaactaaagctgctctcgatatgaaatccaacctaataatcacagttattgttacccttacccatgtttatatctttcatatgtgtatatgcacataaaagttcacgtttatgatttagcctatagaattgagtgaactgccaaacaataaattgtcggtttggtacaacaacaaaagagagagaaactaaatttcccctgattgggtaactgaatttcctgtgtgcatgacccatagtaagttttattttatttgttgcctcagtctggcccttgataatttggatttatggcaaatattgttttttttattaacttagcatacctatttcttctttgatcaaaaaaaaaaaaaagcatacctatttcttacgtgagatagtttaacaaatgtgatgtatttgataagagaaaaaatattgaatatgataactgaaaaatattgaactaatttgat

SEQ ID NO: 14731 - DNA, 883 bp, Arabidopsis thaliana landsberg
gtaagaaaaccaactacaatctctgaatcgacctcgagttctagcctttgaactcccttttcccatgtaatgttcatcccataatatacttcctaaaggtctggttaccagagcaaagcttatcccaaggttgagtgaaaaacacttgcaccagtcttctgcctcattcctcattactcccctcacagctgctagcccagtattccctcttgaagcaccacccacatatttagctttatccatccattacatggtcagatccaaaaacttaaacgttctgtcctgcccaaaaaaagcatttcttcttttttttttttttgtcgaccaaattcatttatttgcccaaggggaaacatacagagggtccaagaagagtacaagcgaattaaacggcccaaactaaaaacataattaacattaacatatcatgataattatgagttagcatatgacacgtggagaagacgtatttcccttgaaaccacgcgtcttttcatgaagcaccaccgtctgtaattcgccgctcatctcccaagcgctgattagccgtcgcgtgtcagccctagaacgctggggtcttcattccttctgccgatcttcaatcatgtatgagatagcaccgaaatctaccgggtttagatgaaatcgctttaaaatttctccgggaagcaccaactccggggaggctccaccaccagctacacccaatttgatgtagactaagatccttcgttgctcatcgattttgagcaaaaagagagtgacgaagatattattcctcgagcaattggagatatcggagagaagttggaagacaatcgaagacttcgatgattaaaaccaaagaggataagaagatctaaactcgctataagcgagaaag

SEQ ID NO: 14732 - DNA, 532 bp, Arabidopsis thaliana landsberg
caaagtctattatagcttcactgtttaatttctgactctgagaaaatacttgattcattttaccaacctgctccaacaagttcaaatttgagactatactgctcatctgttcttgtctcacgttcttagaaccttttccgccaagactcatgctgtcatatgaacccctcaagacacctgtagctgcatattgacttttcccaggacccttccttttcagaacaggaagtatatactgtttgggttgctttgatttctctgactcattttgcttggaagcaaaaaaagtggcatctggaggagcaccttctcccaagagatgtagttgctcaaaacgggaaacacaagttagtatatgctcccaggcatcttgcaaatagttgccctcttcatcagcaagtctgagaatcgcctggagaacaaccaatattaatttgggatccagacaattttagaggggaaaaggcgacagttagatcaggaaggaaataacatcgagataaaaagtgacaaggaatggactgagaacgag

SEQ ID NO: 14733 - DNA, 644 bp, Arabidopsis thaliana landsberg
tacatacaacgcgcatctggctcaagtccaacaaaacactccgcagccaacttcattttttggaaaaatgacacaggtatcgaggaaatggaaacaaattcttgtcttggtgtagctccatgtagcttgatttttctagctctaaaatcttatgttattccagaatcttccatagcactccaaacttatgtatcgagggttactacaaatgtgatttttttagggttttcgttcaacctcttccccgaatctttcaactgatgtggtgcagcaagtagatgctagatatcctgctttactttttaaacagcagcttacggcctatgttgaaacaatgtatggaataatccgagagaatgttaagagagaagtatcgtcactgctttcttcctgcattcaggtatacctttggtcacccgacctcgtttgagaatccatcagcttcgaagataggtttgtttcattttaaatgattctcttctaatgattcagagtctgaaggaatcatcatgcgattcctctgttgtgaattcaccgtcaaagtcatctgaagagaatctcccggctaagtcatctgaagagaatttcccaaagaagtcatctgaagagaattcaccgaaggagtcatcgggagataagtcacc

SEQ ID NO: 14734 - DNA, 823 bp, Arabidopsis thaliana landsberg
  unsure (1)..(823): unsure at all n locations
ataggaaaatatatcagaattttgtaaatatattagaacatttttatttttttattaatataatttcgaaaagttaagggtaaattgggttagaaaatcttaagaaaatctatttgactaatctaaaaaaaaaggaatagatggacaatttattttgtagatatcctttagatttaattttcccaaaatattttagtctccttaaaaaattccaaacattatacagagactgaaactcataaagcctagaatattccaagcaaaccccaagttatgtatacagtcggtaccgtgacaagcggaaagcaatgatacctaaagtatgaggttccaagaatttgaatagaaccaaaataccctatatgtaatacttgaattgtggactccaaacttgtcttcctcaaaccaaaataaaaagaattaattgaagtcaactttacatgaaacatacttttattagattcagttgagaacttttttttttttgtgtgtgattctttacgtttgactggagatgatatagagtcgttcgttttctcaaagttttcaaagttagaaaacaaaacaaaaatcgtcgaatttgaaccctagattatgcctatacatacataatccattaatctacatacctgttttgtaatcagaccggttgggcctaaacaatccttggacttggcttaatacgttaatgattttataagttgtaacattgctttttttaacaacaagtaatactataccagaagcgttcatacggtcaactcaacatgtctnttttttcttttctctaacatattgatacatacagagtttgaccggttag

SEQ ID NO: 14735 - DNA, 117 bp, Arabidopsis thaliana landsberg
tttgttcgcggatgggctcttttacccggaggagagattccttttaagttcgatcaccaagtcagaggaaatggtttgactattcctcattctacttccaacagatttaaggcttgc

SEQ ID NO: 14736 - DNA, 554 bp, Arabidopsis thaliana landsberg
ttctcccatcgagtattagacatattttttaccgtaaaagatgtaacattcttaagtaaaatactccatcttttggtagagcctgtaaatatagtatgtatgcgttgcaaattccaaaaaaaagatacaactttcaagcaagaatgtgccatgtcactaacaacaatattcaagctatgacaagtacaaggtagaaacaatgcttccggattaatttctagcaatcgcttttaaactctttgatgttttcctttcatattagaaccattatcataaccttgtcctctcacattctcaatatcaaaatcaagcgacttaagagcattttgtaattctttaaagaggtctagtcccgatgtatcatctacctttaagaactctaagaaatacttttctattcttatttttccacttgacatattcacacatcatactattatactcatttgtttttgatgactaatgtcaagtgtataatcaaagaaaatagagaagtattttgcctctttaataatacaggggatagaaagtccaaccttataagcaagaagaga

SEQ ID NO: 14737 - DNA, 769 bp, Arabidopsis thaliana landsberg
catcttgcagtgcatcgttgttgtttagcaaaattagtgtctgtaaatgataattctggacatgaaaaattaaggttgttcttgaaatatgatcaaagaaatggacgctcatgatatacacatatagtgtgcaaaggctgttcgcgatactcttagtttcattcaggtcctataatattagaacgtaagaatgcaataaaaaatagctttcgttatataatggttttgaggagccaactccctatactcgtgaagattattactcttccttgaatctattctccgttgcctccaagcgctgcaggtctttgttgaatttgcagatgcggtagatgcacctgtcaatgaataaaagagatatcaataaacctacgcgagaccctgtctgtgagtgactgataatagctgatgatgttacaacttaccagtagagtagaattcctgcagcgcatagaaccacgttcctctgagccttgtagatctgtggtacaatgcaaacgcacaactcgttagcaagcatgctgagacatttcagggaaagagaaggaactaaggggtgaattaaatatccaagcgttcgattttcagtttttcactatgtataattgattctggcgagtcgcaactgcatacccaaaaaggtttgaatacagtgcatgtgcagaaaactgagggatgaactaaacatccaagagtggggatgaagcttcaccaaggatcatttgtcaacagttcacctgagcacagtagaaactggactatgaatgac

SEQ ID NO: 14738 - DNA, 763 bp, Arabidopsis thaliana landsberg
ggcacccctgaatcctgaaaaccaaacacaaaaaaaaaaaaaaaaaagttattttttcacttttaattattattggaccatttcaaaacaaatcaaaagattctataataccgtctctttgtatccaataacgttctcaaatgcttgatttgcttctactgagcttccaaagataacaactgcacaataataacctccctgtgtttttgctggctgccaaaaaaaaaaaaaaccgtatatcaaaaaaaaaaagttaagatttagagaaaagaaatagatatatggtttaaactcaaccttaacatcaattgtaaagtttttgggaaaaaactttagagcaagatctttcttcagctcttcagatgacagatggtgagggattcgatgtagaaagagtcttgatttctcggcctccaccatctattcaaaaaacttgtaaacattgtaattgtaatttatcataaacaagttagctaggtaaatatttgttgtcacctctttagttaatgtgattgttgtgtcaactcttttctctataacagcaagtgcaagtttcatcgcagcggctgcatcgtgtacgcagtgatgagaaacaccggccttttggacttcgtatcccaacacagactggaaatttatttatttttagaaagtatatattaagaatgttaacatttttatgtgaatacctcaagagtagatatagacttaccatgcaaagggtattaagagaaggtcttcttagctttcgatggattagggt

SEQ ID NO: 14739 - DNA, 612 bp, Arabidopsis thaliana landsberg
taatgcggataaactacttagtttattttattatatagcattttttttgtcaacctgttttattcgattatacaatggaaccagtaatagggataaaacaaattttgttgacagatcaagctagagtctcgtctctctgatcttaaaatcagctagctcagtgaatggttcaactctaattttccttctgttaatctgatctatcacggagaagtccatgattgctcttacaagttacatctcaagatcagattcttgaggcttattgggctcttcttctttggatacggtacttcttggttcaagatgaggcttttagtgggctaattttgataagtttatctattgtcaacgacaattagcaaactagtcagtttttagaacatatttaaaaagttaatcattttactatttataatttgtaaagtagtcatttttactgtttaattcgtacatttcgatatgtacaacacttttagtgtatatatgtatataaatatacagagtacacttacatctatacactaaaaatgttgtacaaatctaaatgtacaaattaaacagtgaaaagtgaatactttgcaaattgtgaattgtaaaatgactagtcgt

SEQ ID NO: 14740 - DNA, 713 bp, Arabidopsis thaliana landsberg
aagatgatggagatgaatcaatgtcgttttgtaggattctcttaggactaagttttttggtttttccttcttcagcttcaccacctctcattataagttcttttaaccgcttcacatcagctaatttcaccggttttagcaaaaactcctctgctccttctatcatacatctacaaaaacaacaacaacaaaagagaggatagacacataattagattacagtgttaagatccattgattcagttttgtatcttttaactatagtgacttactgttctatacgaggttgtatgttctcagaagacattatcactactgggatttctcggagtgctgaagactcctggtaaatatacaacagaatttttgtaaggaaagcacgagaagagcttattcaaatcttgctctaataaatgacacaaaatagaaatttactttgatcttcttgaggagttcatatcctgttagtcccggcatagaataatccgtcactatcaagttcactttcaaatcctgttatcaaaatttgcaaaattgttcatataaacgacatcaataaacagataataaaatcatcctcttaaaggttaaactttcgatccacattgtgaaaccttagatttcttgggagccaaaccagcataagaacacttcacgtttcaaccactagggttgattttgctagaaaacagagtgattctcaagaatgaatg

SEQ ID NO: 14741 - DNA, 1107 bp, Arabidopsis thaliana landsberg
cgagtgagagatagaggtggaacacgcataagtttctcatcctccaactccagtggaagcttcggcggcatcgttattttctttcggccacagaagacgaaacctaatttctagcaaggtttaactttgcttcattgtatttactattactattagttaaaacaaaatttgacttattataattacttacttatatttttccactattaacacattggatccgaaatttgtttccataaagtgaggtttcacaaaaactcaccaaaaaaataatctgagttattataatttttccccattattattttatttacactttgagtccaaaatttataaatttcttaattattgcaagaaagaaaaactgagttattaatttacaaatatccttttgacaattgttgatcaaaactcagccgggacaaaaatatctctttcttcttttgtctgattttaatttggtgatacaatttaatttttgcattactataaaatctaaccaacatgtaaaaatgtcatataattaagtacattcacacacttgtgacttataaaatagctagaggtttgattcttcttataaaaataaaactctggggcacacaatctccgggatattctacacaccaaaaaacagatattcgagatcttctagtgttagttgaatcgcagaacttttgccatgtttttcacccaatgcagatgcaacaatgttccttttacgttcctgaaataaaaataacaatagagtggagtgagtcgtgtacactatacaaagaaaaagatcttgatagctttggcctttggaacaaaaacacaattaaatacctgaagagtcaaaattcgttcctcaacggtatttttgatggcaatacgagtaaccgtaacagcccgagtttgtccgatacgatgagctcgatcaatagcttgatcctctgttgttggattccaccataggtcccagtgaatgacatgacttgcagctaccatattcaatccaaggtttccagcttttagagacattaacatcacttgcacctggttcataatcattacatttgtctttgagaaacgtaaaaatgaaattttttgaatgcaaaacatata

SEQ ID NO: 14742 - DNA, 736 bp, Arabidopsis thaliana landsberg
agtatcacttataatgtactcattacgcatgaaacattacactatttgaagacatcttatgcaaattttagatgttttatggcagttaagactgacatgagtaaagcgtatgatcgcattgagtgggacttcatcaaagtggttatggaaagaatgggttttcatcagaagtggatacagtggattatgcagtgtattactacagtatcttactctttccttctgaatggatcagcacagggcaagctaactcctcagaggggaatcagagaaggagatccattatccccatacatttttattctttgcagtgaagtactatctggtttgtgcctaaatgctcaaagtgaaagacgattacctggaattagagtctctaaaggaagtcctagagtcaatcatcttcttttcgccgatgacacgatgttcatctgtcgatcagatattaaaagctgcactgagttgatgtctatcctgcagaaatatgaaactgcttctggtcagaagattaataagttgaagtcagttattactttctcgaaaaatacggatgataacacaaaggaaaaggcaaaatagattcttggtatatcacaggctggaggtttgggaaaatatcttggtctccctgagatgtttggacgtaaaaagagagatcttttcaacctcattatagacagggataggcaaagatcacttagctggtcatcacgctttctatctacaggctggcaaa

SEQ ID NO: 14743 - DNA, 417 bp, Arabidopsis thaliana landsberg
ggcgcatggattaagagattccttacctagaataatattttgacgatactaaattttgtaggttttgacttgcatttttgctttatccaaaatattatgtatataaagagattggcatgaaaccatataaccatcacaattcccatttttgctctttcattttaaaggagaagcaaaacctcatagaagtcaatgagtctcattcctattactttttattttctcttcttgttcttttctaattttcgaggtgtttttgctgttcctaatatacacttatgtcatttcgaacaaagagatgcacttctcgagttcaagaacgagtttaagattaagaagccttgttttggttgtccaagtcctctgaagacaaagacatgggagaatggcagcgactgttgtcattgggatggtatt

SEQ ID NO: 14744 - DNA, 655 bp, Arabidopsis thaliana landsberg
agtgctttttttttattttttcccttcttgtttatatgatcacccgaaatttgattgggctatacacattaagttgatggaaaaaaagtttttcacatagaccttttctctcatgttgtatgttcttctttgtaaaatactcataaatcagctaaatacgtaaggcacattaagcttgcaaaaggataaggaaggcacttaaaggcctcgttattaatgctacctaaacataaccccgagatgggcctaagggcccatttagatacagcaaagtcaaacgtctaaactacggactctttctacaaaaagtcaatatagtaaagccaacaaaaaagtcagagctgttcatccaaaaatgagtttttaggcttcttagctgcaccaccatgagtacctccagagaaaaggctagtaacaatggagcttccccatgagagccaacctgttgctcctccttgttgcttctcagcttcaatcacactcctcaattgctcttcctccaccatctcttcccaccttttcctcatgaactctcgaactgcttcagcgctttggttaaccatctcttgtgggggatactccaaagggttctggtccaagttcagtttctccagcttttccagcccgaaatacgagtcaggcaagactctgatct

SEQ ID NO: 14745 - DNA, 599 bp, Arabidopsis thaliana landsberg
cacgttatggacgaaagtgtcaagttctgagaaaacattgtttagtgtcttgttcttacctgtgattcggtctacaagccaacccactccagggaagaaatcagtgaaggcaacaccagcgactagcatctcaaacttgttaactagatcagcaacgttgtcctcgtctacgaactcgcacttgtggatattcaccccgaacgcgagcctacacacgatactcgcgactagcgtgaaaagggtcttcttcagattcaccggtgattttttcagagcggattcggttagtttcttgatcaacaagtcattctcttcctctcttatatacctgaaagactgaaactttttcgtgttcaagagctccataaccacgagcttcctcaacgctttccattcctcaccgtaaggagcgaatccaatgtctttgaagttgtaagagatcattcttgtcgctacagtctctggtcggctgcaacattcaagatcttgggtcttgagagcttcttctgctccttctttcgatgagatcacgactacggggacgaatccgaagtggagaagcatcactggtccgcacttctgtgagagacatttacaac

SEQ ID NO: 14746 - DNA, 629 bp, Arabidopsis thaliana landsberg
aataaagtaagaacagagcacgagaagaagaagaaacctgttgttagagtactcatagagacgaccacggctagagaaaacgatgagtgcgacttcagcatcacagagaacagagagctcgtaagctttcttgagcaaaccatttctacgtttgcaaaaagtgacttgacgattcgttgtgttctcgatccgtttgatttcgatctttcctctcccagatttcctcaagggagaggaatctcctcctagctccgattggtacgccgtgattgctgctccaaagccaaaaacgtttagggcaaaatttgattagtacagaattacaagaatccaacaaaaaaccaatcaagattttcttgaaaagactcaagattcttcatgttttctattctcttgaattatggttgagattaaagttaaactataaagatttaatttaattctgttgccgacacacatcttatagaaggaattataaagttgaagaactttattgatcttacattcatagtctcctaacaagagttaatcaagaaaggatggtaatacacaagttataaaactaagaacaaaattgttttgtaatcatagggataatttaaatctagagtgtgaaaaagaaaagtttt

SEQ ID NO: 14747 - DNA, 866 bp, Arabidopsis thaliana landsberg
  unsure (1)..(866): unsure at all n locations
ggaacaaactatacacacaaattgaaagttgggaagaagcattaaaacgtggcggattctcagaggtctgagattagattgaagaagcaccgaatgtgttctcgccactgtaagtgatgtaaaggaagccatcttcgtctttcttatcctcgtaaacgcttgacattagctctcctgttggaggaagaacattgtctacgaaaatgaagatagctttctctgcacttagtttgattctcttccgaatcacatacacaaattgaccaactgttaggtctgatggcacaaggtacctgcatttatcaaaatccagaacaattccaaaattacatacaagtcttgaaaacattgaacaaataacaagtttaacatgatcaacaaaaggtacttacttcttcttgtctatatttgggacttcacttttctcagccttttccacaatcacctgcaaccaaaatacaatgtaagataatctgaatcttgtagaaaaaacaaacagtattggattctcaaacaacgaagctaatgttctgtaacctaaactaaatttcaccacgaagattcatgatattgtttgtgaaaccgaattcagcatacattgataaatacgcaaacacaggtacaaaaacataagaaaaccttacaagaacagaacagaactgatcaaattaacaaaaacaacacaaagacagatgcatcccaaactaaactattaaattacatacacagactcatgctacatcataaattgaaagacacgcaaacagagatctattaccataagagaaccttacatgaccagtacanaatcagattaaaaacagaacataacttacaggaattcgatcagggtatttctccctgat

SEQ ID NO: 14748 - DNA, 814 bp, Arabidopsis thaliana landsberg
tacatttcaaatctattctccttgagaatcttgtccacaattcctttcatgcttgttgttttcgacactgcatttttcgtggataacatgaccaacctgtcaagactacgtgcagttttgctctgtggattctcttcgagagacttgacacagaagttgtaatgaatcttcgggtttttatctgcagctttcttgcaagaatcttggatcaaagattgtgcaattgtgaaagcgtttaagagcagaaagaacatagcaagatagaacaagaacgtcatatttctttagggagtatagaaaatttgacgaagaggttttcactttcttactcaatttatatttagaaaaactaataatgtttaaggtttttttaccagataagacttggtatctaacacaacggcttgtttttagagtgctcatatcacgctttaccacaccacttgttcgtatgaccaaattgtttgtgttaactaataacactctttatttatatgttggcgctaattttgggcctctatttttgttaaatgttaaaataaaaacattgcgcgatgtcaaaaaaaaaaagaaagcattatgcaacatgttttccctcatgtcaactttatttttttttttttggtaaaaccctcatgacaatttttaatgatattcataacgggaataagtctcccatgcatgatacaaaacatgagcttcttaatatcaatctccagaagaaacctataatcacttagaaaacaaaagactcgtacttcgacaaatgaagattttttttttctaaatgaagaaaaatttgctaacatgttta

SEQ ID NO: 14749 - DNA, 625 bp, Arabidopsis thaliana landsberg
ttcaagatcaccgccattagcgaggtaaacatcagtgatagactcttgtgagagaccagagaaagcgacaagaaggtattcaatatccatgtctatatccatctacaaatccaaatcatcatccctgatctgcttataagccatttcagaggatttcttcggcattgacacttcaaccgtgggggactttgctgcaaacacccaaaccatcatcaccgccaccataatccactcttttggagattggtacatacgatgctgcatgtggattcaatgcaaatgctcctggcttcattgctttgtcttgctgataaagttactgctaaatttagaagttaattaagagtcagagacagaaaagaaatacaaaacaatgatatattgattagaaccaaacatgtcgtatgcagcaaaatctaacaatctcaaatttggtctaacgaggtatgatgaaacaacctttaatgatttcaacaaaaaaaaataaaaaggatatgaagagacctaactcctaagccaacgtttcgatggcgtaacacagagtatataaggaatctaaaggaaataaattgaagatattaaaataaagaaatgtggttacattagaatctggctcgcgttgtta

SEQ ID NO: 14750 - DNA, 891 bp, Arabidopsis thaliana landsberg
ttcataagcttttattatcttgacgaattcatacaacaattaatatttttaatttacccatttcttgttggcaagagcaacgttgtttgatggcggagacgaattgatcgaccgaaggataaggcatatagagtctgtcagctccggcttgaaggcggagaccgttttggtctggtcggaatagcagaatccgaccatcttctgtcctgtaagctttcagtccttcatataaaccctaatcattcccaaaccaccataaatattccagtaaattagtatcaaaccattacttaagaattgttgcgaaactagatcacatacaatgatttgataggaatatcaatactttcatactattcggttcgttgatatacattaatacatatatgtacaactatttcattttttcaatagtttatagctcaaatatgcatacaatatagttgctaactcaatagtatactatgtaattatatttatgataattagctcaatcattttattatcagtgagaaagctatatattcatgtgttaatagttttttcttgttcatctaataacgatctagatttatattcattcttttaagtcatatataacaaacctggccatactgaagaacagcagcgcaagggttaagttgcaaatcagcaaaaggaagaatcttcccctcttgaaaactctctccatgattgcacttcgcaacatacatataatccgtacgaacaaacttgaatgccaactcttcccacttgacattcgcatatttttcatccgaaacactgtaaattttgataaataaaaaaaaaacaaaaaaagaatcgtcaaatcatatttcatactatcagatttaaacatataatttgttcgacgatacagaaatattttac

SEQ ID NO: 14751 - DNA, 843 bp, Arabidopsis thaliana landsberg
aaaaacatgaacctgaagatagcaaacaattataaagctaccaatctacgacactttacttaagttattgacgtcctagccaaataaagacatatatagcaagatccctataacatacaggttcacacctccattacagtgtggcaatccataacaacatcaaagacagcatcaagtcctccaagttctctcagtttctccttgaacattcctccagattttttcacagtaccagaggtatctggatggggaatgataatatcaataattagaaatttataaatcaattataatctggtcgtaggattctattaccgctgacacatttgttaaactgattcactgaagcagataacataactttccaattctataactcaatataatataccagatgcgtcttaaatagttagctagtcattgttccagcaaaacagacaggaagttaaagtaccatcaaaagagattttggacaagcacgccttctccatcaccaacaaagctacccatttcgtacttagctcacgcctcatcctctcgattgtatagctatcaatcaatctcaactccttgcaattaacaagaatttcctgagctctgtcaattatatcacaggagcttaaatcatgcatactggctgcatcacgtgctgcatcaacatccttgattattgataagagcctagatcctatattccgcggctttactttagtactggcagaaaccacaggtctcaacagcttaaccaaaaacttgatggagttgggtgactccataaagtgatcatgttgaccctagaatcatgaacataagactagtcaacaagagaaaaatgcccatgga

SEQ ID NO: 14752 - DNA, 727 bp, Arabidopsis thaliana landsberg
  unsure (1)..(727): unsure at all n locations
gatccacaaccccagcatatttcaaaacgactgtctttgattagaattagggacaaagtagttagatgcacaacagagggaagcaatcggaaccaagagaacagtgtcacaaatccaaataatccacaagacctaaaggcattcacaaaagccttataagaaaccagaagcagtaaatacgtattacaacatcctctctgaaacttgtcaacggaggttgaaacagaagcgagtcaacaaacaatcaataactcaatacatagctcctaaaccctagttatagttaccctacttaaaatcatcaacacaaacaataaacatagaaaccctaagatttcgtcttttagggtttacctcttcaagaaaaaatagatacaaagtcagattttttaaagcgatctcaacaaaatcgacccaactcagaaaagaaaaacaacttttctcaccagaaagtgagcttgcctttgcctagattagcctgccgtaagtttctcctaagaagttatcgcagtccaaaagagacgacgaaaacgagaagagttcaataagttcaggaggaaacggcggcggcagcgcaaagaagaggaagagaaggagaaatagagagagacaaatcagtttgcttaaaagtgggaagtatcctaaacctgtttgacacactcttttcgattttatactattcaacacaaccaagcccttattnttttttaagcccattttacgtatg

SEQ ID NO: 14753 - DNA, 618 bp, Arabidopsis thaliana landsberg
gaagaagactatgtgaggaagaaaggagttagctttgagttggatgaaaatgttactacttcttttgatgttgaagcttccaagggtagtagtctatctgcattgtcggttcatgccactagagatcttagagaagttgtgaaggagatcaagagtgagtttgaggttgcttcttcacatgggaaggaagtggctgtgttgcttgaggttagcaagttgccttatcagcagaaaagttcggggctcaaaggtaatgtttttacatgttctgtttgtatctgtgattgcttccttaattgcataaatagctgcattttgaaataacttatacatcagaaaccattttttggagatcaatcttgttacttgtggagatgataatgcattactgcaaatcatttgcagttagattagagctatagctttaaattagcagtaatttggagctcttcatgcaggagaaatatatgtatactctgatagtaatattagtagactttcgtgaattttcttcattttaccttggatctgttcaaattaggaactacatttcgatgtaatgggaagtaatgttgagctcttgttgctttcgattgaactgttatgggctttttcttc

SEQ ID NO: 14754 - DNA, 3018 bp, Arabidopsis thaliana landsberg
gtatcagccacatattttatctagcatcgtttgtcaattttctaattcattgaaattattatggacatgactattttagggaagttttaaggacttattggcaaagtagacactttttcaaaaataatttgtaaagtaggtagttttttttaaaaattagagagatagacactttttttgctttttgtgagatacagaatttgtctaatagactaaaaaacaaaatacatatcaaatactaaaataccctttatcttgagagagaataaaaattatatgaagaaccaattttattttattttgtttgtctttatctttttatttttttattttagtattcttaaatacttaaataattttttttttttaaaattacattgatttttagagtatttatctgtcatcattataatgcacaaacatttaaaacattgttttgtacactaaccattattcgttggtgtacaagtgtgtacaccgatatttcataaatcatcactgacttctcttctacttattaatataagtaatattgtttttaatattttacaaacataatgattgtataaaccaaatattattattcaatataatggtgtacatgatggtgtacataattaagttacttttaatggtgtacaaaatgattgaaactattatgacgattggtggatagaatgatatatacaacttttaaatgataacatacaagattggtagacaaagtgtacaaaacttggtgtacacttatagagaatgtataaatcattatttcaattagtggtgtacatcatctcttacaccaatgttagtacattgtctcatagatttttaaagatgtacgattatgtacaccatatttttcatcatctatgtacatcattttgtacactgttatactcagtgtatcattttctacatcagtaattatatattaatttttacgttattgttgtatactaccattagtacaccaattttaacaatatcacgtacaccgtcggctgagtttaaataaaaattgctacatatttttgaaatatagcaaaattagactttttaaattcacataaaaattttaaaaactaatatgattatgtggtaaaattttatgaagaaatatcatcaaataaagtaaaaatatttaagtaaaaataaaaagtaggatttgacttgaattttgtctttatcttactaaataacaaaataacaaaaggttatataagtcatttagtaaaatctttattaaacaaaaagtattattagagagaaaagagaaaaatgtctatttctcatatttctaaaaaaattatatattttacaaattatttatagaaaaagtgtctattttccaacttatctcaacttttaatcccaaattccaaatatataaacgccagaacgaaatgacgaaaataccctaattaagatttggaactgcaaatttaccaaaaccctccgttttatcttttctcgacggcgacgagagaagccgccgtcacgagctccggcaaaagttctttcatcttcaccgttcggtctgaaacttaaccagacagatcgaaagagaattcgaaaacttgtgctaaaaaaaacatgagggtgttaattcggccaaatttcttgagcaatctgattcgatattgctctagaggtacgcattcacacgatcgtagcctgcgatcggttctctcgtcaaatatgattcgtctgtacaccaccggtacgtaaatatgatctgaataaacattgcattggattatagtttagtatttgattgaattgagatgtataatgacaggaatggaacctcagttgtctcctgatcttattaagataatggatcagaggctctcggcgatagagcatcgaaatgctgtccttcagaagcttatcaaccaggtaatcccaaagattaagctcattgttgttatttaagctttccttttggttgttgattttttgacatgatcgataaactgtgttttccgttgttcgaagacagcctgagtactcaccagaggagttttcaagagccaataaggaacttcggaagctgagagattcaatgttgctgatcaatgatttgagggccaaacaaaaggtagtgaatttgctttaccgtattatatatctgttccaaagatcatcattgattaggtttactttctgttggcaggagattgatggattgaaatctctggtgtcggaaagttcggatgataaagacatgcttgatatggctgtaggtgaattagacgaggcggtggaagaagaaaaaagacttcaaactttgctgcttaagtctttgcttcctaaagatgaagctgatgagagggattgcattttggaggtgagagcaggtacacttgtgagctaatggttcttaaacaccacggtgtcttctacattatccatgtagaaagctgtctgtagttgtttttcattttgacatctgaatgtttatgttaggtactggtggtgaagaggcttctttgtttgccatggacatattcagaatgtaagtcccatatactgctggtagaagcaagtatacttctttgtacttgaactttacttctgtttttttatccggttttggaatatcgacaggtacgaaaggtattcacagaagaaaggttggaagtttgatattgtagacatcaccgagtcagatatgaaagggtataaagtaagtaacttttgttcctccttatgtgaatattagtattccagtattgctctgttctcctgaagctaagatcttgaatgtaatttccaggaagccagtgctgcaatttgtggagccagtgtctacggaaaactaaagttcgagagtggaattcacagggttcaggtatgttataaacttataatatatgaatcacattctgattttcttgactaatcatacaaaatcaaataatcacacttgaacatctttgcacagcgtattcctatcacagagaaatctggtcgaattcacactagcgctatatctgttgccatccttcccca

SEQ ID NO: 14755 - DNA, 635 bp, Arabidopsis thaliana landsberg
ttgtcataaatacatatatatatataacattaatggaaaaatatgtaaacattgtactaaatattggataatgatttaaatgagttaagaaacgatctgaaagcgacacattagtatgaaaatttcattaataatacatgctgataaaattattttttaaaagtgtttctcaattaatatataagtgattatatatccaattttaagacacatacacatatccaaaaaaaatgtttttatgattaggaggttcatggctcatgaaccacgacattaggggtgggcattcgtgttagggtatatcagatttagaggtataggattcgttcggcgttttctaaattttgattttagatcgggttcaggtcgatattttaggttcagattctcagaagttcccaaaaatcaaaaaatttataacaaaatttatctaaactacttgaaaatacaccaactatctaaaaaaccttatacttttttttaccaaaatttacttaagtagattaaatacccaaaatataaaaaaatctgaatattttggaccctctaattatacaaatataaatatcaataatagactattactatgtatttaaattgtagatttgtttgactacttgttcagactcagattt

SEQ ID NO: 14756 - DNA, 594 bp, Arabidopsis thaliana landsberg
  unsure (1)..(594): unsure at all n locations
ctccaagcaacttggcaaggccaaaatcagaaatctttgcattgaatctatcatcgatcaagatgttgctcgacttgatgtctctatgcaccacttttggttcgattgcttcgtgtagatatgcaagactgcacatgaaaacaaaacttacattcagcagaacatatgtgaaacaccaaaaagaaatgtaaatgttttgctcaattacgccttggatgttccagtgagaactttcattcgagcttcccaagttagatatccatgatgtttcattgctccgtgaagccattcttcaaggttcccattgttcatatactcataaaccaatatcctaatagcaacaaactcacataagttggcttcttttttctctctatataagacaaaagattcaatatatttatacctgtttgtgccttcaatgcagtatcctagaagacgtaccaagttcttgtgacgcacatgacctatagcatctacctctactctaaactctttctctgcttgtcccctacaaaatcaaacttcaggaataatcaactaangaaaacatatcaataagagagagtccatttctctgagaccataactcac

SEQ ID NO: 14757 - DNA, 574 bp, Arabidopsis thaliana landsberg
ggcatcgcctagctaaacctacgtatttgcaagatgttttggtttgaactagaccgagtacatcaaacaaactcctccgtttgttttcacgatcaccatctgtaagagtaccatctacgtccaaagatgttgcctctagaaagcctattttggcatcttttcttgcaaagatatgtgaaagagaaacgtgtgtccataagtgtagcaatattttcaaatattcagatgattcaagcgaataaaaaaaaggaatcaaaataaatggcatgcggaaatctcaaccatcaatgtcacaatccggtgcattttactaatcagtctgagaaacatgatcgcgtctttaacctgggaaaagtaaatctcttccacaaatgaagtttcatcccaaggaagtaaaggtgttgaaaatccttcgacatttgcttctctagttctatcttttcgccaagtcagtagcagattcaaattaatatattagtgtctgctaaattatgattgggattttacagtaaagttatatggatttgtatactatacaagtcaagttaggattgtccttttttgagaagcatac

SEQ ID NO: 14758 - DNA, 616 bp, Arabidopsis thaliana landsberg
atttgattagaggacatcattatgttatataaacatggttgatgaaaagagaattaggagataggggagtattattgaagggattacaaaagtcaactctgtccaaacaactaaacaagtaagagtgtatgactatgaccaaaattctaaagactttctagtggtcatgcataatagataatgcgactacaatattgtattttctacacaattacgattgtatcatataagaaagtattcacattgagcgaaaagtcaaatcacagattagttcactaaacatttactgaattaatgagttcgataacgacacttgaccacttctccctccacaagcctttccactgtatcagaaggaagaccgatcaactctaatgtcttttcccaaactctgttagctgtttcaacgttttgagcttcttcagaacaattcgtgagtttgcaatttagagatatgaataatgtgcaaacagatttctcattggtttttagcttttggtaatggtttggaatctgaggatctgtcgccgagaaaagcgagcttctacaaccttcttgtggtgaaaagatgaaataaagcaaggctgagtaaagatctttgaccaatcttggaaga

SEQ ID NO: 14759 - DNA, 773 bp, Arabidopsis thaliana landsberg
gtttggttttttcaaatactgtataccacaaattatttaaaattcttcctaattttctagttttttttttctgtaataaagctccatacattcgtaaacttgaaaaaagaacttctgttaccatctctcagaattgttgaaggaacataaaattctttcagaaaaaagaaaaaaaaaggtaaacaaataaatgaaatgttatgagacaaatacgaataaacaacagtaaagactagaagcaaataaaagagaaaaaaaaactatataccgaaacagagaagcagcggcaggaaaactcaagactgaagatcactttggaaactgatactcgagatatcgtcacgaaaatgtaaaatgaagctcaaagtcatttcatagctgctggtcaaggtaaggatctctaggcggattcgagccaagatactccgagacctcagtaacatacgttttcagcttcgaggtggttcgggtgagccaatcggtgtatgtctgatccatctcatccttcatattcgccatcttctcttcctcttccaacatgctgacccatctcttacccatatacattttaaccgcatccacaccttgtttcacgacttcatcaggcgggacaacaagcgggttttggtccaagttcagtttggtcaagttcacgagcgtgccaaaagcgtctggaagagaatggatctggttgttgctcaagtcgagttcttggaggcttatgagatctccgaatgaagcagggagatcttggagatcgctgaagttactgc

SEQ ID NO: 14760 - DNA, 947 bp, Arabidopsis thaliana landsberg
agttcttttgtggtttatttctaccttccaaacttccgaaattattcgaaattacgccactactctcggtcaacctcacgacgatgtcgttccttttgtacttggcccaaaccgaatggatccagtccactggcagttccaagccacatgttccatatgcctacccggctactccgaattctggatctatttctgttgtcggataaccccaaaagcctttccacaaaaatttagtagttttcctaaaatttagacgttaacccagtaatataggattccacacgtggtggcatcgatcgacaactataaagtaatcaccgtttttactccaaacgatgcctgcgaatgctatgttgcttagaacttggaagagtggtcaattgtttcgtagttgggtcatacttcattagtctaccgattctgtctccactcatcgtactatccctcaattaatcaattaaattaacaattacgagctaatccatcatataaacatgctccttttattaatataaagtataaacatgttctttgtttaagataatataagataattttaactctataaagtagataacttcggtccgtggatcgatatcctatccattggtcaatcgaagggcttcattcagctcacatgacaaaacctgattggttacaccacatgttgtgccaactttaagaaggcccgtataagcatcggctatatagaggtcacaagtggatttgtcaaaggcaaggccgaacggacgaacggtcgtttttggaatggatagaagctaacattatcatttcgaacggtgggtttgaacttttaagtccaagaataggactttgtgaccactgatggacacgtgtaaacacgataggttatgatcagatctattatatatggtctctaaagatcatataatttttttttaacaatttcgttaatagactgagag

SEQ ID NO: 14761 - DNA, 559 bp, Arabidopsis thaliana landsberg
gcacctgctccaacctctccaccctatttctccagaataactttttgttggatatctcaggtgaattctttcggtttatgccagcacttgtggtcttggatctttcgaggaactcgattctttctaggttgccggaagaaatttctaacttgggttccttgcaatatctcaacttgtcatacacggcaataaaatctttaccagatggtttgaaggagatgaaacgactaatcgacttgaatttggagtttactcgtgagctagaaagtattgttgggacagcaacaagtctaccaaaacttcaagtgttgagattattttgttccagagtttgtgttgatgacatagtaatgaaagagctacaactcttggagcacttggagattttaacagcaaccatagaggatgcggtgattttgaaaaatatacaaggagtggaccgattagcgagtagtattcgaggtttatgtctcagcaatatgtcagcacctgttgtaatattaaacacggtagttctgggagctcttcaacgcctactatttggaactcgaaaatctct

SEQ ID NO: 14762 - DNA, 611 bp, Arabidopsis thaliana landsberg
attttgttcattcatgtgcgtctctaaattaagatattttggttttttgtaaagtcaaagcaaagactattgttgtgattgggcttttaagccttaaagcatctaaaagaagacgcttttgagaatccagaatcggaaaagttccacttgtgccttgtagatcgcgagtacggctctttgtctacacgcgagcgcgtgacttcatactcataaaaatatctttagggtccttagaaaatgggttcttttgaactttttacccaatgtttctagaattatcagcttatgtcacatgcctctgcctacatgtccctttgcagacacaacccacccattgtctatccatctgtttctccttttacccttcttcacacgcagctaaagaagaaatttgtggaatcatcgcttattcgtttcaaaagtcattcatttttggtgtctctgcttcagaagatacttgacgatctctcctacgtgagctctttaaaacccttgtcttgttattttagtgagggttgctttgattctcaatcctttttgactgatcttgaaatggatcttctttcacttctctcggatttgtaataagaaatctatattttttagctcac

SEQ ID NO: 14763 - DNA, 651 bp, Arabidopsis thaliana landsberg
cgagatttgttttccctagacatcatactgtaaatattactgttttactatgatttgcagacatcatcatctccatataaggttgatgactctgagaagagcactgtggttaaaataatgttcccttctgagccaccagtaagttatttttgtctttcttaactgatcgacaatacaatttggtagtttcatttttaatcaaacttacttttcctttgtgcaggttgaatgtgaatatgactgggtgaaaagcgtcattgaggtgcagtatctgacttttccaataaaacaccttacttgaattacttctcatctcagtttattttaggaattcaccgacagtctgatcaatgaggaggtattactcccggaacaaaaggttgcgttcgaggtaagcaagcaagagctggaattgatttgatgaattcatttgagggaggtctctaaaatcactcacccatatgtttccttttttcaggagtttgtcaaagagaaaagtgacaaagctatggcagcttatgacacggtatcatgtttcataccctctgctacagagccgcacatatacttaacaatggattctacaattggcaggcacaaaaagccctagagaaagcataggaaggactgagcgaagaaacaaaaaagcct

SEQ ID NO: 14764 - DNA, 625 bp, Arabidopsis thaliana landsberg
  unsure (1)..(625): unsure at all n locations
gtaaagacggtttactacatttccacagacaaagtataacaaagattatgatcattgttcctttatgcagatttgcctaccttaagaagggcaaacatagatactcctccggcaacaagaaaggtgcaaagatactcaggcaaagtgtatcttatgccataaactaaggagcccatcagcataactacatgaaagaaaaaacatatataagatacacatagcagcagttgagagcgattatggattgatgctctaaattgacacctcacctggaatcattttggaagattttgcaaggacctgcaagaagcaagttttgcatcaatattacttcccaagaaaggttattacctcaactatcaaccataatcaagaaaaatgaggtttttattacactaacaatgcctaatttacctgagctgggtaactaatatactttaaagcttcaatgcccatagcaggaccaatggtattagtaatgccagcactccaatacgtccaccatggggctccaccagaacctgcgttggaccagagcttaatcactgctcataatcaatcaaaaatacttcagttncatttattcgtctggtataaaactataattctaaggaataaacaatga

SEQ ID NO: 14765 - DNA, 816 bp, Arabidopsis thaliana landsberg
  unsure (1)..(816): unsure at all n locations
gggaactacagacagaatcaatccctctgtattgaactgtgtcgcctacgctaattaaaacaaaaacctcgaaggaaaatgtgggacatcaaataccaaattgagatttcttaacttatttttctggaaaattcaaatctaagcaatgcgagcaaaatcaataaaatcacacacaaagttttagtatctaagagaaatcaatgaagaagccaaaacaaaactcgagtgtttatagtacctgagtcgcatgaaacttcaatctgaaaacgactttgatcctgttcttctcgctacgccatctcgctgacttaaacatctccgccgccgagagtattggtcgccggaaagaaaacagtaactctcaccgtcgctccgaccatcgtctcccggaacgagtcattacaacactcttttttagtacaatgtagaggaaatgatcattacagaaggcgggcgagttggctcagtcgatcggagcgagttcgactcagagagaaggcgaagaagaagaagaaagaagaagacgcgaacgttaagcttgagcggtggatttttatataaatgggagaaaaagaaaaagtaagtagagagatctaaaagagagatgagattaataaacaatttagcaaaagtaaaaggactatacgttaattgttattaattagtagtgtattttttaatcgattaattaatttttgtctgtatcgtataggaaactctttacgtttcactttggtatgatatgttaaaaactaatataattttcatagttgtgctattatgccttanaaaagtacctcatcagtaatcagttag

SEQ ID NO: 14766 - DNA, 571 bp, Arabidopsis thaliana landsberg
agtagaacgacttcatcaaaatggccttctcactcctgaagccattgacaaagccgatgaatcaaccattaaggaattgatctatccggtacattatccctttttaatcttacttcatgttgttaagggctctttgactctgctatgcccccagctgccatatttttcatgagaagtatttaagaaattaaaaggaaaggagtgagaaactataaatagaaattgttgttatcgttttaatttcgataagaaacttactgtttcccctttacatttaggttggattctatactagaaaggctactaatgtgaagaaagttgcaaaaatatgtctaatggaatatgacggtgacattccaaggactttggaagaactactttcacttccaggagttggtcctaagattgctcatctggtataagttgcccatattattccgctttgtaagagagatacatgttttcaaagttcttaaaaggtttctttgatgtactgcgataggttttgcatgtagcctggaatgatgttcaagggatatgtgtagacacacatgtgcatcgtatttgcaat

SEQ ID NO: 14767 - DNA, 586 bp, Arabidopsis thaliana landsberg
  unsure (1)..(586): unsure at all n locations
cccccttaatcatgggacgatacaaggtctacgagccttatactacaacaagaacattatttccgaagctgggggggcttggcacatatcattcaaagatgaaatcggaaaatgcagccaggttggagactcgacttatggaatatctagtagttatatactagtctatgttccatcacacttccaatgcttatatatatgctaataaagtctataaaataacaaattattagacaattttcgaccaaatgattatagttctcttttttctgtacgtggaaatttctctataaaacaaatgagagcttcttctattcttcaacatgaagacaggaatctttggccattttcgtaaatggcagtcacaagagacagtcgtaaatggcagaccaaatccttgatatgcactttggctctcaaaagaaatttattatttttatctctctttggttacttttgttaattcggataaagatggcagacatagtacggaaccaatgattcttttcgtcaaaccaccaatggttttctctccttcatgtttgaagggatttgaaantgatatgactttcgagagctatataaa

SEQ ID NO: 14768 - DNA, 631 bp, Arabidopsis thaliana landsberg
  unsure (1)..(631): unsure at all n locations
cacttccactggattgatatcctatcactatcaccacctacacattnttaacaataacattgttaatcttaacctaatctatactataacaaaacatttaaaaaactgaaaagacgatatagtcaaagtaatttgtggacttctgtaaattacttgatctttgaatggatctgaaacacgataattgtggctatggatttgccttcctggccatgactctattcctgaaacaaaagaaattacaaaacattctcgcccttaacattcacacattgggatttcaaaatgagttattaactccgattacctctgattaatagtgaattagctagtggaataagactttttcttatagttaaaataacatgtaaaatatgtcaaccaaagcatattaaattctttacctaatttaattaaaacagaaatataaataatcgtttacactatcttcgaaaaacatttgtttttacaacttagaaatgaagaaaaaagaacatgttattcttgaattatctcaagaagttgatcaacagaatatatataagtttttttttttgataatatagttaccacttacatgattatgcatttaacaatgattttatttttggatttattgttttctatttaa

SEQ ID NO: 14769 - DNA, 457 bp, Arabidopsis thaliana landsberg
agctcgcataagatatagaaaagattgagattgatctgaaggaatcattcatatgtgttgttagttaagaagtttgagcaacctttataaagacatcttcaagagttgtgtctgcaagtccccaagcaactactggaaacattgtcttcgccttctccaaagccttaaacacctcaccaatcttcacctcttgctttggcagctcaaacttctgagtccccgcggttcgatatatcttctttgcattcgtagagatgttatgcactaattgctctacttctttctcatgttcctccgaggttgtcacagtcaatacataggatcctccatatcgactcttcaactgtcattaatgtttcagttaatattggctcaagttcatactgttatactctgtttctaacgattgagtataaggtgtattgtagttttacctcctttggattgccaatgcatt

SEQ ID NO: 14770 - DNA, 906 bp, Arabidopsis thaliana landsberg
  unsure (1)..(906): unsure at all n locations
agatcaaaacacaacgagatggatgacggcaaataatatccaaaaacaaccaaagatcatgagactataaatagcaaaagtttgttggggttatgtatataaaagctatcatgtactttacatcttttgttgttttgtgttatgttttttagaaaaataaattgaacaaaaacaattagaagtacaggtcaacatatcattaagttgttggtcggtaaattttttgataataagacatgaatctcagagtttgaccaaaaattgctttcacaggacctcaaattttacaaatttggataacagaccaaaaccaacacatttcaaaaaaccttaatatatacatccaaaatattaaccattagacccagaatctcaattttttcaaaggtttgataaccatttacatgtctatatcatctcaaaaacaaaaattgaagtcatggggatattatatctgtttctttctgtgtccaagaattactacccttggaccagatagttccatggcgaatgaatctaacgcttgattatcatcttcatcttcaaatcttgaggagccaaacagatgtttggtttggttgttgccatcagtagaggtaatagtcctgtaagacatgttggcatggtataaatgtgaatggtcatgtgaagcagcccatctctcagctaatccatctccttcaagcatctgaactacttcagacattttgggtctgtcagctggaagaaactgagtgcagagcagtgccacttgtagcatctctccaacttctattctatcgtaggttgtccccagttctcggtatactaaatcctctactttcatttccttgtgtagcatacaacaccatctcngctcctttaagttttaagacaatcttttgattatacgtttggtctaaactt

SEQ ID NO: 14771 - DNA, 806 bp, Arabidopsis thaliana landsberg
ttacaaaatatggtttttcaagttaggtttgtagttttattttctcttcaagttagattcgcttttacatttagtttgtgtgaatagaaaagttttttattaagaaaaagaatacaaatggttcaataggttttttttatccaccttagttctgagaaaccctgagcaattcaagagcgtcttgaaacttgatcattggtaacatcttggtgaatatatatctaagtaggtgataaaatatgtgtatagtaaagtcttatttctaaaaagacaaacaattgtcaattatctaaatgcaaactattattgtcatttttgtcttgatttattcaaaaaaaacaaaaaaaactatgttaaaacaatttactttgaaaacccatttcattcttttttgaaaaatagattttagttattcccacgcatcgcgtgagtctttacctagtttactatacgaaaaccaaatttcaatcctgtttttgtagaattttgaagattttgaaagtttgtgttccctatcaattaatgaatacaattagtttgtgctgctttgtaatgatgcaaaaaatataggagtaaatagtttggtaacaatgtttggcgtagattagaaaagtcaaccttaataatattagtacaaaagtggtactgtactcttagatcaaaagaaaaccatttgaggtttcgacgattcaagtttcttcaaacatgatctaatgattttgaatgtttaaaaaaaaaacaaactattttatagagtagagtcgaactaatcgaaacaaatacacaagaaaaaaccaggacagagc

SEQ ID NO: 14772 - DNA, 915 bp, Arabidopsis thaliana landsberg
  unsure (1)..(915): unsure at all n locations
cggcacctaaaattctaaatggaatatgttattgcatcttctttaggccttcctgttttggttataacatcattgtttcgaacttataaacactctcttcgttactcatatagtcaatgtgtatgtgaagtgtttcaaagatggcgattttctttacatctcccctcttctttctcatcatcctttgtttctctatctccgtggttcacttgtcagcatcaccaactcttgttctcaatctcgttcattcctaccacatatactctcgaaaaccaccacatgtctctcatatcaaggaagcgtcggtcgaacgtctagagtacttgaaagccaagacaactggagatatcattgcacacctttcccctaacgtccctatcatcccacaagctttcttagtgaacatatcaataggtagcccaccaatcacacaacttctccacatggacacggctagtgatcttctatggatacaatgtcttccttgcatcaattgctatgctcaaagtcttcctattttcgatccttctcgatcttatactcaccgcaacgaaacatgtagaacatctcaatactctatgcctagcttaaaattcaatgcaaacacaagatcttgcgagtattccatgagatacgtggatgatacagggagcaaaggcatactagctaaagaaatgttgctgtttaatacaatctacgatgagtcttcgtcagctgctttacatgacgttgtttttggttgtggccatgataactacggtgagcctctagttggaaccggcattctcggtttagggtatggtgaaatctcngtggttcatagatttggtaaaaagttctcatactgctttggaagcttagatgatccttcttatccacataacgtcctattcttgggagatgatgggtgccaca

SEQ ID NO: 14773 - DNA, 554 bp, Arabidopsis thaliana landsberg
tatcgaaaattcgttttttctacagtatatatcgttttcagttttcttgtgcgaaaaagctaatcatatcatgggatttaatacaagtacaagtaacaactacacagtgacactttttattggcggtttgtaatttaagacaagtacaagtaacaactacacaggtcatatagtaatctgatcagataataacaatagtaatctgactaaataaaaattgcagaccggaggaccaagctacccggtggagctagggaggagagatggcagaatctccacgaaggccagcgttcaaagccaattgcctcagcccgagtttaacctaaaccagctcaacggcatgtttagccgtcacggcctctctcaaaccgatatgattgccctatcaggtaccaaaaccgaacttaacctattatatttttctactttaaccaaattcttatggtatagtattaatgttattgtgacgttataattcaggagcacacactataggatttgcacattgtggaaaaatgtcaaagagaatatacaattttagccctacaacacgt

SEQ ID NO: 14774 - DNA, 1883 bp, Arabidopsis thaliana landsberg
  unsure (1)..(1883): unsure at all n locations
atctttatagactatgtctttaatgttagtttctgagttgataatttaactaaatcgtttctcatgcacatatttgtcaccaataattgcttattgactattttattttgcctctctagtcgtcgtagctaaaatgtatgactacatcgtttactctgtaacttttatggagtgtgaattcaaataaaatccaaacaaagaaaaatctgatcttaaccttattcagacacgaagtataagatattcttcatgttccttttgtttctgtcaagtatcatcaacaaacaatcaacatttactttttattatccaaagtaaaacgtaaatcatcaatagtctagcataaatgggccatcaatttaaaattaaatgggccctaagttagcttattcattttatttaccaagcgtccaagcccattcacttatgacttaccattttttaataaggcaccatttatgttactaagtgcaatgcaattcccggaaatttagaaagatcccgttggattgaggagccttgatggtatcgtcggttgggaaaaactttttttttttttttttgttgtcaaggtgaaagaaaaaaaaaaatgttaaaaataatatggggtcctgctaaacttaaaatatctgttttctttttacggttacatttgttaatgtaatgtaaacaatcatatctgcctaaaaaagttattaacaaatgttgttcaaaaacacaattgtgttaaaaatatttaatcaccgttgtaatatttcttaattctagattttaaaagaaaaattattgaaagactattaagtatatatagattatatgacattaaatttatatagattattttttctttgggcaaactataaatatatatagattattcagtcaaagtaactaaaaaaacaaaaaaaaaatctagttaaccgtcacttaacacgtgtcataacggggcagcatgtgcatgtccattgatgtcattcacatttatcaccgctattttcatcaagaacaaaacaaacagaatcacacaagaaacagagcaacaacatatattcaacaaaaacaaaatcgccatgagatcgagaagtaaccttataggtctcataaacttcttcactttcctcctgtcgattcctatcctcggcggtggaatatggcttagcagccgagctaactcaaccgattgcctcagattcctccagtggccactcattatcatcggaatatcaatcatggtcatatctttagccggaatcgccggagcttgttaccaaaacaagttcctcatgtggctttaccttttcaccatgttctttgtaatcgctgctcttataggattcacaatcttcgcttacgtagttactgataaaggctcaggccggtttgtgatgaaccgtcggtatcttgattattatctcaatgattattccggttggttaaaggatcgtgtcacagataatggatattggagagatatcggatcgtgtgttagagattctggagtttgtaagaagattggaagagatttaaatggtgttccagaaactgctcatatgttttacttcagaaatctttctcctgttgaggtattattattttttttgtttaaaagaacatactagtgtactctaagaaactattatgtcacttgttcttggaatctaacacggtgtgaacgttatatgatatgtatttgttttcaatctgtagtccggatgttgcaagccgccaacagattgtggctatacgtacgtgaacgagacagtgtggattccgggaggagaaatggtgggacgaacccggactgtatgttgtggacaatgacagagactatctgttacaatgcagtcttgtanagcggtgtcttggtacttgaaaagagtgga

SEQ ID NO: 14775 - DNA, 701 bp, Arabidopsis thaliana landsberg
attaacttactgaaattttttttatgacaattttttatcgattccataaaattttatatttcgggcggggtttgtactagtagtttataaatatctattaatttttatttattaacacaaaaaaataattattaatctaataatactaaatcaacagtcactttaacaaaaactgcagtatcctctatctgacacgtggcaaaactctcaaattttgctctttcatttttttgttattcacttttattattctttaaaaaataaatagaaatactaattttcaattagatattcaaaaaccagaaaatctaaactgatcgacggttgcgctctcaccacgcatcacagtcgtttttttgccacgatctattcatctttatagtcaccgatggatgttttagacaaaaaaaaaaaaaagaggcaccgatggatggatcaatcaatagcaatctctctattgactttcttcttcgaattcaaaaccttgacatgttcagagagcgaaaaatgtaagataaacacgttgagaagaaaacggaggtacaaaggcattctaccataaaattacaaaagtgagttatttttgcatttttattttaactatctatgagaaactgtcaattccagagtttcagtgagaatatacttttttttttatgtagagttaagcacccacatcgttaaatggagaggaacgtgaa

SEQ ID NO: 14776 - DNA, 619 bp, Arabidopsis thaliana landsberg
tatggttttatttaagaacaaaagcaccacttttccaacaagggacttgagaatgtttaaaggctgtccataaaacttaggaggtttaaattccaggaaactctctttgtaaaaagcctccacttctcttagaaacgccacttgttctaccggtgtccctgcttcatcagttccctgtgcctgtagagaaaggggaaccagtaagtgaacaatcaccacataattttcgaccacaaaacagtgaaatccaatcctgagaaaacaaaaagacacaggctttttgagccaaattgaaagaaacatagcctagtacctcagaatccagcagccaagtcttcctctttttggcattctcaccttcagtcttaggactcaacatttgcaccctacgagtcttcctttcagagtggtcaacaactccaacagcaccaccattcatgccatgaccattattagcctgaccatctccaagaagaaggggctgcgggatttcactaaggttgtgatcattttctggctcaaaggttcttcctctaaaactttgtctcaacaagggcaccaaaagtcacatcttgctcttgcattttggtatgcaccatctttagctttgatttctgtt

SEQ ID NO: 14777 - DNA, 708 bp, Arabidopsis thaliana landsberg
  unsure (1)..(708): unsure at all n locations
gacctgcatgcatagtctttagtttatatgtctttaaaaaaaaaaatagtggacttccatcatgtatcattaaacgtatacagtattctttcatataagggagtgttttatctaacttaagtacataaccttattttttgtgtacccaacataagtacataactaattgcattgtatatcagtcaactgaattgtgttgtaattaatgaaaagcatatgaatatgtatattgattccaccacttaactagttgtgtctatattcaagttaatattttcaccaatatgaggatgagctgagaacaagaatgcaatttctcttcttattattaaaagataatatagaagtacataagcaacaacagttggannnnnnnnnnnnnnnnnnnaatcatcatatatgttataaattagtcaagtatatcatattttttggtcatgttctcgttcttaagaatctgtttcttcactgatggtggagattgctcacattttctatgacagtcagaacattctccagctgatgatgagcttttacaatggggacgacacaaaatactgcattctatctccgattttgcttcacctccgatcagaatcgccactattatcatcaccatcatcaccatcatgctcaaattcttacccatttatgttgaatctgtttgtgtgtgtttttttctttctttttcgtttatgttgatcaatg

SEQ ID NO: 14778 - DNA, 1157 bp, Arabidopsis thaliana landsberg
  unsure (1)..(1157): unsure at all n locations
gtacatatacattggtggttgattctaaatccttgcattaatgtaataacttttaatgttgccaagataaaagaaagtaatattttcatatccgttctctcatagaaagatgtttatttaacacaattccttaaaagatttgtgaactccatggaagcttcaaagttttgttctgtattcaaatttcttattcttcttcttttgaaactgaaaacgtggggaaaaaaaaggagatttacaagtagaaaacacaaatctaccaaatggtataatttgtttttggtcttgaaggaagaatgcaagcaaaactggacagaatatatatcaactaagaatgtggaaagacacacgaatcacacaaaccaaataatagtgaacgctctttgcattttggcttattcatctagcttttccacttttgtgtttatccaagtgaggaaatgcttgtagaatgttataagcccttagatcttgccttgttaagatccctatcacaggtgacatctgcaacaacacaagacacacgtttagtagtgttcttgaatcttgaatcaagagagtaaaaaagcaaacttacccctgaagcttgaatcttgggaaccaccagtaaatgtctgagacccactgaccggaacagaaccaaagctttagccactgaaatactttgcaccactgtgtaaggtgtagtgttggtcaaaggatgaagatcaacatacaattgcatctctgagcttgtgattgcaacatcatcgaagttatcttctctctcagctaattcaaccggtgtgaacttttccctaacttcccactcttctgttctccttttctcattcaagaaccatctctttttcagaactttcacaaggtgagctcttacgatcagaccatggagctctgtgccagtgttttgatctgctccatccaagactgggaatgcgttatgcgttgtgttccttagtacatcgactatattcgccactttttctactccgttaagtgttacaaccggaggcttagcgtcgttaagctcacctacagtgagattcctcatccacggctctggatttgcttccaagaaaggtaagcccttaagatggagaatgatctcgtagatacttagatngaagctgtcacctactgttttagctatcagaagc

SEQ ID NO: 14779 - DNA, 787 bp, Arabidopsis thaliana landsberg
tcgacgtaaatggtataatcgatatctctattttatatactaattaaattttatagtgtggatcttatttttattttggtcacatcaattaaaaacttggtgaacataaaattaaccaagcaatcaatttagacaagcaacataatcatatatatttttgttacatttgtatgtacctgaatatttatatttatgtttatatgttctcactatattttcacttttgtatttgaaaatttttaggaaaaattttggatagaaaattgatgggagaagatctctactgggcaataaacggaggaggaggagggagctacggcgtcgtattggcctacaaaataaaccttgttgaagtcccagaaaacgtcaccgttttcagaatctcccggactttagaacaaaatgcgacggatatcattcaccggtggcaacaagttgcaccgaagcttcccgacgagctcttgatacaaacagtcattgacgaatataacggcactggttcatcttagaagaccgtgaggacaacattcatagcaatgtttctaggagacacgacaactctactgtggatattaaaccggagattcccagaattgggtttggtccggtctgactgtaccgaaacaagctggatccaatctgtgctattctggacaaatattcaagttggctcgtcggagacacttctactccaaaggaatcaacccgtgaactaccctaagaagaaatcagattacgttcgtgaaccgttttcaagaaccggtgaaagtcaattggaagaaatgat

SEQ ID NO: 14780 - DNA, 775 bp, Arabidopsis thaliana landsberg
tgagtgaccacctacttaaaaccttcacaacatgattgattaatagattgtggttgtttcgtgtggtaggcacgggtccaggtaatctaatgcttctttgcatgttatgctagatactggtttgacattataatgtgtttgagataaatgttttttataatgtgttacggatcgttgagataaatgatcgttattaagttagagacgttacaactcgactattcaatgatattattaagagagctaggctataaaggagaatgatgttgatcaagaaaatggacaacttttgacagcttagcatcaacaacatattagaccattcatttgtaatttcagttcacatctcatcaagaaaataagtactgtctctttgattcatatttcaatctctttctttgtccattctagttcggttttgtatctaataaacaaaagagttcactccaaaaaaaaaaaatcagggaattttaatagccgagatttaaccgttttgatattgttgtttttgaataaatcagaggtgacaaactagggtttcaataacgacttctaaaatgctagctgtgataaaagatgagttctatacttttattcttgctaggtcatgtgtactttatcacaaaaaatacttgttttgcttttttatgttaagtgggaagtcgatagatcgagttttttggggtcaaaaatcggatttatatcgaaatccggcaccaacaacaaaccttttgcttctatatacagtatagttctcttacaattcacaaatcct

SEQ ID NO: 14781 - DNA, 646 bp, Arabidopsis thaliana landsberg
  unsure (1)..(646): unsure at all n locations
aaattgatttgtatttgagtgttcttattatgtttttcttttatcttaatttcaaggcatttaaaagagacgaaatgggtaataagctgggaaggaagagacagattgttgacgaaagatacacaaagccacaacaaggtttatacatgagcaaagatgttgacattaaaaagcttaagaaactcatcttagagtctaagcttgctccttgttatcctggtcttgaagaaaccccctcctcccatcatgatcttgaagaatgtcctatttgctttctggtttgttttaagtctttccttttttgcttacttcctcattcaagaagatgaaattgaccaactctcatgcaattttttgttcttctgtgtttctagtattatccgagtcttaataggtcaagatgttgtatgaaaagcatttgtacaggtgaagaaatgtatttgttagtcatctctgaactatagaatgtttcttatccggtgtagtcattgactttgtgtttggttttatacagaatgctttctgcggatgaagagtcctaattcagctcgacccactcagtacccttttttttattgttcgcgtttggcttaattttttcatattcctgtggnnctgtatacttttgagtcctccttatcatatg

SEQ ID NO: 14782 - DNA, 759 bp, Arabidopsis thaliana landsberg
caaattctctgaattaagatttgattatgtgttagaagaattaaatcttttaactttctacctttgagcatgggaaaggacagaggcttcgagagtccatttggggtagcaaaagcttccgagatacttaaggaccatgctttctttatcttgattagcgataagagtcataacaacggggactaacaccgacaactgcaagaacataacagcaaattcaggtaccatatggttagtgaaaattttggttccttcatatatgaattatgagaaagtgaggacaaaccaattgtgcggcgctaggactgtacaatatggcaaaaatgtaagccatgcctgttacacagtagaccaagcatactagtacaatgtagttgtcttcgaaactagatctcgggttgttgaagaagtagaacatggacaagtacactaaaggtttcataattgtgtttaaatggtccattgtgtctttagccataaaatgtgccaaactgctaattccagcggcactttctctccaatattgtaatttatctacagagaatgatctcaatgccgagatcttacacaaaagagctacaaaaaaagaaagacatacagaaaagagcttagttaacgttccaaaaatcgcgaatactagtaaatgtaaattaatatttgtgtacgtaagaaacttacagacagctattatggtgtatgtgtagccaagtgtatcgattgtctcgtcgttcacctttccaagagtttcttaacaagctc

SEQ ID NO: 14783 - DNA, 869 bp, Arabidopsis thaliana landsberg
atgtgtggaaactaaatgacaagtctgtttgaaattaattgattagttatataacatatcaccgaccattatttatgacattaattaaacaaaacaaggaagaaagaagcatcaaatattatacattaagtaattagcgaaatagaagaaaaatggatcagtacaacttggtggtgttagatctaccaaacttcttggacgtagaggaattcgtcaactcaccggacctcctccgtagcatctgcctcataccatcagcgacatgaaccgccggattatcttttttaaacttgccacaaaacgacacgtgggccttgacggcttcatcaactgtggtcatcttccggcgactcacttcgtccctcacggcttcggagcagagaccacagagccacttgttgtcgaagttagatttgacctcactaatgtagtcttgtgtgcaatcttccattaacccacaacactcacatctcacggattcgatctccattttcactaaagaagcctataagcttcaatgcaaacaaacaacaaaaaatgttttttttttttggttgatggagaatggttttatgttgtgggtaacgaaaacaccaagttaatgctttatatgttgcattttttggccggctctcgacactttcaataattaatataatactctagatggatgtgtataattgggcagatagagtaataaatctaacggttacattcgtttttttctcaaataatataaactatatgtatttagtaacaaaacgatgacaactaacacaaataaaaaaagggcagtcatgaatttatttttctttctttttgggcgggcgtaaatttttttctttcttttttggacggtcgtaaaaact

SEQ ID NO: 14784 - DNA, 490 bp, Arabidopsis thaliana landsberg
gttactactctgctttctagtgaacattatatcaggtggcgatgaactttatgtttggttattacttgatacagttggttgtgtggtgaagctactggaagggaccacacttgggctagaatctggggtcatagttgtggtcggttccaagaagataaagagaaacaaatggagagagcgaaaagggatctcaagcgggatatgcattatcataaccgatacaaagcacatatcgactcctccaagctagaggctaagcttagtaataatattagtaaaaaggtgtctatttcagaaaagaggggagttacaacttaaagacttcagctgggctaccaatggactccatcggttatttagatcaagacgagttctttcatattcataccctttcgcattttacatgtttggagatgagctgtttaaagatgagatgagctttgaggaaagagaaattaaacaaaatctgtttgaggatcagcagcagcag

SEQ ID NO: 14785 - DNA, 851 bp, Arabidopsis thaliana landsberg
  unsure (1)..(851): unsure at all n locations
tgaatcagataatcaatattcgtgaagatagaggatccaaatgttattgcaggtgattgaatgagcgcaagagcgcacacctgtcgagcaaaagaacactgaaacaaaatatgattaattgtttaaagttcctcttcacacaataaacacccatcattaatttgaattccatgtgatcttagtctatcctccactgcaagtgcaccttttaaaactttccacatgaacaccttaatctttggagccgttgcaagattccaaatcttatcaaacaagggattaatagaaggacatacctcagcttctttaaaggatttgngtaagtcgctctactacttctatcataacccgaatttactgtatataaaccatcattagtcctagcccgactatagaagtcttctatagtgacaagaggtctctggtgcataattaactgaacatgtttctcctgaaataaatctctgagtatcagcaagttccaattccgagtgatatgatcaattaactgatttactatcatctggatatccatcaatgaatgcacattcattggtctccggttctgaccatcaaacacccatttatcaatccacacgtttgtacaatcctcttcagacctcccatcaataattccctaccatataaaatactcctctaagcataagaagggctagttccttgaggtgcattgaggaaatctgaatttaaaaagtaccgacttttgaaaatttgagacagaagactccttgaatcagtgagtaatctccaagcttgtttgccaacagtgcttgattaaacattgcacgtctttaaaccaagccccctaagctcttaagcataattaattt

SEQ ID NO: 14786 - DNA, 615 bp, Arabidopsis thaliana landsberg
gaattttggtgttaaatgttttgagtattataagttttctctatctattaatctaacattttagcaatccattagttatgaaatttcaatatattattgttgaagattttttttgttatgtataatgaattataacgttataattaatagaaaatctatcgaaaatcggctttttaacataaagtaacgtatgttatcattattaagcgacaaacgaatttatattttatattaggtatatgacaattggtaatagacgaatcgtacgttacttttaaattagtaagaaagacatcgtcacgccaactagtcaagtgcgcttgttctagtaacgtatgtttagggaactagccacaccgaatctaattcacgtgtggtttttgtggtgaaagatcgaccaatggtttaaagtattgttggtggttcaaatctggctgaagtaaaaccatattaataccttactattgctttctcttgcggtttcaatataacagtttttaaatagtccgctttctaaattaaagtaacgcacatcataatcattaggcgacaaaacaaaatatatattctaccattatatactagacatttggtgatggaagaatcgtacgttac

SEQ ID NO: 14787 - DNA, 502 bp, Arabidopsis thaliana landsberg
cttgagtctatgatcaccaccaactattctgatgccgagaatatgttcattgtcgtcaagaatctctaatacctcagtgcttttagtagctggtaatccagatttcaaatccacttctcttacgctaccaacctccagcttcttcccttgtaccacacacctactgataaatggtttgtatttttgcggttcatcgaatctcctcacaattgaccacacctattacaaacaaaacaaatcatttacatctcaaaaatcgttatctttgacacttgaaaaacagagcaaagcaaagcttacgagatgcagaggagctttgatgtgcttaacgagcgtagagctacattgagactctacaagctcgtgctatggtgtttcttgatgtactcgctctccaccttttttgtttcgacaccgttcattgttatcttaaatagcagcaatttaaataatttttgattagacaaaattattcgtgcctttaggtttttttttttttcac

SEQ ID NO: 14788 - DNA, 692 bp, Arabidopsis thaliana landsberg
gttttgctatcgggatatctttgcttttgctccgatcctctctatctccttccagtttcagtaacagaaaccgtaatctctgtatctccaactgtaacctaccaatcttctctgatcctcttctcgcctgttctgatatcctcctccttctgctactctcattctcatcaagatccattgatgatttgcttccatctgatctttcaaatccattttgaactttcgtcaccagtttcctgttgatgcttaacagtttctctaatgcttcttcagcttcgttgatctgtcccttgatcgtctcgtactcgttttcttttcctttctcgtctttctcctctgtctccactttgattttcaaatcttcaacggcgacatgaagatttgagagcttctgtaaatctgaattaagtctctcgagaactttcctcttgtttgcatctttgtttggatccgtgaatctatcggagatctctagtttgtccacaaccaatgactcttcagacaaggatttacctttcggaggattttgtgactttgcctctaaactgtgatcatcttctatcttcaaaatgtctctcgtacttatcccatatgatgagcaatcagaaacctgatcgagtacgaaatctttagtgatcatctcggtttcctcggagtagatttcatggttctgtttccgaaggcttccattt

SEQ ID NO: 14789 - DNA, 508 bp, Arabidopsis thaliana landsberg
gacgttgacttccagggattttctaatgctataacgttttccaagtgtcaattgatcttttttgttggcacaaggatatctcatacaccattgtgatctactacaagaaaacgtttcatttcctacgaaaatatgtcgtagggaatgtcatctaggaaattgaaattggtaaagattttgtaagaaatttcctacaaaatatgttcttaggaaaaatcgtaaaaaaatttgtagaaaacaaataagaatatttttaccagtttcctaccaaattttggtaagaaatttgttctttgggattttctactaaatatattctaggaaattaataaaaataataaaattaatttgcttttgataatcatactaattgcaaaaattaaatttggaatattacataatcattgatttttattttatttataacaacaaaaatattcattgattaattatccaaaataatatataaattaaattatttgtttatattaaatgttgtcatttattc

SEQ ID NO: 14790 - DNA, 897 bp, Arabidopsis thaliana landsberg
catctgatccgtgtcctctctaaccttcccgaacaacaacataacgttgactgctccgagatcactgacttcaccgtttctaaattcaaaaccgtcatttctctccttaaccgtactggtcacgctcggttcagacgcggaccggttcactccacttcctctgccgcatctcagaaactacagagtcagatcgttaaaaatactcaacctgaggctccgatagtgagaacaactacgaatcaccctcaaatcgttcctccaccgtctagtgtaacactcgatttctctaaaccaagcatcttcggcaccaaagctaagagcgccgagctggaattctccaaagaaaacttcagtgtttctttaaactcctcattcatgtcgtcggcgataaccggagacggcagcgtctccaatggaaaaatcttccttgcttctgctccgttcaagcctgttaactcttccggaaaaccaccgttggctggtcatccttacagaaagagatgtctcgagcatgagcactcagagagtttctccggaaaagtctccggctccgcctacggaaagtgccattgcaagaaaaggtattgttacgtcacccacctgtcgctctaacaactactcagtgacttcagttatttaatttcaaaagtttcaacccatagttgactattaccctcgctatatcaataattaaaaaatagtctaataattcaattaggtgaacccggtttagtaatactgtcccggttatcggtctagttgctttaaatgtcgggcatgttttggtattgcgcgccgacaatgactagaaccggttgagctcaatgaataaatcaagtaaagtccgttgacttttggaacccaatgttttttccgttaattaatattttcaattta

SEQ ID NO: 14791 - DNA, 729 bp, Arabidopsis thaliana landsberg
  unsure (1)..(729): unsure at all n locations
cgaattaccggaatctctgattactcaaatactcttacgcctttcgactaaatattcggtgaagacgagtgttttatggactaggtggaagaatctatggctaaatgttcccggacttgacttaacttgcagtgatttcccttttgaagatgaagaatatgaacaagtgttcattaacttcatcgacaggtttctagagtttaatcctgagtcacgcctgcaaacattcgaggtagattacaaaaggcgtgagatacgcgggttcaaggatcggatcggtacagcgattaaccgcggaattcgacttctagatgctgtgagtagtaccatgtattgggaggaggaatgcattatgtatccttatttggagttcatgcctctgaatctctttacaagcaagacgttggttactttaaagctccgggattcggctcttaacgatccgggtttggtttctatgccttgtcttaagttcatgattcttcgtgaagttcgatggtctggtaccatgagtcttgagaagcttgtctctggatgtcctgttcttgaagacctgaccttggtaaggaccttgatatgtcatattgatgacgatgaattgccggtttctcgtgtgagatctcggagtctgaagacgttttatgttccgctcgcgtatggagtatgttgtaggtcaagagtcccagacaaagtacttgagatngatgctccaggactagagaatatgac

SEQ ID NO: 14792 - DNA, 529 bp, Arabidopsis thaliana landsberg
ctcctgcggcgtcaccggcccgatccgcgccgacgggttacggtttaacacccgctcgacgatcgagggggggcccgtcttttcaaggaacgacaccaacgcctcgccggtcccgagttcggtgatgacctgcgcggtgttcagcttggggttgggacgaaacgtctgcgccgctgccgcaacggctttctgatcgcgcggggtgaaggcacgcaacgcatgctggatacggttgccgagttgcgccagcaccttgtccggcacgtcaacggggttttgcgtcacgaaatagacgccgacgcccttggagcggatcagccgcaccacctgctcgatcttttccatcaaggctttgggcgcgtcgttgaacaacagatgcgcctcgtcgaagaagaacaccagcttcggcttcggcggatcgccgacttccggaagctcctcgaacagctccgacaacattcagagcatgaacgtggcgtagagccgcggattctgcatcagtttgtcagcgacgagaatattgaccacg

SEQ ID NO: 14793 - DNA, 532 bp, Arabidopsis thaliana landsberg
attttgaagctttccaagtgaatcaagagcttcggtgcgagtacgaacaatttggtggaagacatccctcactttcctatcaaatggatctaaaccctcctttatagcttcacacacattcatcaattcttgaactctctccttcacctctaaagtacatttttcatctgttaatgagaaattgtccgaatcaatcaaatcacttaacattctcgagtttctctcgatttgattaatctccctaagtagtccacaacccttcttctttttgtctcttttctttgattcgtccataatcttatcgtgcaaggacatgactggtactgcccattggaaatgcctagggaaatagaaatggacatgtaaaccacgatcttgacaaggtatggctgcgacaagaacccaagttacaaacaacagtattgatgtcattgtatacactgtgagagctaggccattagtcgccataacatcgctggctcgaggggttgctaagttatttccaatgccttgtaactgccgtgattccgcc

SEQ ID NO: 14794 - DNA, 886 bp, Arabidopsis thaliana landsberg
agaggacattacttgatacttgatagaattcttatgatgggttttattcattggttaatgccattaatagtttttacaagaatatattgatcttcattttaacaaaaatgttgtgaaatgaaacactttggttaacccttttcacttttctttcctttttattttcttttataaagatagttttaatagtaattaattacatttatcacttcatatattttattctttgatcaaaattttttattttatttaatggttaagaaacaatttacataagattttcttaattgcaaagcatatctcactaattatatttacctaaacaacttaccagatttttttcattgattgtaagaaactatttctaatgacaaaagaacttctttatttaaatatatgttactatgctaaagagaatctaaattcattggtactgttatatttatttgatcaaatacagcaatgaatcatgaaataatgtatcaaatcataaacaaatcacgattattttaagaataaaatatatcactactcattgttttctgtcaagttataaagaacaaatcatattgaaaggtaacaaatcatttcataccaaatacaaattcggtaaaaaatcaactgaaagttaaacaaaaaaagaagaagatgaatgtatcgaatcacacttagttaaatagaggttggtttcacgaaaagataatataacaatatcaaaagataaaaagagagtttgcttttataagatcaaagaaggtaaaaaaagaaatggcaaaatggagtgcgatcgtattgataatgatggtgatgattgttggggtcacaatacaagcacaagaagaaagtggttggactatttgatttcgccaatgttctcagccttgcc

SEQ ID NO: 14795 - DNA, 346 bp, Arabidopsis thaliana landsberg
aatgccattgttcatttggtttcgatttttccaattcagttggggattttttgtgacctgttgggtgaatgatcaccatttgcctacaaaagactattagttagtctaatgtcttaaatcgtcagttgcatcaaaaaacaatgtgtatatggacatgatgcaaagtatacagcagaaacaagcaaaaagcagaatctatctaccttgatagcattattgttcgatgccctcgaaagatccaatctagactctttaagagcggcattagttgaagtcaaattctgtttcaaggagccattctcctggttcaatctggaaatctgatcctgtcaccaagtggctactg

SEQ ID NO: 14796 - DNA, 466 bp, Arabidopsis thaliana landsberg
acattggctacctgttacctccgattggttctcatcaccaccgtgaattagaggacttgcaaaggcataattatctgaatcaactgagaatgtcgtatcagaacgattatgctcatcaatcttattggtataatactgatggtgatggtaatgggatgcttaataatggtttcttgaatgatgttccttcttcttcaagagaccgtgtctcagattactacactaatcgttttgggtatgaaggttacaactattggaggggtaatgaaggttttgactataatcaatgtcaggcctcgttctctgcctttgctaaagacaaagaaatgagtgagaggttggggatgagcatctttcagggtactaaagagacagttgatgcgatttacaacggtctcattggcgatatttgtgagttgatggtggatccttatggtagtgatgttgttcagttgcttatcagaag

SEQ ID NO: 14797 - DNA, 321 bp, Arabidopsis thaliana landsberg
gcacatattttcttttatgaggccaaatctgtatgtggtattcgaaacgaaaacaaaatgtggttcctttagagcgatcaagcatgttaaagttattgagctgaaatcttagtaggatctaggtgtagatgatatctcatgatgactctttactatatgagactaacagttttacttgttatctctctgtagatggaattgatctcaaagataaggaatccatttattgtggaatataaagattcttgggttgagaaagtaagttcttcaagcctctatgttacttcattagagattttatttgcatacatatacatataa

SEQ ID NO: 14798 - DNA, 688 bp, Arabidopsis thaliana landsberg
  unsure (1)..(688): unsure at all n locations
tctaaatatgtcacatgaagaaaaggagagaaaacataaaatttattttcagtatgtgaaaactcactccagtcaggggtgggcagatgatttcatgaagtatgtgcaaaccaaaacattgattttcttaatctcaactttgtgttcttttttttttagattgactcttacaaacattttatgcagtaaacttattgagattacaaccagcgcggagctaggagctggattagccgccacacttgaacttccagaacatgatgtgattcaacaatactcaaagtctaacaatagactgctgattcttgtaagtggtacatatatcaagattctcttgtaccttttcttgttgtcacttagttatctttttaacttctaaaacaacgtccagggattctatggaacgctcactcagccgatgaaaaatcaagagagaagaggcgacggaatgaatcttgaactgcatccacagctaaaagagagactcaaagaattatgcagtgatccaaaaacaacagtagttgtcctgagtagaagtgaaaaatgcatattggataaagtaaatgttgcctctctcttcttttaaatttagttacttattttctcattgcgttctgacattgtaactaanactaaaccagaaacttggagaatataacatggggttggctgctgaaaatggggatgt

SEQ ID NO: 14799 - DNA, 583 bp, Arabidopsis thaliana landsberg
ggacagaactccggtgtttgtagacccgccaatgtagttcaacagcaaatttctttcgggcggtgcgcgatttggaaagagtgaggagctgtagatagttcctgaagaaatacgagcaacagcatgaagattctatgaacattttgacataattgacgattataactacaagatatatacctaatgtttcaactccttgcgtgcgtggatgcaattgcccaaaaccctttagttcaccatctatcaaacattctgttcggattgcttctttcgggtacgagatagatactgctgcaactggtgggtaatatagttttgagagtgcatttgcagcagattcctgagaagataacagttgcagcacacgatttaagaacccatatttgtcgaatctatgaattttgagcaaattcctagttcgcaaaatgagaaacttacagaaagagggcgcaagagaccgcttgcaacatgagatggcaccgtcattacaacacttttgctctgcacggaaactaaaccatctggagtctcatatgttaagttgtatcctccgctctccagcttagtgatacctgagagcttt

SEQ ID NO: 14800 - DNA, 1052 bp, Arabidopsis thaliana landsberg
gcttattgaatattttagatatgtatagcttgtctgtgagatatgaagatggatttgaggatgatacatagcgcgctgacgaagcctaatgaacttaaatttaatttgtttcatttctagcttgcggaacagtacaaaattagtatatatctttgatcagctgaacgtgtaatgcaagtcaaatttcatgactctatctctcatgaatgataagggccaaaggtggtcgaaaaatgaaggatcttgtgcttcattcctctgttttggcattacaaggctgcgttgttgatatatttgctggtgataaactttaggactttcatatcccaaatttgcttttcagagcttcttggaaatgacttagcttaatgtgacaatactttttacaaacatttctactccacattgttcagattattccgagaatctttacacttggtgttactggtttttaagacaaacaaagggagcaaagggagatccgagaaacatttcctctacagttctgacagtgatcttgtgggagtgaagcagagtgttaaagatttgttcgacgccatttttatggatttgcatgggtctgtgtttatcaacagtttaccgaaagcatgtttggcaaatgatagttcaagatcttagaccaaatgaatccttattaacaagaagcgtaatgttcttaacatatatgtttttgtaaaaatcctcaatagactaattgaccacattataacaagaagtttcagatcaagacaagtgttttggtttgcagtcctctagcttttatcttctgtttgaaaatcacaggactgtgccgttgaaacgtttgctgctaatcttgcagtgatggattaataatgattaggattattacttatctttgattgatcatcaatatcacttttagttgtacacgagttcacatagaaaaaaaaaaacagagatgtttaagcaagcttacactaccaatataaattttataaaatcatgaatccaaatggccttggatttgtcgtttattttttttgtcaataacttattacaaatattaaatt

SEQ ID NO: 14801 - DNA, 1066 bp, Arabidopsis thaliana landsberg
  unsure (1)..(1066): unsure at all n locations
tttaaaaaaaaaaaagagccacaaaaaaaaacggtttaggtgttttccggcgagtttatgcaaacattcctattcaaattagggtcagaagaaatcagtcggagaaaacagccatgggaagaagaaaagtagagatcaaacgaattgagagcaaaagctctcgacaagttactttctgtaaacgacgaaatggtctcatggagaaagctcgtcaactctcaattctttgtgaatcctccgtcgctcttatcatcatctttgccaccggaagactctacagcttctcctcaggtgataggtaacaccattacctattttatagtttctcttttgttaattaaatctttctcgaggaatatataaactacagaactagggtttttcttttactcttttgaatctttgaagctgattttcgtgttttgttcatccaagtaatgatgtataggtttacccaaatttaagattaaacaatgtggtgtccaaagtccagacatgttcttggtgtttgttttgtgttttatcatattctattgttttcatttgttgcaaggatttaattttcctatatcttttttttttcttgtgaaaatattatttcatgcacttggagagatttttctacacgtggtaatccgtactttaggtttgtcttgggatttcaagccatcttaattgtttgtgtgcttattctgctgtagaggtatagaagatcaatgtacattgtttacttttgagattaatttaggcccattatccatttttttactcaactcaaatgaaaccccggtagatttgttgagaaacttatcaagggtctattgactggaacagatgccacgcactctttttgntgcattccttggttaatttcaagtgtaaagaagatgatttatttactacttctctttttatttatttgttgcttaaggaaaagggttctagctagctgattttgatggtcaaatttagtgttttggataactataaagaagactcaaattaanactattcacacatgctgcattattcctttgatcggatatcggattaatttctctttttg

SEQ ID NO: 14802 - DNA, 832 bp, Arabidopsis thaliana landsberg
aaaaagaatacctaaccacttgaaaggtaaaggtttagccagtggttctccccccctccttgtcgaagaatccgagcccctgaactagatactgcagatctgattgaagaaaactcgcttaccctaataggccgtcttactaatcctgcctgccaacgcctctgggccttgtttccattcctgtccaatcgctggaatctgaaaggcaaagctcttggctcagatctgggcaaaggttgctttcagttcaagtttgattttgaggaggatctgctttctgttctgaagaatagaccttaccactttgaccaatggatggtcattattcaaaagtgggaaccaataatctctgattccttcccctccatgattcccttctggattgaactgcaaggtctcccaaaacattattggcaacccaaaatgctagatgctattggagacgatttgggagatatcagagacatggaaatcacttgctcttctgtaaagatcagagttcttctgaatggcctgaaccctcttgtgaaagaaactgtggtggaattccctaatacgcaagacgctcgtgttaccctagactacaagaatctgaaaaaccattgtacacactgtcaaagactaacacatgataaaacgtcctgcctagaccaacaaactgtaccagaaccccaaaaagctccttcaccattgctggtaccttctaggtccttacaaaacagtaactccagagactattatgttccacacgataaatatgctgcccctagaagtctttctcaggggtctgagagacactacattccctctcaagagatatcacatagagata

SEQ ID NO: 14803 - DNA, 686 bp, Arabidopsis thaliana landsberg
gcaccttaataaataaataaaagaaacaaatacctttgagaattatagggagagtagcttcctgaacaacagtcattgtctcgtatccagcatccttaattgcctttagcgataagggagacaatgggtagtgatcaaatctgttaaccgaaaagagtaactctcaatcagacagtaccaagaggtcaagatttacaatcaagcaaaactctgaggttgatgtacactcgattaattcaaaagcacgcagaagaaactagatttgcaacaatgtttgtttaccttgtcttagtcaaataagaatcatttgcattccttgttttatctgcttctataacattctccttatcaaacccaaaagcagaaacagctttcttcttaagaaagtcataatcttggtcctcttcctcatcatcttcactaagcaaatccccaatatctcccattactaaactcttgacatcctcatcactactttcgtcttcaagaagatcttcccgtttccttaaacccttgtagtcttctctatctctactaaagcttgtctctttcttaccacgaaatgacgcctcgctactctttccttgaatccgactattgaatcccctttctctatcaccaccataacgcttattcctaaaggaatcaacttgggtgcgaattcctctcttttcttggtttcttcc

SEQ ID NO: 14804 - DNA, 706 bp, Arabidopsis thaliana landsberg
taacccttttcggcacttcagcattcagttgttcctttctccttatcatttttctcatcatttgcatcaataaccttctctagaaggttatggggagttgcttgtacttctttgagatgatcccattttgaacatatggtacatcttggcggaagctagaggtatttgtaagcaatcattgcatcaatagcatttgcagatttgaagcgatatttttttggcagttccttcgatagatcaacttctacagatactttagcttcttcaaaaattttacagagctcagtatcttggtgcagcttttttggttctcacactgggcttgcgagttagcttaaccccttccaggtatacatggtgtgcagaacatttcgaagcgttatccacataggcatcgatttaatctctggctgagcttcctctatcaccgaagaccatttagaaacaatcatatgcatatcagcattgttccacataccccgatgaagaaccatagctcttactaaactgtctttgattcaaaatttgattgttttagcatcaactaaataagcatctatcttcactgttttatctatgagagaccagatcttgttcacaattacgtggacctttgtaacatgcagagcaatttgtgggaatatgccaataagtaaatcttccatagaggatttgaatcttcaaatatttcatctagaacctggac

SEQ ID NO: 14805 - DNA, 989 bp, Arabidopsis thaliana landsberg
agctcccttttgcccactctcacacttcacaagcataaactctcatcgggagctagggttttagctgattctcttgttacggaaccacaagaagagaagagaccaaaaggaggagccaaaatcctctctttctttggaattagggtttcctcaaaggaagtgaactgaaaatggtcgcggacaagagcaagaagtcgaaaattgaagagaaaggcgaagaagaaaacttggagcaaatcgacgcagagcttgttctctcaattgagaagcttcaggagattcaagacgacctcgagaaggttaaaaaatctcctctttcacttttcgttaatttgctctgattctccagatttttcccctttttcttaaccggtgtcatgtgctctgtatcctggtaaagttgaatggattccaattttgatttttatggtacagattttactttaatgttcatatgtagctggatttgaatgaaggatcgtctttttgtattgttgctacagtagtgatagttgtgtattcgtacaatgcaatttgagaacatgttgtgtgatttctgcttatttataatttaattcatgtgactgctctctgtaattactcctccaatagctatagagaagttagtggaaagagtactgtttgagaagttaaagctcaaacaattgcatatcattaactcataagtacagttagaattgacatgaactctaatgagtgtgtgtttcttcttctttctcctaactctggtttgttggttatagattaacgaaaaggccagtgacgaggtcttggaagtagagcagaaatataacgtgatacggaaacctgtctatgacaagcgcaatgaagttatccaatcgattcctggcttttggatgactgctgtaagtgtttataggttgttttcagttactgtttttaaacatctactacttattgaccaatgaccattacacattctttgcagtttttgagtcatcctgcct

SEQ ID NO: 14806 - DNA, 478 bp, Arabidopsis thaliana landsberg
tttatatactgaattcacaaatagagtatgttagcgtgttctgtcatagtaagaccttgtataagtcgatgaggacggtgtcaagggaatcttgggaattcttggaacaacgaggacggaaagatttgatagcttcaatagcttcttcagaacggtcaagttgtttcattacaacagccatgtccttgagggcactgtctactctgtctccagtgttgatggctttccaaaaccacactattgccatctccgggttcttctctatcaactgcaaccaacattaagacatactaattattaataaccaattactttactcttctcatatagaaatatattcatgtatttgaccaattaggatatgattcgatgggccggccaataaaaaatgtgaagaattatattctttcaaacgtaaaagactttttgcactattattcggaaaaagtaaacgagatcccacaccgttcggtgcaac

SEQ ID NO: 14807 - DNA, 624 bp, Arabidopsis thaliana landsberg
gtggagaaccgggcgggtttcttaaaaaaatcactatcctcttcttcatctacaagaaccctaatctcactctcaaagattaggtctttctttgcttatactgtactccaatttcgtggaatcaaccacaccatttggcgagaaggatcatgaagatgattaagaacacaagtgaagaaagtccaatagcaacaccaagcacaactttattaggaccatgatgctcttctttcttcttctcactagtatcatcttcatttccgtaatcataatctgaattcgaatcttctttctgcggcggtggagacaaaggcaaaccatgtttatcacactgagcaatacccaatttcatcttcgatgacaatacactatggttgtaacaaagatcactgtttccaccaattttgaacacttcgagattctcgataaagctcgcattgaatggtagaactccatggaaggcattgttagctagattcaagtgtgtgagatacttcattttggagatgaatcttggaacggtgcccgttagttggttcccactcagatctaaatgtgtaagctctggaatggatgagattgaatctgggattggtcctgatagcttggttgaggataaagata

SEQ ID NO: 14808 - DNA, 433 bp, Arabidopsis thaliana landsberg
cagctaaccaatattgttcttttatcttttagggtttgcaaaacacacttcctcccacttgtacaagccatatcaaaccatttttggtatttatttctgagttttttttcttgtgtttctgttaattataatgttcctcatttacttttcttgctttcaatatccctcaatgttttttccctcaatacataatcaaccaagtcaagacccctttgtttattctcaactcgggatttgattcgtggcacgttatttattattccatctctatctttcaattctttacgatgaatcacaaggtttgcttctcttgaaatatatcttgtttctttacagattgcaaatagtttagccccaccatctgctgataagagtggcagttggcataactgcagttttagctttaggtgcactgcctctcagatgcacttct

SEQ ID NO: 14809 - DNA, 757 bp, Arabidopsis thaliana landsberg
ttgacatacagttcgtttattatagatattgctacagatttcaggtatgacaaccaaacgactatgaaataactaagatggtaagatttaaacaagttcacggatttcgttggagacaacaacatagagcatataaaatctctacactacaacaaaactagcactcctcctaggcaaaaataacaatagtaaactcatgaggcttcagaagtttatcattcactcacttgttcaaagccaaaaatagctttgatcaggcaatgtaggcaaagatatgaaacatcatcaccagcctcacaccgtcaaaaatcataatcaaattctctaagtaaacaacactaaaggcctcagaatacattttgtagaagttatatcattggtttatcaaacaatgtaggcaaaatttgaatcatcataggccttaaagctgcaacaatggcaaagagagatacaaatctcagacaggaaaattgaaggagcaatgagcctcagactaattaaagaattcatttcagtggtacatcaaacaatgtagacaatctttttcaatcatcactggctctttatctaaacccaagttcacaaatactaacaaaacataagaaaggttaagactttgcaaagcacacagagaaaaagctaaaaaagcacaactttacttaattcaatgaatagaattctatcaattaacaagaaaactaccagacatcatgcgacgaaacaaaagtacgaagcttgatagtataatggaactgaa

SEQ ID NO: 14810 - DNA, 658 bp, Arabidopsis thaliana landsberg
  unsure (1)..(658): unsure at all n locations
accttagtatcacgcttataagtggatgaaaatctaccttgaagtagctaatttgctcaagaatgggttcgtgaatcagagggaacatataaaggtggttgaagaaacaaaggtggtcaccgctccttagaggcggaaacataatgccaatcttcttcaagcaaatagaaccatgagaaataaacctagcagattctaaagtcgaggttctcaagtagctttgagttgggaacatagaacctttcttcgtgaaaattagaattctcatgatcaataatcctaggtgaatctaaaagcaaagatttcttgtataaccatagcaacaaagaagtgttccgttgtatttgacgtccatgatcaaaagaatatgataaataacatttaaattgggtaaggttagacaagagggagatgacagacctgagccttagtacaaagcaacttggatcaccattatataggttgggcttcagaaagcttaacgggccatatttnnnnnnnnnnnnnnnnnnnnaacccagttccttttggctagtaaagaaaagtttgggtattggcgaccgttgtacggaggtagagcccaatccatggtgaaacaagcaaactcggtaaaggtaatgattgtctttgatggagtagcccgagaattgnagcatag

SEQ ID NO: 14811 - DNA, 827 bp, Arabidopsis thaliana landsberg
caaatatgcttggctagctcataaacgttggtaagaatgttgagtgttaatcatatatgctctagatgttacttttttgaaaattcttatatattttataattagaacatattttaaaaccaagatttacttttctctctattaattaattcaattcactatagaaaatatagctatcaaatttaaataatgtgttttataacatatgcaaacatgcataatgaaatggctaattagaaaagattttggccatgaactgaataatactaggtgggatttaatagcaggaagagtggtaggacgagaggcaaaggacatagaaagatattggattatgagaaactgtgatcattgttcccacagacgacgccgagtccacaaatttgaccgtttctctatttctcctccttaattttatgttatcatggacaagataaaagctttaagttgttgagtagaacaaaacttcgatcgatatttattcttctcatcaatggttgtctaagttattgtcaattctacaagttgtgccactcgtcttgttccaactatacattttgtaactccgtcaaaaatattgataggaaaaaatactgattaaacgaggatattttgaagttcgtacatagcagggacagaagattaatttaattcctagagggataaattatcgggaaatttacacgattaccacttccgcctgagatgaaggtccactcacacacaccttacactcaaaacggatagtcgttcattttgtactgctacctgtactattaccttttattatctgatgggccttcctctcctgcggcgtttaatttatg

SEQ ID NO: 14812 - DNA, 938 bp, Arabidopsis thaliana landsberg
aaatcctaaagacatcatattgttttgggtctaaagtgtcacacaattttttatctattcaaaaacactcttcattttactcttctgtgcattatttttatattttaaagacactccatatttttgaccaatggagatgatcttatgcacccacgcagtggcaaagctagaaataaatgttacgggtcaatattaatatgtatataagtaattaatattaaattatttattagaatacagttttacagctaattttttgtttaaatattactaatgttttaaataaaatattagaaccaaaataatgtcaaaattgttgtaatcctcacaaatgatgtaaattaatatataagaaagatggaaaaagttagacaatatgcataaataaaagaaatataataatagaaagggtgcaaaaacaggatttgaacataagttaagggggtcaatattaatattttaaacaaaattatcaacaaataccaaataattaagcctaataaaaagtttcctaagagttatgggggtcaagtgaccccctactaacaccctacctccgccactgcacccacgcgaaaaggtatctgcaaacctgtcacaaatgtgcgagaaatatatgaggagattaaatttcctcgcacgtccactcaaatttaaaaaattcgactttgataaactaagctttacatgaactaaaaatgtcaacttgccgttgcaaatcccttaactatctctcgcaaaattttgaatatttctaccaaatactcgcaaacattattgacaaattagtagcaatatttttacaagctcagtaaataaaaaatgaaggagacacaagtttggaagaaagaaaaaggtacagtttggaagacaaaagtttgttatatttagttcggttattagttaacaaaaaatgtatgcggaacacaaaatatatg

SEQ ID NO: 14813 - DNA, 1009 bp, Arabidopsis thaliana landsberg
  unsure (1)..(1009): unsure at all n locations
gtagaaagcccggtgacgttggacttagggactttattttcaagtatttgccattacatagagctcccgtcatagaaagcttgcgttttcattctaatagcccagatattaaacctgaagatatcagacgatggattgaaattgcagtttcacgccatgtacatgatcttgatattgatcatttttcggagaatgaaaacatattcctgagtagcttttttgcctgcaaatcgctcgtgaccttgaaactaagaagcgtgactctcagggatattccctctatggtttgtctcccttctctgaaaactttgctacttgacaatgtgtcatttgtagaaggaaaatctcttcaggagcttctatctatttgtcctgttcttgaagatctatcggtgtattgtgatgactatgaaaatacaaaagagttaactattgttgtcccgtctttgctgagtttatcactctatatacctgatgaatggttgttagatgggtattggatagatactccttctttggaatatttgaaacttgaggattggaattcttgtgatcacttatctttgattaagaatatgcctaagctgagggaagcatatgttgatgttaaatgctttcttcccaagagtgtcattgaatcaatcacatctgtcaagcatcttacaatatgttcaaaggttccatttctatcaactgcaggttgtcaatctaaattatagaactctttgttaataattttggtattgtgggcaggatgggtatggtgatcgttttgttttcaaccagcttgaacatctgaccctatgcgtgtgtagaggggattcgccgagtctcnnnnnnnnnnnnnnnnnnnnnnnnnctaacttacgaatattagaaatctctgtaatggaagtaagcttcttcgatataaactatcttctgtttgactgatgcccaatatggctttaatcttattattctgcctggactangatcatgtggatgatgtgggtattagttttggatg

SEQ ID NO: 14814 - DNA, 567 bp, Arabidopsis thaliana landsberg
acgacatgaaatttttcataatttcagatatttctattgaattaattctgactttcagagagaccatcacacccctgcgctctttgttacattcccacaagcttccaaacaaagagaattaatggaaagtaagattttcaaaggaataatttctcttcctcgtcctctctcactcacaaccctacgcatttaaaattattgaaaaactatgtagtatattaaataattaaaaggaaataaataaacaaaacccttatcttcttcatgagaatcatttcttctccacaaaaccataccttctctaacccctcttctcacttttcaataacccctccatatatgactcatgctgagatcatatgaccaatatggttcctcttgaatcctcaacgcttttcggtgtttacggcggtttcacggactcgatgatgatgagagaaacaactaccaacaatcaagatcctagtggagatacatgttccgtctccgatccagcaccaggttctactgattattataacatctcttcttctccagtgaaagacgacggaaacggcccaaagaacg

SEQ ID NO: 14815 - DNA, 675 bp, Arabidopsis thaliana landsberg
agcttaaactgcacctccaactccaaccatatttgcaccattacctattaggttaaataattcttttggccaatatccgacatctatgttaggtgcatttggtatcagttttgtaatccaccagtttcctgtttgtttatcctttttgtgtataagaaaataatcataataaaaaaaattaaaaattgaagaatgaaatagcataaaatatttaaaaatgaaaaacataaaatatttaaatcttgaaaaattacctgatggatggagtaatgcaacaaatcttcctttggctggtccaagggctgggctatgggaacctcctgtgatacttgaacaaaccctggacatgccgtattataacatccatttccattttcaccctagaaaaattatatttaacatttacatgatatttgatttaacgatttttgcttatatataaaccataaataatttctttcacatgcacaccttccaaatccatatgaccaaacacctccatcgccaaatatacttggatttatctaaaaaaaaaattcgatatactttaagtctctacctagagaattaatgagttgataaagcaaacaaaaaaaacaaaaaaaaaatgtaaagcttaccatccaacctgcttggataaaattgatctgatggttaaaaccactgcctacatat

SEQ ID NO: 14816 - DNA, 771 bp, Arabidopsis thaliana landsberg
  unsure (1)..(771): unsure at all n locations
aaaggagaagcaattagactcggaagtatttagtcatttaacattcaaagttcctcatacgcctgaatctgatcagatactattcacatgcaacttaagatgatgcaataaaaaaccaaacactttatccaacttgcttttagagactaaatttattcgacaagtaaaagagaactaaacacatgaaaaagaaacatatttattcccattaaacagccagataaactacctacttgggcataagtcaaaattctacctataagaatccaccatcccttgtaaatgtaactggaataataagagtacagagtctagtgaacatctaacacaagtaactaagttgatacctgtaagtgaagagcgactagcaatgttatagatacagaattcagggttcggtgtagcgcactgttaacttcatgagctttggcccaatgcttaacctgacatatgagaatagtcacattagtaaatctactgaccacaactacacatactttaactttgaatacttcatcatacgaaaactatggttagccaaaaagtccatagctttttagttacttcactaaaatctgtgagactcgcagattccactttaatagtaaagagaaaaatattctgaaaaattagttagtactggggaaagcttttgttgaattgaaatcataaagtaactgaagagacttgaaagaaactaaagcaacaaaccataggcagtatcataagaaatctataaccctaaaagttctagtcattcaagnnattttt

SEQ ID NO: 14817 - DNA, 549 bp, Arabidopsis thaliana landsberg
cagatatatgagtccaaggtaaattttcaatttttttatttgtttctgtggattctgtaaacttggggaaacttttcatcatctaaattgtttcttgagctaatattttgagtcttgacattgatttgaggataaagttttgacatttctgagctttgtgtgatgacaatgagcttatatagggtatcgaggacctaggtagtatgagaaactgttctttggtttacacttatttcagtaactcttgttttgattatagctttgggaattgagattgtggtacattttcttgaggatggacttcaatgtcacttgtgctgtatttttcctttttgttgcaaattcttcttctactctatttcattaaaagaatttgtggttataggtcaaggaggcagaaatgatatctttgcagaagcagcaaaagattgaggaacttgaagctcaacttggagaagctgaagatatagtaggagagttaaggatggagttacgagaatcgcggtatctcctggagaaattgacaaatggttgtcaatcaaatcttag

SEQ ID NO: 14818 - DNA, 1085 bp, Arabidopsis thaliana landsberg
ttttttaatcgctttgtttttttaaatccaaattctgatcctctttatttatcaccgataatctataatatttttaaataacaaatctaaacaatgtaaccggtaactaatttcaacatgtaattttttttttgtatttgttaatatcgattataatatttaagtcgtaatttattttttccgtatccaaattattctttttattcaattgattaagattacataatttagatttgttatattatttaataacgaatatatgttgaaattggctaacattacatagtttatgtttgttattagaaaatatggtggattcagataaatgcagggataagagttcgggttgaaaagaccacataaaaatagttgaagttacttttgatcgctttcctagataaccgtcatatataaaagggtaattgggtatatggacttcctctaaggccaaagttgctgaatctgaaatctctaactagtgtagatatctactaaaccactactcagctcacaacacatgctacacacttaagtgtctcacttcattttcgttcaatctgttttcctaagaattttcgttacaaataattatcatcttttaatagtgaaccgcaaagattagtacaaacgagtcaaataaaaaactctagatatagattctaaccaagctcattaagcggatataacttctcttttattatgtcagaaattcatacaaataaaaatgacaaaatagtgattcttttaaatttttgaaatggcaaatttgattagatccttgcgaagtgttttgcccgatggagtctttggtatagagtctataaatgcgacttttcttattttcttatatggtgccacctgtttattacattaacaaaaattaataacctaaaattacaaaattttatataattgaacttagttatgcatggctttgatcattaaagcacctgtttagaaataaagtcgataacctttttctcacaaagattactctcaggctttcgtgctaccgaagccatcggaaattgacctgcttctttatctggaaaacctttgccatgcaacaaatcaaaaattcaaac

SEQ ID NO: 14819 - DNA, 553 bp, Arabidopsis thaliana landsberg
gtgtgagatccttcatgcacagcgtctcaatgccttctcactctataccacatcgtcccaactcctaaattgagatgcaattatgaattctttattaaagcttctgtattcccctgttttacaacaggaaaaggaattatgccatatgaaaaacagatagtcttgtacacctgagaaaaagtaacatattctaaaaggtatactatcaccaatttattttcgtgtgacttgagatggaagcaatcaagtcttgaaatagagaaaagataaagttatagactttaatgatgtgctatctctgcggttgtacctccacaattacgtctaacagccaaaatgccacagatataatttcgctttaatttttgaagctaaatatgcaaatatggactgtatctaaggaaatcgaaagatttcacactgcggttgaaatccttaattttcaatctgacccatcatatgttaaatatattctgtatccagatataaaatgctgccatgaccttcttctaactacatattaactctcagaatacaacccaaagtatatcga

SEQ ID NO: 14820 - DNA, 750 bp, Arabidopsis thaliana landsberg
caacgttctctccggatatttttacgacaggttcgatttcttattcgttaaaacccaactgatgaacttacttacttctgtcacaaggtaataaccttaatttgttttcttgttctctacgtatttatcaggtttaaccttaagcttcaaacagctggtatagtagcagccagctttggaatggctaacttcatcgcccgtcccttcggtggttacgcttctgatgtagcggctcgggtttttggcatgagaggccggttatggaccttatggatctttcaaaccgtaggagctcttttctgtatctggctaggtcgagctagttcacttcccatagcaatcctagcaatgatgctcttctcaatcggtacacaagcagcttgcggagccctcttcggagttgcaccttttgtctcgcgccgctctctagggctcatatcgggactaaccggcgcaggaggaaacttcgggtccggtttgactcaactgcttttcttctcatcagcgaggtttagtacagctgagggactctcattgatgggcgttatggcggttttgtgcacactcccagttgcgtttatacattttccgcaatggggaagcatgtttttaagaccgtcgaccgatggagaaagatcacaggaggaatattattacggttctgagtggacggagaatgagaaacaacaaggattgcacgaaggaagcatcaaatttgcagagaatagtaagtcagagagaggcccgaaa

SEQ ID NO: 14821 - DNA, 601 bp, Arabidopsis thaliana landsberg
atagaacaataattatctaactttcccatcactactaatattgctacgtatagccttctttctctcttgaatattaggacttgtgggctatctaagaatcagaaacatcaaccattatgtcaaagaactactattattcataggctgaaacgttgtttagatttgaaaatctctctcttatatgtatctatcagctgacgaaagcgggcaggctgcgtaaggggctcatatccacggcgagacagtggttaattagtttcgatgaaagcatatgccagattttatccaagtaaacagggttcagcaataatatcgaagatgtattttctgttggaagaggaaaatgccttcaccattacgaggaaaatacttcaatcttccaagatctttcatacgaaatcagtgacacaatgatctttaaaccttccaaagtagaagaatcgttgccacaaattaaaaaatcatccatgttgaccagcacacgaagctctacctctttaagattatatgtaaacaacaagtagtcagaacgtgaatcaagaaaactaaaatcgtgtaggtcatctatgaacttagcaaactaaaaaattagaaaaagaag

SEQ ID NO: 14822 - DNA, 778 bp, Arabidopsis thaliana landsberg
  unsure (1)..(778): unsure at all n locations
acacctttgaacttacgttaaatcacatcattacaaaaagagtttttttcttttatcaaattaaatctccaaagaggggtggggtcattgcacatcttttcctttttagaaaattccaaatgaagaatttgcttctgaatatgagaaaattcgtatcaataaatttattcattaatctacaaaaggaaaaaattgaaatgcatcatatgatgttttgcagaatcaatgactctgtaacaaacagagactaaaagggtccttaaaggtaagttggcaactatcttcttgtttaagaaatgtgttaatctttgtgagtcaaggtaattaggctaaacttgttttgttgattagccttgacgctctctgcattccaaaattttgttgacgaagctcttttagagtcaatagaaaataacaattcagtaaaacaaaaattacacatatctttaagatttaataaaaagcctaattcgaatataatgttgctttcttctggacttaaacacaaatctatacaatttaaaaatattcaaaacatacaatcaatatccttgaaaatggtctgttgatcgactcttctgtcgccggattgcttgaacgctacagtgggagcgattctacaactcctcctctggtgttctagcactagttcaccggctaaccaatccagcttctcataattgctttcttcactgattntcttaccaccaaacagaacagactctgcattcttttgcttcagcatctcctcagctactcccacaagcatattcacatt

SEQ ID NO: 14823 - DNA, 555 bp, Arabidopsis thaliana landsberg
tttttgtttaatcaaccactttatcaacttaccagcagaactcaaatttacatggtggggtgcacgtaatatgcatacaaccctggtttttctctattggccgtttgcattttggacaaggcttggaatttgccaaaatcctgaaattcaatatggaacttagcagcaacaaaacaaaatgtgaagcatgatgcaccctaatgctaggagatggaagagaagaaaccgaaaatggttttcttcttatagttaaaaatgcaaacatatccaacattttggcttcctttggctatacaaaatggtagccataactacgaatatataatacaagaaaacaatctatttataaagaacccaaatattttaaaaaatctaagcaccctttaaggtcgagcacaacaacaacatatctcaacgatactcataaatcaacgtaccaattcatattctccgactcagcactattcttcaatacccacttagaaacagtgtcacaatctacaggacggtgagcttcttcagcacactgcagacccatgacgataaaagtgacat

SEQ ID NO: 14824 - DNA, 588 bp, Arabidopsis thaliana landsberg
ctgaagcggattctctaatttcttagtatatctaaaagagatccaaattgacttgaaagaattctctttatttttagtttctcgtagtgcgaatataaaaacggattctttagcataaaaagtttgtaccgaaccgcatcatgtcacttatgtaaacaatatcctttaggaatgatttgtttgagcatcattaattaagcggatgacaaaaaaaaattgtttgcaaaactcaaaacctctctcaaacattttaaaggactacttggtttccttttttaatcagatcacaaagtccgaatctttaacatttctcttacagaaatttgattccttcttcgtcaaagcagttacttcagtcgctgtagaacatgtttgacagattgcaattgttctacttctatggtcggattatggactatcgtgagacttgtatgatctatgctctaaacaaaacacattaacatttaagtaagctaagatattcttccatgaaaaaacctaagattttttcttggaaagtcaatgaacctgaagacaaatactcttccgcttttttttcatttttttttcttttctaaatcgacatat

SEQ ID NO: 14825 - DNA, 611 bp, Arabidopsis thaliana landsberg
taaagagggaacatagtattcatgtattccttctggccttccatttccaagagatttcgggtacggatgatttcaacaagagccactataagtgaaaaaacgcatccagccgagaaacctgaaaccaacttcctcataagcaccacaaagtttgatacaatgatactaaaacccaaattatgcaagttactgagacttttacctgtggaaaatgtaattctatgtctctctcgtttcgctttaggtcgtaaaatgttcattgcttttgcccgattagcgttagcaaaatgcttaatgaatgttgcttcaacacgctccatgagtctcattacctatcataacagagcaatcatacgagaataaaaaacagaggaattgatgaagttactttattatcaaataagaaaaatctcataaacctcttacctcatcagagcttcccaagtatgaactatcaaccactttcatgtaaggcttcgttgcatctctcgaagttatctgtaaaagacatttcgtcgaacacattgcagtcattcatataaaaccttcaaaaaacctcaactcagaaatctcaaagcttaccttatcatacttcttcaatatcttcgaga

SEQ ID NO: 14826 - DNA, 670 bp, Arabidopsis thaliana landsberg
cttctcttcgctgatgataccatgttcttctgccgctcggatgatggaagctgtaaagagctaatgagcattctacaaaagtatgaaactgcattaagtcaaatgatcaataaacaaaagtctgctatcactttctccaccaaaacagaacctgaaataagatctaaggcaaaagaaccgctaggaatccaaaaagaaggaggcctaggcaagtaccttggtcttctcgaattgtttagaagaaagaagaaggacctctttaatagtatcattgatcgcatccatcaaagaacattaagatggtcttccaagttcttgtctactactgggaagacaaccatgttgaagtctcttttggctgctatgccaacttacacattgtcctgctttaagctccccatctctctgtgtaaaagaattcagtcagcattaacaagattttggtgggatgcctctgtagaaaagaggaaacgtgctggatatcctgggctacacttaccctatctaaaagagatggaggacttggcttcagagaaatccaaaactttaatgatgctctcctggagaatcttatcaaaactgtctggacttctggccagaactcttaaacccaccaaactcttctagaaatctttaatgcattacaccctcccttaaattgtttacccac

SEQ ID NO: 14827 - DNA, 895 bp, Arabidopsis thaliana landsberg
  unsure (1)..(895): unsure at all n locations
ttttttttttttaacccggactcttttccctacctttaatactggtttctgtttttcccattttttgttcgaaatactcgcaatatgttaccttgggatattttgtttttataatcggatatttctaaaatatgtggcattcatatttataaagtaagataatccagaattactattttcagtgatatgaaaatgtgaaatggattaaaaaaaaaaatgtgatatgaaatatctattttgccactacaaatattaacttttttgaaatacgaagatttagtctcacaaattcacaattcttcgactattcaggcagttgtacctgacatcgctgtttcacaactacacatttgttgcaaacgtgcgaccaatttgcgatgatcattttatgatttcatgtggtattctttaagcagcctcaaattcttaatttgtgactcttttacaaccgattaagttgtcttaaattcgatgttgtcttttagttgcagattctttgtactttggctaaatcacactccaatactctattgaacacaacatgttcttagcaaataaacagtagtgatcattattctccatcaaatcttggcatacacgggggactaatatggcgttaatgagcggccatctctcaatcctattgttttaaatcacttttgtaaactaactccctcatgtttcactatgtcggatcttatgtcgaaagggctctcatcataccaaaactgaaaaacaatacttgttggtttatgagaaataattatcttatatattatactatnatnggaatggggttatatatccttacaagaaaataaaattaagaaatacaagggttacaaagcaaactaatcaagcatgactcagttcttacaacttcaccttatttact

SEQ ID NO: 14828 - DNA, 707 bp, Arabidopsis thaliana landsberg
tgagattatataaaggaatgtattcatgtttttacttctttttattcatggttaaggatgatacattatttttataaatccataatctatgaactcaactattctttataaaaaaggaattaaattctgaaaataaacaactgtagttggcttcccaaggctgctgcttcacctataaataccctatcctctttgaaaactcatctcacatcacaattcacatctcctcgaacaaacaaattataaacccattttccttcataaatttctaaaataaaaccccttaaactttcattcacatcatccaacccccaatgggtcgaatcttgaaccgtaccgtgttaatgactcttctagtcgtaacaatggccggaacagcattctccggtagcttaacgaagagtttgacttaacttggggtgaacacagaggcaaaatcttcagtggaggaaaaatgttgtcactctcactagaccgggtttccgggtcgggttttaaatccaagaaagaatatttgttcggaagaatcgacatgcagcttaaactcgtcgccggtaactccgctggaaccgtcactgcctactacgtaagctcccaaaagttaagaaagattcattatttttgtttttgtaacaaaaaactaatgagaaaaatatgttttgcagttgtcatcggaaggaccaacacacgacgagagagactttagt

SEQ ID NO: 14829 - DNA, 579 bp, Arabidopsis thaliana landsberg
gcaacatacttagaatttctaaacagatggaatactttgaacagttccagttacgagtgagtgcattgatcggacgggaagggacacaacagctagttaaccaagctcttgtcctaattacactcggtggtaatgatttcgtcaacaattattatctaattccgttttcagctcgttctcgccaatacgcgttaccagactacgttgtgtatctcatttccgaatacggaaagattctcagagtaagtttaaaaaattatatattgtcttcttttttacgtatatatactaaatttgtacatatgtcatgtaacaaattggggacttaccacgaaataacctaaaatcatgcaatcttgaatcttgtactaatttttgctacaataccatttagtttattaacttgttgcctcactaaaggaaattgcatttaatatgtgaactctcaaataattactttcgttatgtcactacatacatagttaatgtcatgattctcttgaatagagtgatcattagtttataacgtacccacaaaaatgatggggcaaattaataactttttctttgttacttaat

SEQ ID NO: 14830 - DNA, 817 bp, Arabidopsis thaliana landsberg
  unsure (1)..(817): unsure at all n locations
aactcgctcgcattctctgagggacataggtaagtccatcttgctcaggctccgttgaaacagtaaagtcctgcaagagcacacgcagtatttacaatatattcagagatgttcttaactaaccaaatcatagattcattcataatcataccaagatgaggttttccagattcgggcagctctcaagaaagacaagcaacaactgcaacatggnnnnnnnnnnnnnnnnnnggtaacgatacaagttattgaatttcggaataggtcccaacttcgaatatcgatctaggacctgcaataaagatagaaaaggatacattacatggaatcaaagtacatttcttgctacatatatgcatcacaaatacatatttcacctctaaagtacgccgagagatgatcatatgtcttacacaagatatagcggttaaaaaatcacggatgatatctctcttgcgtaaatcccccggttccaaacgactgccgccaaacttaacattaaattcactatcaatatcaatcatcgacaaagaagtcatgttcttgactacaatcgtatcagattggtcatcattaaaattcaaatactcaagtctaggagcatcaatctcaaccgaaaaatacgtacaagaaacactatactcaaacgtaagacgaaagcttctaagactcagagacctcacacgaagaaactgcagaacatctagattacaaaaatcaataggcctaatcaatacaaaatcttcaagaacaggacaacctgagataatcttttccatgatcaaaggatcatcataataccaaacatcttctaaat

SEQ ID NO: 14831 - DNA, 674 bp, Arabidopsis thaliana landsberg
ggttgatatatgtaatctaggagagcgtatatgaggctataatatgtcaaggtaagatatttgtggtgggtatttattaatgcatgttttgtgatctatctatgagatatatatatatctttaatcttatttcatattattttcattatagggtttattcataaaatagtcaaatatataccataatttgtccagatcttcgcatcttgtgagaaattatatagtgttaaaatggaaaattcaatttaaaagtgacaacattaattagtaagctttggaataaccctatcgaaataactttatcacagaacaagtacattttataaatccttaaacaaccgttgagacctaaatcaaaaatcttcagcctctttccaagtcaaaagacaataagaagaatcctaagttgaaaagagggaagcacttccgacaacatgaaatatcgcgcgcgaagatgttttagagcatcattatccatagtttctaagaagtttaatttaaattttttttaaaatattatataaaacaaaatatgaataaaaagttaaaaaaaagttctttagaaaataaaattggctcttaaataaaagattctttatacttctgtcttcttactaagaacctcctaatattaaattggccatagacaatacgctatagaacaagagcatctg

SEQ ID NO: 14832 - DNA, 360 bp, Arabidopsis thaliana landsberg
aaagatatactcttctaatacctcgctttccatctgaaaccactccataggcggctacacaattccaaatgattctgaggttttcatcaatgtgtgggcgattcatagaaatccgaacgtatgggagaatccgttggagtgtaatcctgataggcttcttgataaaggttacgactttagtggtaatgactatagttatttcccgtttggatctggccggagaatttgtgcgggaatggccatggccgagaaagttgttctttacaatcttgcaacgcttttgcattcttttgattggagaattggggaaggagagaaagtggagctcgaggagaagtttgggattttatgaagttgaag

SEQ ID NO: 14833 - DNA, 410 bp, Arabidopsis thaliana landsberg
aaaaaaaaaaagagagcagagatttcggcctcctccaatctctggtaactctcagacactgaaaaaacctgagatttcatcttcttttgaataaaattttgtattttctggtgatctcttcaacaggatttgagaacatttttgggttgttaaagagaagagatggcttcagtacaagatattggtctatcagcagctataaatctattatctgcatttgctttcttgtttgcatttgctatgcttagacttcaaccagttaacgatagagtttacttcccaaaatggtatctcaaagggatacgaggaagtccaacgcgttctagaggaatcatgactagatttgttaatttagattggactacttatgtcaagtttcttaattggatgcctgctgctcttaaatgcct

SEQ ID NO: 14834 - DNA, 554 bp, Arabidopsis thaliana landsberg
tcgtcggcacagacgcggttgttgactttgctgtcccgccggtgaactaaatctcaacatctccatcggctgcatctaataaaaaaccacacaacgtgtcaactaaaactacgtcggtttaacattttttcttatctcgtattaatgtagtaaacccaaaaaacattttaccaaaatcgtcgtttaataaacacggcttcgtattggccttacctgagtcgcggcctgcatgtgtgggaacccaccgatgtatctagcaaaccggtcggagatgatctggttttgtaccgggttttggcaaactaaaccgggattgttctgaattgcagactgatccataaccggaaatcgaggtaactgtaccgggctctgtatctgacgtatgaactgctgaggttgaactccggggaacatcatcggagccgaagccgccgccgccgccattccactccccatccacatcacttgaagctgtaactgaagtgatttcaaataatctatggcttcgtctaaaatcgaagctttatcagtctgcaaaaacacaccaatgaatg

SEQ ID NO: 14835 - DNA, 1145 bp, Arabidopsis thaliana landsberg
tttggataccaaaactttcaaatttgagtatatgtttaatacaaaagtatcatacatgttttggttagggaatatttttcttgatgtttaagcttatatgttcatctctaattcttatttgtaagaatatttttatgggaccgagtaatcaattcagcataggttaagtattattttgtgaatgttaatatacaattacttaagtagaaatccaatcgtggagtggccatttttcaagaataaaaacatataataggaatctaaaattgcgacattcaatagaaatggatggtagtacgttatacccatacactcaaagttatatacacgcgaaatagttgatagcaattttttttttgtttttgataactaagagaagcaaattgatagaagagtttgtaaagtcatagaagaaattaaataaaagtgatcatcatataatcatttgaaaatctttcactacatcatatcacttgcaaatttcaatcatttacgctcatcatcatcaattgtatccaccttctctgactcgatccaagccatcattacatatttgcattaacatcaatatattttgtagatttggaccagtttaaaatgacatatctctttatgctgatctctcttttttgaagactcgaaacacataagtatgaaattaaacatctatgattttgctttaaatttttcagccgtatcatcgtctattttcccattataactcaaaattacaacaaacataaccaaaatttttgatttcaaaacaaaatctcatagcttatcatgctcaaaacagatttgatcatttgttaaaattcactccttcaggctctttctcttcttggacgatttggatttagaggaagaagaggaacgcttatcactgcttctctttttggtggatttgtcaaacccgttctcattctctgatttggtagacttaacactgataataccacttgaagagatctttgaatgttgcagagcctctgcttctttatccccaattacatattgttgaagctcagaatccattaatccttcaatcttctccttcttcatttgttcctttaagacgaaagaagtacaatttcatacaatgttataaccgaagtaacacatataacatttttacggcacagggt

SEQ ID NO: 14836 - DNA, 676 bp, Arabidopsis thaliana landsberg
cgagagggccctgcaatttctgcgaattctccagcagcaggtacttggctcacagatggcaaacaagggttcgattttctagggttttcattgttgatttaggtctttgaagtaatttaggatatgggaaccatcacaaaatctgcttattaggtttattgattagctatttactcggcttagttggatctcggaatctgaatctgaatctgaggatatgattgaatcagacaataaacttaaacctaaaccccttggcctttttccagatatggatgcagctctgaagataagctgcaggagcaagacaatgaagcagtggtatgtaattacttatgtactcatatatctatctctttgtatgttatacctgtgtttttgcttacattcaacttctctccttgcagctgcggaaagaagtcgagagattacggcttttgatcaagtatgcctgcgtgcgtttcccactttcttgttctgcatattcattttggttgatgagttttctttcatgattccaggagaatgactgggaaggaagatattgacagcttcaccgagctgctagctcttcaaagtcaccttatggatgtccgatccattgtgctggagcacaaggtgaaatagggggaaatattacttgactttgtttttttgtctacgtgtcgctattatc

SEQ ID NO: 14837 - DNA, 519 bp, Arabidopsis thaliana landsberg
ggcccgctcatgaaaataattcccacgaacacgacggacatatagtcgttggatgttacgtgtaacaaaggcattgatccatgatgtaagataacatgcatcatgttcatcaaaatataacttaagattgtgtatacatgaaaccctagtggaatcgaaaaacctatcaccaaaactcctaaaggtattgaaatttgggaatatcgaatatatcaattccaaactaggaacactaagccagatcttcttccatctagtggataaaacgcttgtcgtgacaacctcctttatgggaagatgagaaagtatctgacatatcaaaggatcagataattggcttaacctatttatgagtatcaacctattggaataacgaacctgttttgagttttttctacccatcatcactggtttctcctgaaaaaaacaaaattaccaataatttgggcaaaacaaaattgcagcacaaggttttaaagagccgacttggaggcgtaggtagttacactcattttggac

SEQ ID NO: 14838 - DNA, 483 bp, Arabidopsis thaliana landsberg
gagccattgaacaccatagccaacgaaacccataatcgccgttgcgaaaagaaccgtccaaagagggaaatgcgagagtgcaagtcccgatgaccaaccgaaaactttaccaagatccgaagcgacggcgagataattcaattgtacttgcgaaatccctagaaccgatttcaaattcgacgaatacgtcgagaaatcgaaattcgtaccggtgaatgcttgaatccaaatcgtcgctaccagaatcatccattttcgtgattgtcccgccatctttttcgaccaccgtgttttcacaatctccgacgtacagttcctgattcaccggagattttgattttgttttttgtgttctctctcactcgtttgattcgagcttcttcacttgtttcgacgaatcgagaaaaaaaaggactaaatagagaaacaaatcatgttggtttacgtggcatcttcatgtcaggtataaatcaaccgatatcg

SEQ ID NO: 14839 - DNA, 625 bp, Arabidopsis thaliana landsberg
gttatttgtatgttagtagatgaggttttgcaacaggaaaggtatatgtgtttgtctgaacaggtgcctctttgtggtatgtttgtcttggcttgctctagtgtatgtttcagccaaccaaagtggatgagtctcaaccaacctttagtctacacgtggcacacacatatcccctgaaattatatttcctaatttataaactaataatctccaaaaaaacagataaagaaaaacctaatcatctccaatgcgttatgaccgcaacttttaatgggttccatgtcatttttcgacccatgggtctaatctcatacgacgggcaattcgatacatacggaaggttcaaaatcggggggttacactatcacatttatgataacaactattaatgtagatatgtgtattttgtacctcatgtaattacagattctcttcatcgtgactatgttaccactaatcaataataaagctattgatgatgaaaaaaaaaaaacttttgagttaattggattgttgaaattactcgttaggattagtataacttgttccatcggataaatgcatggactttaagtctaaacgtccaaaatcgctaacaattttttaagggtgcttgaaatatctg

SEQ ID NO: 14840 - DNA, 816 bp, Arabidopsis thaliana landsberg
gcagagactgcattgaacgcgaaaccaggtacagaaggcatataaatcgagaaatgcgcatgaaccactccctgcaaaagcaccagaatcagcaattatatcgaaatttagaataacggacaagtatgaagaggactaagaaactttttcgaccttgaagaaacgatcccacataaaaacaagtgggagatcacggcgagctaagaaaaggaaagcgagcttgggacgatcaccggagtatttgtgaagcggtgtctgagatctcgcgacggagagtggaaacgacaatgtcgtgaaggaattgtactgtagttggattcgaagaagagcaagaaggcaaagcgcgacggagaaagcgattacgagtttccatcccagccacacgacgccgccgcgacgggacaatggaggcggaatctgcggctgtgatttcttcgtcattgtactacgatcactcaccgtcgtacgatcaacattcgagttagagaaacgaacaatcacaagtctttttagggtttttgaagtcaataaatttctcaggagagaaacggaaactgaagaattgcaaattacaacattttggattttgagagaaagagagatagaaaggtagaatgatgttgatagttcgacgtataaacttgtaaacgacgtcgtaagccacgtacacgttttaagttagttgggacccacgttaaattagaacatcattaaattgttgtccgaaattgaaattgtcagaaaatggtatgaaaattatacaatttgactaggaatattaattattggttttccttctatacaattagaaaaaaa

SEQ ID NO: 14841 - DNA, 577 bp, Arabidopsis thaliana landsberg
cttttggtgtggcattgtttgttttggtaattctatagactcttgttgtaagatcattgtttcatcttttttaatgaaatggatttgttttattttcaggtattttgacgcttggaagtgtttagacgcgtgttggatttgtaaaaatccattctttggcttgattcttctctatggtgtcaagatcttgtgcaaattttctagatttagcatcttgggacttattggactttcctcaaactcaaagagctctgcctcgtgtcatgactgttcctggtatcatctctgagttggatggaggctacagtgatggatcctctgatgttaattcctcaaacagctcccgtgagcggaagattatagtggctaatatgttaccattacaagctaagagagatacagaaactggacaatggtgttttagctgggatgaagattctcttctcttgcaactcagagatgggttttcttcggatacagagtttgtttatataggatcacttaatgctgatattggcatcactgaaccagaagatgtttctcataagctttcgttggattgcaattgtgtccctac

SEQ ID NO: 14842 - DNA, 664 bp, Arabidopsis thaliana landsberg
tgaaacctttggcttcttcacatgtttggtctatcaatgggttacattttggtggctttagttggggtaaatgtgcttgtactgatagtagtatgaaaccctgagaatacacgtggcaatacatcgttaaaagaaaaggaaaaaaaattattagaaagttttcggaatgagaaactttgatctaaaacagtaattggtgatgtttataggctggtatttttgtaaatagttaattaaatcgtaatgggatcacacacaaaaggcatgtttgcctggagatactcacgtaaattacttacgtgtaaaaaaacagatttggttagaaatcccatatcgaaagtggtttagattttaattttaaattgcaagccaagtaacttggagaattgtatgtacatatatgtcaaaaaagtactggaaagagatgatgaacatacagaaagctcgacgaagccgaatatgataatggtccagaagctgcctagaaacgcgtccgagagatagccgccgagaagggcaaagataaagatggtaccgacaaagttggtaacaatattggccgctttagacaaagggaaatgcatttcgtttattacataagttataaggttgttccctactgctgctatccccattatctcaaaggcttgtagtcctaaaaaaa

SEQ ID NO: 14843 - DNA, 698 bp, Arabidopsis thaliana landsberg
ggatacctcatgacacgaggttgcgtcccagcattttatctgcctacaaatgattgttgcaacagaagaatctgtttactttgaataaacgtaacacatatatgcaagtaaacaatgaatctacaaaaactcacccatcactgctccccgaaaagatcctttttgcatctggactccatgttacacttaaagcacgtcctgtgaagattatattctatgaaactaagtaaacgaaacaaagattgacgattgatataaataccataacagaggtggggaaagatgactcaccactgaccctaggcaatgatctatagtcagttaacttttctaaattagagatacggtacagttttacacaaccatcatcacaagcagctgcaagaagcctatctatctccttctctgaccttctcatgaaactcataggaatcagaaccatctttttcactcccactctcttcctcatcatacgatttctcactcaagtatccattgtcaataccttctacatcactcgagaatccgctaatgggagccaatgccatttgccatatcgagattacaatagactcaagcacaatctacacaacatagaaagacacaaaacactaagtatcactctcaaaatgtgaatcgaaaaactgagagatattttggaaccttctgcttcaaatcgaaaagatcccattcagata

SEQ ID NO: 14844 - DNA, 818 bp, Arabidopsis thaliana landsberg
ttacttctgcaatttcttctcaacctctacttgccaaatagaaagaaaatatgacaacaaaaaaactatcaacgaatcgttacgacaagtgacaagtaaacgaatcagaagttttgttctgttgtgtcctctaaacaagttaagtgtattcttgttctctgtatggcattgaatgttaggccatgtgtattgtaaagatgcttctccctggctattcaacaatcttctttcttttcagtatcgttggaagaatagagataaacccgatgaggaaaagcactgacaatgtcttgaaatcatacagatctttcaccgatttgagatctccaatagcaaggccagcctgcaataaacagaaccagaatttaaagccatgttcttcgttctttatgtagatggcgaaaagagatgaaacacaggaatgttgaatgatagcatatcattaacggaaagatggaggtaaaagagcttactctgacagttatataagctgcagggatgagaccaatcaatgtcgccaaaaagaagacatggaaaggtacatcgactataggagaagcaagattgataaaaagatttggcagagttggtgttatcctcaaaaacaacatatagttcagaagcttatctctacgcttactaatctgaaaggtataaagccacaacttaatcagtaccaagtaaagaactttcacaaagatcatttcatcgctacaacaaagagacttacctctgcttgaaagaatcttaatttgtcaggccatagccaagtaatcaacggccgaccaatcaatttcgacagaaagaaacacgacgta

SEQ ID NO: 14845 - DNA, 740 bp, Arabidopsis thaliana landsberg
gacccattgcgcatgtagtaagggcattctacttctccctaccgattgttaacaacattatatagctttggaaagactagcaacagaatgtcgaaaagtatccaacaaatatcaattaaatgacaataccggtctgagaggaaggccgaggaagttaagctcgggtgctgaggccagaccagactttggtatggtatggttgaatctacaagtttctccatacttacaccctccagtcctaaagtaatactgtaaaaacctcatgcaagaaaatggagcacagaaactgaatatcagtaagggcctgaactacaacaagctttgccaatgcagattgaatgaaacctcataaaacaatcgacggatacatcacgacgagggcatgtaacaaggttaaaaagagaagtaaaaaattaaccttgcaatctatcaaccccaatttaccaccatcatcttccttttctcttactttattatccctagcaatcttcaaaacaatgaaatattagaaaacgaaaaaaacaaagtttagttttttttttccatttaaacttatgttcttctactaaagcaacatattaaagcttcgtcctttggtctagcattgaagtacaaagccaaacttatctaaacgcatgtgccactgatttaaaaatggtttcttttattaacaaatcttccctaagatccatataataacccaccattaaaaacccaattatcctttaattaagccaccc

SEQ ID NO: 14846 - DNA, 705 bp, Arabidopsis thaliana landsberg
agcagcagccactgaagtcgacgattttttcaaagaaaagtcaatttatattataaatttcagatgaagagataagatccactttcacatctttggattttgtcgctggcctacctcggttgatattttccaaaatggcaaaatccaaggcaaggacgcctggagtatccccacatgcagtggtgatttgatccactttcatatcgtcggtggtgtaatcttttgacaattttatgctattgatctgcatgttaataaattttcggttctcatattttccatttctttatcttcttaataagcttttatatctaaaacgttttcaggttttagtataagagtaggttggacagaactggttatgtcctggaaggtgagttttataatggagaacttgggaaaacttttgaacatgttacatgtgaaaggttttgtccttaattgaactggttatttaaccacgtgattgtttgtttgacagttttttttatttggcgcataaactcgggatcgggcataaatttggcgcagtagttaataatacaagaaagatgtgcatagtagctttactacaagaatatggagtatcggtagcgttcaaaaaacgctatttaattatattataacgttattagaaacggtctatcatcgtccgtcataaaaggtcagagatatattgtagcgcttttttgttatgctatcatt

SEQ ID NO: 14847 - DNA, 861 bp, Arabidopsis thaliana landsberg
  unsure (1)..(861): unsure at all n locations
ggtcaacgtcatcatcatagtacctatattacgttagatttatctttgttttgttctcatggagaaactctattttgcttaataggaaatatggggaacctaccaatcatacttgtcccagcaatctgcgatgaggacaaaagtccttttggtaaccgaagtgtatgtagaaccgtcgggctctcttacgcgtctttctccatggcggtacgttatgttaacgctataaaagtatattggtatgagatgtggagaaaggagaagcaaaatgaatttctttttactggtaattgtgcagctagggggtttctacatatggacatacacattccggctgattaaagggtccgcaatgaaagttcaagccatagaagaatctgagaaaatagcaattaaatcatccaatagtgacttagaagctgatcataagacccatctcctcggtgcaccggaagacaaggaaaacaaagtggtaaaggaaaagacagggttttggagaaaaggagtagacttcctccatgagatattggaggagcttcttgcaccacctacacttggtgcagtaagttcaatataccgactagcattgaggaatataccaagagtgaaatgagtaactaatgttacatgtttgatgctttcagattatcggtttcattttcggtgcagtaagatggctcagaaatcttatcataggtgatgatgctcctttacgaatagtacaaagcactgcaaaacttcttgggtagttaccaaaatcttgtcatgaattacctnctgaccatttgcatcttaagttactaactttaccgattatgcagagatgggaccattccctgttgactatatactaggggaaac

SEQ ID NO: 14848 - DNA, 794 bp, Arabidopsis thaliana landsberg
gagatatttcaacatctgtcaaagataaagctttcaccttttcttaacgaattaggtataggtaaattgcatcttctaataatgtcagaatcttaaacaaagtttctgctttttttttctggggtttcatgaatatactctaaaggctaaatctttgttttgcagggtacggaactgacctgagaggtttgatttgaatctaaaaaggtttagttttttgttaagtttgatggggacagggaattctaaagaaaactggagacagtcatcgtttaggtcagcttctgcttcatcagcatcaccatcttcatcttcatgggcttctcaacaaagttatcctcagtatggtgcagaaagctataattaccctcctccaccttcttatgcccaacctcctgagtatacgcaacctcctcctcctttatatagtactcagccttactctgctccgtcttattctgcaccgccttctcaaagttatggtagtgataataagaagaggttggagcgcaagtattcgaaaatttctgatgattactcttctttggagcaggttagctgagtctcgcgttggtttttagtggaatctagtgtgtgttctttgatgattacaaaacttgaaaactgtggattctcatgggtttgacagaaaagattcacattatgtgctgttttccgtttaggtgacggaggctcttggccgggcgggtctagaatcttcaaatctcatcgggggattgttttcactaagagtaacgaatggacaggttggggagaatctagattctggcttg

SEQ ID NO: 14849 - DNA, 1973 bp, Arabidopsis thaliana landsberg
ggtgagccaattacccccacgtttgcaggtttcctgagcaccataataatcgatctgtttaaacaaatcagttccagaaacataagatggcggaggaagacgaactattttattcttcctaaaaagttttttgttacgccgatacggatgatgtaggggaagaaaccgacggtgacaatcaaaccaacatggttttctgcctttctttagttgaaacgcatctgtacgacccatacagtagggacaagataatcttccatgcgttgtccaccccgataacattccatatgccgggaagtcactaatcgtccacattagcactgcccgcatattgaaattttgtttgctcgagtaatcaaacgtatgaacaccttcataccacaactttttgagttcatgaatcagcggttgcaagaagacatcaagcgctcgtttcggatgctttggcccaggtactaaaatacttaagaacaaaaattcgctttgcatatacatatctggaggaagattgtatggggtcaagataatatgccaaagagaatattgtcgcccagacaaaacgaatggactaaatccatctgtgcataagccaagatacacattcctacactcgctagcaaagtcaggatataccgtttgaaagtgtttccacgcctttgcatctgatgggtgcgttatttctccgtctgcagttgtatgttgacatgccatctcattctcgccgcagatctttctgattgatataagcgtttcaatctatcagttattgacaagtaccacatccgttattatggcactcgcgtccttccgccagtagtctagatatctcagcttcccgcaaaaccgacattcctgcagatttacatcatctccccagaaaatcatgcaatagtcaatgcatacatcaatcatttctgatggtaatccaagactcgaaaccaacttctgtatttcataataactctcagccgatatattatccggtggcaaatattccctaattaattctgcccatgaatccatacagtattcacttaagttattatcagctttaatagtcatcatcctagatgccaaagataacttagaatgcccttctctacatccttcgtagagtggttgatttgcagcatctaacatatcgtaaaagtgttgagcatctacgttgggttcttcagtaatattttcaggaaatgaagcaatagtttcatgaaatgcatccgtaaccatatcatgaaatcgattttcttgattatgcccataaccaaattgatcaggtacatgctgaccataattcgcatcattattaaaattactaggttgctcgacaccgaaatttgtattactagttcctgcgctatctctacaaccctccccatgacgtaaccagacgtagtagtttggcataaatcctctattataaagatgcttcttgactacattaaattccaaatatttctcattgagacacttacgacatggacagaatattgtaccgttctcacgagcaaatggttcgtttgtcgcttgatacatgaaactgcgcagcccgtcataatactctctcgtcacctcaccggtcgcttgatctctatgattgtacatccaacttcgtaatgtgtaaatctcatgttctccaccccaagacattattatttttgtaagaagtttttttttttgatttttttttttttttgtaggtaaatgttgtgatttgaattatgatttcttagacgttacgttggctatttatagatgtccaaaaaaatattgcgagagaattgcaaggcacgttgcgacggatttgctagggaaaaagctcttttgctaggaacttgcgagggaatcccacctaccaaccagttcggtgagataatttaaaacgtggtcacctaacccgcgaagactcgcaaataagtcgcaacattgctacagcgtaattacgtcgcaatttgcaagagatgtgtttaccc

SEQ ID NO: 14850 - DNA, 967 bp, Arabidopsis thaliana landsberg
acaactaaaatataattttttgggttagacttgagtgaaattttcttattataaaagtatagtgtagataatggtcttatctaacgttgtggattgatgttgcggttaagcgtccaacatctagatgttgttttgtgtcctcaaatgacttcttattataagatgccccaaaggttttacgtctgtgcgacactggtatacttaaaactctcttggttggccttggttaatcctaagtttgtttcattaccttgtttgaagactacgcatttacacaacaattcgtatcctgatgaatctactatctacacacttgtctcatgttgtccagttttggaagtgttaaatattgttgtaactttggaatgatgcaaaagtctatcaggtgcatgcactctcggtcatgaaaaaggctcacactaatacaaaagccttctttcgcgtttgtatttgtcatggggattgtgattgatgctcctctactttgtttttgtagagtcaatgatcgtgtatcaaaaagctttatagtaaacaatctcgagtctaacaccaaattatatatttctctataatttggcttggtagtttttatgaagcaaggagaagtacaatccacacctttcttccccgggtttcgagggtcagggatatgagaatatgcacagacactcgagaggtatatacgctagttctagtattgtacatgcacattttcttccatgaaatttttgaacgtcccacattcttttccctatggttccaactcatctatcaatactcaatgttagaaccgctgcctcagtttggttacatgtcccgtctatgagttagtctccatgcatctgatcaatttgaatagttgccaatcttttttgagagcttccccaacctgaaatacaataaaaatccttatagcttttactttattctcaactcaaagtttctcttttatctcttaaacataaga

SEQ ID NO: 14851 - DNA, 893 bp, Arabidopsis thaliana landsberg
gccaaaaattatccgaaccaaagctcggggatgtcgattcaacgatgcactatctccacaaacggcaatgtgattgctttacgtatcttggccggccgtggaaggagttttccacgacggttattatggagacggtgattggagcagtggttcgaccgtccgggtggatgtcatgggtttctggagttgatccaccagcaagtattgtctacggagagtataagaatacgggcccgggttcagatgtaacgcagagagttaaatgggctggatataaaccggttatgtcggacgccgaggctgcgaagtttacagtggctacgcttttacacggagctgattggataccggcaacaggagtgatcaatcagctatcttaatatagtgacaatacaattggattcgtagcttgtttttgaaaacatccggttgtgatctactttatatttgtttgacacttttgcatgatctgtaattttttccaacatagttgtattttgtgtatcccctaatacgatatcttcttgatgtagaactatcaaagctactcgctttttgtagctcacaccttgaactcgaattataacacaacgatgatactgttactaaccattaatcaccttcatatccttgtcatcgggacattgtcgacgatgttactaacaaacgggatgatcataaatccgataaaaatctaattatctgatggcgattaattaggagccggctcctaaacaaaaatctaactcaatactaatctatccacactaaacaaaaccagaataaacaagattaacttgtggagcaagccagaataaatctatccatatagtcaggacaaagccaagtcgaagagcatgtaacataacgtaagttgtaggaaaggaaatttt

SEQ ID NO: 14852 - DNA, 680 bp, Arabidopsis thaliana landsberg
cctgatcaccgcctcctccaatgataaatcgttttttttttcatacgatatatggttggaataaaattaattatattcatagaaaataacaatcttgagtttttgccggacttgtctttatctggcgccggtctatgttcttttatttactgaggttagctctctaaaacaccataatccaaaaataaaaccatgctatttttaaattttttgatcagttggatataaaaatctttaaaagagtaacgcaaaggaaaacgaagaccaagactttattaaatgtgtgaccaatagttcaaaaatgatcaaaggcgacaatagtatttgtaacaaacttcaaatctgaatgaaatacctgaatatgttatataccgatggtctcgtctctataatcttgcgggtacaaaagactgctcctcaaaaaatgagttgaattacttactgaagatgcccattacttaatgtatgtacatgtatttcaccatcttcatgtttttcatggtttgagttatcatcaacaatctttatggcaacatgatgacatgagtcctgtgaactccctccacgtgaatcatcaacattgcttgatctatcattatcaacgtcatgtaaaactgtgacaacatgatgatcttcatgagaatctattggcatggcacgacccatgcttccggaatccg

SEQ ID NO: 14853 - DNA, 583 bp, Arabidopsis thaliana landsberg
atatcgaagggtttcatatcttattctctgttcatatcttttctagcgtcttccactgcaattcatgatagagaatagcatgaataagcccggagagataactgtgttaggtaaagatggtgcgaagtggctggtaagtcttctactggaaagaagaggaagaatgagtttgggtaagggctggaaagattttgctaaagcaaacggcttaaagacgggcgactccatcacgttggagtcagtctgggaaggcgcatctcctgtgctcaaattgctccgtatagagtctagcagttttagagggcaaagtgagttttcaaaagagtctcatttcacagatgctagcagtggacaagagaccagggaagcagagaaaaacagagaagagagtagtagcttatgggagttggagaaaagaacctattgtccaagaaaacgagattcatcgtcagatgtcaaaaaccgattccttacactaacacttgcacctgaagatgtcaaggatggtaatttggtaagcttatcaaacaactcttgctttagaggttctgttttgaatttcatttgataatgagatgtgttt

SEQ ID NO: 14854 - DNA, 630 bp, Arabidopsis thaliana landsberg
acatcattatctcactcgtaggtctctatctaactatacgtccaaaattttagttctatattaccgtaattaaaaattagtttcaaaattttacagtctaaacttgtcaaccatcccttgaagccatcttaagtggtaagttcctcttcgcttctttctaatggcttttcatcttaagtgaaatgaacctttcctagttccattctttgcgatgatccttgtggagcggatatcagagacgtctcgaacttgaaaaagaagctgcctccggagttgatgaaagaaatgggaacgatcaggtcatctcatgactgggtagctacttcaaaggacgatggagttctgcgtctccaagatgacttaaactcggttgcgtcggacagagatccaagacgcagcttgcgacctcatgcctcattgccaaaccaacattgttactaacgtattaatgccattatcctcaggatgaggattctgttgtggcgattcaaaacgcagcttggtgttttttctgttcactcaaattagttacaaaaaaatccattttttttttaataaaaagactacgaaaaaagcccacaatttttaaaataatttgttttgattataataaaatgccaaaaaaattac

SEQ ID NO: 14855 - DNA, 841 bp, Arabidopsis thaliana landsberg
atttcagacttggttccatcggaatagtcgatggtctgcaacctaataagcatttttcttttaacaactccattgatacttggttgcgaacagatattccttctttggttctagcaatttccaggcctaaaaaatacttcagaggacctaagtctctaagtttaaaagcctttgctaaatccttcttcaattcctctataatctcatcattatttcccgcaataacaatgtcatctacataaacaaggagagcaatgtgagctgtacctcgaatacgcgtgaatagagtatggtctgcctgagatttcttaaaaccaagcttcttcagagtagagctgaacttcaaataccactgtcttgatgcttgcttcaaaccatagagagatttttgcaactttagaacaggattttgaggtaaaactcctccctgcttcatagaatatcctggaggtaagctcatataaatttcttctttcaaatcaccattgagaaacgcattggatatatcaagctgatgtaaactccattccttagcagctgcaacagataacaatgtcttcacagttgtcatttttgccactggagaaaaagtgtcataatagtccaagccttctctttgtgtgtaccctttggcaactagtctcgccttaaacctctctagactcccatcagcattgagtttaactttaaaaacccatttacatccgattggtttctttccatgaggtaaagagcacactgaccaagtgtttgagctttccaaagcatctatttctatttccattgcatcaatccactcttgaatcttctttgcttgtgcataggtacatggttcagggta

SEQ ID NO: 14856 - DNA, 662 bp, Arabidopsis thaliana landsberg
aatttcacatacaacaactctcagtatctaactccctattcttggttctgatgcacttactttcattttcgttattggtttgtcatttaacgtgtacagcaatttttatttgactgatcaattcagtatcaatgttctctctagcctcatcattagataaaaggacggaaataaacaatctactagccaggttcataacataacatacccgggatttttggtggtgagccgttatcaccataaccaagcttggatgggattttcaactttctcttctcacctacacaagctcccaataaaccctggtcccatcctgcaacatttcgaattaattgcattaccttcaattttgtcagtcaaaaaaaaggtaacaataacgaaggaaaaagatggagttgatacgatgcaatagcaacaaacctgggatgacttgaccagttccaagctcaaactcaatagggtcacctctctcaaaacttgaatcaaagacagttccatcagttaactttccctgcaacagagaactacgttattcgccaagcattttttagatcagattcattcattattattggttgttctaagctatccaatatcaacattttactaaatactaatgaagttcattccacattttcagcaattcaccatgcccctgatgt

SEQ ID NO: 14857 - DNA, 700 bp, Arabidopsis thaliana landsberg
aacaacttctttaatatcttgctcatacagaggaagaatatgtcaaagatggaccattttaaactaacatttgataccttataagcccaagacagaatagccttctctgtgggagatccagaaatctccacctctccaccatcctatagtaaaacaaacatgacaactaaacatcaatcatttgataactacatgataacatgatgagcttagagtaacattgttcctctttgaaaatccataggaaggttcaacaatagcagagtaacaaaaactaccttgggatgaaaaatgtttcctgttgtgttttgtgcaacaccctcacttattaaggcaacaagtttagggtggagaccggaagggttgtctgctacatccatctttgatcctccagcataagtttcaaccacagtcatctgtatttttgtgaggggtaaagttagctatctagaagggtatgatggttttcatgtcaagaagctcacattttactggatactaacctgattcaaagttaaagttccagttttgtcactgcagattgttgttgctgatcccatggtttcacaagctgaaagccttctaacctgtttggcatttgagaagaatggtcagacaataaccaagaagaaagaacttaagcgagaacactccttctgattcttaccaaagctttgtctgccatcatttttcgcattga

SEQ ID NO: 14858 - DNA, 570 bp, Arabidopsis thaliana landsberg
  unsure (1)..(570): unsure at all n locations
ggatccaagagtaaacggagagcaacacggtgacgcgcatcatagccttttctacaccgtttacatttcttattctcgtgatgtttatctgacaagcaagcagaaagtagctcataaagaacatttatcttcctctgatgactaagcaatgttacttcctcaacagacttctcattttcaagaacttcaggcttgtggcttccatctataataaccacacccgcttcaagaccttctcttgcagcactttcagccgcttccttcttatccttctctttatccaaatcaacatcttttgattttacctcaggaacagcatatttctcnnnnnnnnnnnnnnnnnnnnnnnnnnnnntctccttcttagcatctatagatacagagcattgaatgctatgcaccatagcatcagcagctttagctaaggccatctcttgctccaccatctcggcagaagcatcattcgcttcttctgagagtaacctcgtgaactacaataaaaacaaaatagaagttaatgaacaataactcaacagtgagtatcggatccataacagcaaaatttgaact

SEQ ID NO: 14859 - DNA, 799 bp, Arabidopsis thaliana landsberg
tgtgattctttttaattagcgtgacgaaaaattagtaaaattacactgtgcggtggcgtttatttaaactacgagcaagcatctataactgaatatatggacatacatttgttaatttacacgtgcattagtcttccctctagagcttatggtcttagttaaacttattcaggatcaaattatttattcatctgatagattaggacacgaaccatcgtgaagagttccggtgtcgccgatacgatcggatacgtgtggtcagcgacttgtttcccactagataatgcttgattttttggagtagtgataacgaaaacaagttgatgaaacagagtaacaaaaacagagtaaaaaatagagtacttcgattgataaaacgtaatttgatacaatgttcataaaacgcgatatcaacttctcacttgcaagagtctccttgagagaacctccggcaaaacgatgaggaaaagtctagagagttctagagagaattacagcttagaaattcagcgtaaaaagtacgagcataacatgttgctttttataaagtaaacgttaacaacgtcttccgtcaccatccaacgtcggtaacgccaagttgcatttgccagctcacaaacacgcacgtgcacttcttcttatccatgtgtgagctgaccttctagatcgctatatcatagtttgagtagccgttattgttgttgttggaatatctgtcgttgttgtgcttgatgttgttggagtacgtagctgccgttcttgggttgactgtgctggtcgcaggatgtgtaaaggagcg

SEQ ID NO: 14860 - DNA, 679 bp, Arabidopsis thaliana landsberg
gacattctgtcttcctggtagacttccaccagaattttcgaagcttcggtatcttgaatttatgtgaggaagttctttttgtgttctgtttcctctgttttcaatgttgttgaggaaacattataaaaaagaactttttttggttgtttgtgtagtgacttgtgccgtaattatctctatggctcaattcctatggaatgggcttcactgccttacctaaaatctatgtaagtctttgttctcaactttcttgtttgttaaggaagtaaaaaatgcttctgagttgacttgaaatgtatcctgcagctctgtttgcgcgaatcgcttaacaggagacattccaaagggattagggaagtttattaacctcactcaattgtatgtttctaccgttttattagttcatatgatgtgattatagataaagtttcatactcttgaaatttgaaactaagttttttttgtctgtttgaatgatttcagaggtcttgaagccaatcagttctctggaactatcccaaaggaactagggaacttggttaatctagaaggattgtaagcaaaaatctgttaatcacgctttaaatcaaaactttaagtttataaattaggtgattctattagactatgtattttaatcttgtttttggtttcctgattctctctcagagcattctct

SEQ ID NO: 14861 - DNA, 120 bp, Arabidopsis thaliana landsberg
gcccctcattcttcgagggggacaatgagactttatcacggttgaattcgcccatttggaacctgggtccttctacttcattgtgatcatacttatttcattctttattttctctctctt

SEQ ID NO: 14862 - DNA, 534 bp, Arabidopsis thaliana landsberg
  unsure (1)..(534): unsure at all n locations
ctgataatggaccagcttatacatcccaaaaatttttgcagttctgccgtcagatggatgttacccnnnnnnnnnnnnnnnnnnnnnnnnnnnnnnnnnnnnnnnnnnnnnnncgtgcgcatcgcaccctcaaagcctatcttataaaacagaagaggggaacttttgaggagactgtaccccgagcaccaagagtgtcggtgtctttggcactctttacactcaattttttaaatattgatgctcatggccatactgcggctgaacgtcattgttcagagccagataggcccaatgagatggttaaatggaaaaatgtccttgataataaatggtatggcccggatcctatcttgataagatccaggggagctatctgtgttttcccacagaatgaagacaacccattttgggtaccagaaagactcacccgaaaaatccagactgaccaagggaatactaatgtccctcgtcttggtgaagtccagggcgtcaataataaagagagagcagcgttgggggataatgtcgaca

SEQ ID NO: 14863 - DNA, 550 bp, Arabidopsis thaliana landsberg
  unsure (1)..(550): unsure at all n locations
ttatacatcaccggcattgggagtggaaatgtcgacattatcccccaacgctgctctctctttgttattgtcgccctggacatcaccaagacgagggacatcagtattcccttggtcagtctggatttttcgggcgagtctttctggtatccaaaatgggttgtcttcattctgtggaaaaacacaaacagctcccctggatcttatcaaaataggatccggtcctttccacttgttacataaaacatctttccatttaaccatctcattgggcctacctggctctgaacaatgatgttcagccgcagtatggccatgagcatcaagatttaaaaaaatgagtgtaaagagtgccatagacacagacactcttggtactcggggtagagcctcctctactcccccttttctgttttattagataggatttgagggtgcgatgtgcacgctcaacaataccctgtccttgagggttgtatggaagtccagtcaggtgggtcacgtccatctgatggcaaaactgctggaattnttgagatgtataagctgg

SEQ ID NO: 14864 - DNA, 643 bp, Arabidopsis thaliana landsberg
aaaaagttaaaggacaacgcaaaatagcccacagagaacctacctcctcttgcaccttcttttccgatttttttccttcatcatacattatcattatcttgagaaatgactcaactacatgagtatcaaggctccgaaaccttgtctgcagatacgaagatataaattactaaaatcatacattagtaaaaaaattatgaaccattttagcattttataccttaagcatgttcataaaattctcccagtcaggctcaatttgttttattttggtataagtagacttagcaccccgataagcagcctcgggagggatggttgccttatccttgagaatgatggttctcttagcctcatgatggatgtctctgttaacctgtggaaagaagaaacttaaaccacgaagcagcctcgggtgtcctttaatgagttcagtcaactttgcaatgccactagccttatcgacactacaaagagaataataacatcaaaaaacaattcacaatgtgtttttttgttgtcatagctgaaattaagagcaaacaaacatatctaacagggaagggagagaagacaattctacccatgatcacgaatatcattcatgagtttaataaactcttcatattttgagggtcatcat

SEQ ID NO: 14865 - DNA, 4320 bp, Arabidopsis thaliana landsberg
cagaccgaggacgagaatatttgagccaagtttttagttatcatctcagagagtgtggatttgtttcacagctcacttctccgggaacaccacagtggaatggtgtatctgaaaggagaaatcgaactttattggatatggtttgatcgatgatgagtcacacagatcttccatcatccttttggggatatgctctagaaacgtctgcgtttatgctcaacagatgtccatcaaaataagttgagaagacaccatatgagatatggactggaaaggttcctaatttgtcttttctgaaaatttggggatgtgaagcttatgtcaaacgattgattactgataagcttggacccaaatctgataaatgttacttcgtaggttatccgaaagagaccaaaggttattacttttaccaccctactgacaacaaagtgtttgtagctcgaaatggtgcctttttggaaagagagtttctttcaaaaggaactagtgggagtaaagtattactcgaagaagttcgagaatcacaaggtgatgttccaacttctcgggaagaacatacgttagatctacgaagagtcataaaacctatacatgtggaacctgaggtacgtaggtccgaaaggagccgtcacccacccgatagattcggagattgggtgatggacgatcatgctctatttatgatagagagtgatgaacctacgtcatacgaagaagcgttgatgggccctgattccgataagtgattagaggccgcgaaatccgagatggaatccatgtaacaaatcaaagtatggactttggttgatttacctgatggtgtaaaatccatagagtgtaaatggatattcaagaagaaaattgacaaggatggtaatatacagatatacaaagctagactggttgcgaaaggttacaatcaagttcatggtattgactatgatgaaacctattctccagtcgcaatgcgttaggtccattcggattctcctagcaactgctgctcattatgattatgagatttggcaaatggatgtgaaaacagcttatactgatgccaggtgaaagtcactggatagtagtcaagaacatccttaagtacttgagaagaactaaggataagtttttggtctatggaggaagtgaggaacttgttgtgagtggttatacttatgccagctttcaaacagacaaagatgatttccgatcacaatcaggatttgtcttttgtctcaacggaggagcagtgagttggaagagttccaaacagagcactgtggcagactttataactgaagctgagtatatagctacttctgaagcggcttaggagactgtttggattaggaagttcattactgaacttggtgtggttcctagtatttctggtcccattgatctttactgtgatgacaatggtgccatcgcgcaagtaaaagaacgtagatcacaccagaaatccaaacacatacaaaggcgatatcacctcatttgtgagattattgatagaggtgatgtgaagattagcagagtttcaacggatgcaaatgttgttgatccttttaccaaacctcttccgcagccaaagcatgagagtcatactgctgcgattggcattagatttataaagatgtgatcttatttctagtgggaggtgtttttcttttatgatatgatgttcatgttaaaatacatttggatttattttcaaattaatgaaatttgcttcagtattatttatttctttgataattaaataatagtcccaaataatttatatcattcttataggtcatcaagtacgtgacttgatcatgaaaccctataagtggaaaatgacatagattattgaagtccctaatcaaggttattaaaatgggacattaataactaagaatgactagtatgtgaggtgactgatgactaagtttcgtggagtcattaatatgtagtattaaagtcaatcacataaatatgtgttcgaaaacacagtattggactgacccgctatgagaactatacaagaatgttatatgagtgttatataactttctcataacaactatagagtatagtcctttgatctgagtttgtcatgttttcttatacatggattggtctgtttgactctttcaaacgtcaaccgtaacagatgattataaagacaatgattggcgtattatgaattgtataaggaacagggatggaacaagatgggatttgtccctcctatataacgggagataaatatctctgggcctatcgaagatttgacactgagaaatgcatggccgtgctcaaatggattgaaagtcaatcgtttattttatcagtataaatcagagttcgataaatatgattcagtataataaggatgacaccatttcttaccttatgctaaaattgagatatacagacaaagggattaccagaatagatgattccagtacaagggggagattgttgggaatgtcctgaaatcagttgtactttactctagttaaagttgtaatgtcgaggtttgatatttgtataatattaggtggttataatgttttgctagaaaccccttataatctatgagttataactcattactaatattatacaaacctacagggtcacacacctaagcaaactggatcaataaaaagagttattgggctttggcccattattaaccctaattggttagggttaaacatttggctatatatatgatatattagcaacttttgtgagatacacttttgatcacaaaaacctaaaaatagagagacaaatagtttgtctgagttttgagattagatctcaaaggaactagcattccagatctgatgcagtttgtgtgcgtgtggatatcggtagagacacaatacttagaatgctaaaataattttgatagaatatagttcacttttctgctgcgaaatatccatttattttcaaatcctatgatctagatttaatttatcgtttacacggttcctcataatttaattcattattagtatttataaatcattataaaccggtacgaattgttacacaagacttaatccatcatcttggactcaaaagtgctcgacgaagcttatcaccgcttcatgcggaatttgattccttgttatgggcaatggaatgcatgacctcgattggcaatacttctggcgcttttgcttccgactgcttagacctgatttttatcattgacaatcaagaagattggctgatattcacagcggaattggcatcatatcgctccttagtttgttttttgccttattttcgtattagattttttcctcgtagttctaatactcgagcagattgtttagctaagaaagctcgggctcgtaataactttttttccatgtaagcacattggttcctgaatggctctctccagaggagagtctcttcccgataacttaatataaatggtgtttgataaaaaaaaaaaaaaaaaaaattaaaattttgtaaggtagaaaatggtctttattaatactgtcgtagatttgtaataacttattgggctctgtggtctcttattgggctttataagattctccagtagcccaaaaataaactttcagcgaatctcaaagccaaccgcaggtgatgcgttttgctatgtaagagagacgaatctcacgccggaatctcttttacttcaccgtcgtttgttctccgtcgcgtcacgtttcgattaattccttcacaggtaaggaagcttcttcaattttcctcttacatcaattctcctttcgcattgatccttgtcgttatcgtctctaaacgcaagctttttctccaatgtttgtgtcgatcttaaagcacatagattgataaagccgttccggttctattgaataaaattctaaccctagattagccaggatttaatcggaatttctctggatctaatagttttgtcgagtttgatcattgtgacttaggaactctaattttgcaatcgtagaatttgcgcatctccagaacaatccctgccaatgagatgaaatttcaaaattctgtttctgtaactaactttgcataagaacttgtttctatagcttaatcagctgtgttatttggtgtatagggtagcaaaattttgttgatttcgggatgtcttcagctcaagatccattctacattgttaaagaagagattcaggattctgtaagttgttcagaaattgccagagatgtttttttgtttagattttgaaggacagtgattgatggatgatgctttgttagattgataagttgcaatctacattccacaaatgggagcgtatctctccca

SEQ ID NO: 14866 - DNA, 670 bp, Arabidopsis thaliana landsberg
tccatcagacacgcacagagggagaaactctatcaaaaatctcaaaggtgaatatgaagccttactagcgttctcctgttcctctgccaatgttcaagttgctcctgctgtgtgcgttttggagcagttgatccagcctcttgctccgtagatccattggaattgtttgaaaaatcgttctctccaatggcactgcagtccaaaggtttacacaatccaaaatctgaaagtcttagatgcccatatctgtcaagcagcaagttgtctggcttgatatccctacaaaagcaaaaagaagaagataagctcacccaaaatgcaagagaacaattaatcaattttgtttgatttactctcacagaacctgtggatgtaattgtgcctgtggatggactcgatagcaagaactgtctcagcgacatagaacttagcctcctcttctgtcaaagtatctttgcgcatcagaagagtcatcatatctccaccaggcaaatactccatcacaaggtaaagatggtcatcgtcttgaaatgaacagtagagcttgactatgtagttactgtccacttccgcaagtaagttcctctctgctctcacatgttcaaccttgaaaaaacatgagttatgaagtcaaaagatgattgattcacagaaaagaccatcaagtagc

SEQ ID NO: 14867 - DNA, 1257 bp, Arabidopsis thaliana landsberg
gacacaagctctgcgtttcctatcttctcagagacatcgagtggcgtatctccagctttgtttattgttttgaggtttatgccttcaaaagataccaaacaccgtactatctgcagagaagtcaattaacagtttacataagaactaacattaactggacactcaagaaaaggatcattccataatgaataatcccttttattacacttgtctaacaccgagttttgatatatgagaaaagtaaagagccattaccttaatacgccccttgtttgtggcaatgtgcaatggtgtatttcctttattatcctcaacgctcaaaacagcaacatcaggtttcaccaactcaacaacaatcccatcattttgaccttttacagccatgtgaagagcagtttgcccttttttatcggttctaaacccaatgcttggatccttacctatcagagatttaacaacttccacatgacccatccttgctgcagagtgaagcgcagttttaccgttgttcttagcaatcttagccaaagtagagtctgtctccaaaagaagattcaccacatcaatatgtccctgtgttgcagcagtgtgtaacgcagttgtacacgataaatccgttgtcattgccaaattagggaatgtctccaacagtatcttcaacacctctacaaaagaagacgagccaagtaagagaacaatccattgagaatggagaaaatatgaagaaagtataaatctttataccgagatggccttgtttggcggcgacatgaaatggatcaaacccgtttctagcagcgatggaagcagtttcaaggtccatatgcttcaacatctcctcaacaacaattgaatgcccattctctgctgcagtataaagaggagtctctccttcaagattttgctttgacaacaactctttcaactcatcaccacaacctcgaatcagttctttaaccttacttaagttcccggttctcgcagcgatatgaagagaagagtctcctcttttccctggtgattcattcttcttcctcctctcacctataaaactcaattgcctctccatcaccacacggaagctcttctgcttctccaaaaacccaccacggaaactcttctgcctctccattgttgctctaccaaaactcggtagcttctccataactccacgtttatgattctcaacgttgacacctcgaaaactctgttgcttctccattgatcttccgagtctgctttgctgatagttctcta

SEQ ID NO: 14868 - DNA, 613 bp, Arabidopsis thaliana landsberg
  unsure (1)..(613): unsure at all n locations
attttatattgacattatttcattaagtcaaattgaatttaaaaaaaaaaaaaaaaagagaaagagagagtgaaagagacgtgggaatttcttggtgtatacgtcccacatgcttggacctctacatccttcatttactgctccttcaacctatttagtttaccacatacatcgttaactatttttagaagtttcttcactaaaccaacttttattcgatacaataaactatgactataatgtatatgataattctaatgcatatgtgatatgtggtacctgaaaagcagcagttgcggtaccaaaaatgaaacctttagggaaattggcacgagtaaagtgtatatcggnnnnnnnnnnnnnnnnnnnnnnnnnnnnnnnnagtgagccggtcagaccgaggaacagaactaaacctaggagaggaaatttatgaaacctccccattagtatatggaaaacttgaagaagtgtaaatggcaaatatgttggaagggatttttgctgttatatatagagactataagacactcgattagtatgtatttattttataagttcttaattttgaagtaaaatacgggaagagttaagccacgtgagtcacatacgt

SEQ ID NO: 14869 - DNA, 593 bp, Arabidopsis thaliana landsberg
tttcgcgaaatcaaatgcgcctagcccaatactagccttaagcgccgtgtcaaaggtgtagttgttgggcatgaaaccagccatcctcatacaagatagcagcttaagagaatcctcgaaatatccattttctacatagcaagatacaattcctgcccaaacaacaatgtctttgcacaaaatcccttcaaaaacagttcttgcactatcaacagaaccacagacagagtaagcattaataagcgcagctccaacaaaagcattagaatcataaccgagcttaacgataggagaatgcaaccatggacaaatctcagctttgtccaaactaacaaacaacttcaagaaagaagtgaagacgtgtggattaagctcatgaccctctcgatgcaacctggaatacaaaccaatgggatcttgacacgcatacccttgcgcaagagtaacaaaagagacattatttctctcaggcatttcgtcgaacaggtttaacgcatctttgtcaaagccagctttcacataagcgttgagtagaatgtttgtggcgaaaaggtctaagcagcttcctttcttcaagatgtcgcaatgaatag

SEQ ID NO: 14870 - DNA, 829 bp, Arabidopsis thaliana landsberg
aagcccgagtccattgacatgcatggagtcaactggaaaggcgttgactttttttttttcaacatcttacatttggtggatgaacacattcgctatgaaagtcctgtaagtctactactacttcaatattattacctctatggtgtgttatgtattttacaaattttgtgaattgagattgtggaaattgacgatcaaatcagacgaggatcgttcgataaaggagacaccgagtatgaggagatcgaacggccagtagcgtataggagagtgatgaggacttggggagattgggtggaacgaaatattgatcctctacgtaccactgtcttctttgctagcatgtctcctcttcacatcaagtaattaatcttcctttctttttttcttaattgttgcttcaatacacagattttagttagtgatgctttgcttgcaaattgaaattactgacaaattgataggtcactctccatgtttgactagtgtcaccattgaaaatttgaaatgattacataatttagtttcagtgattgagtgacattaattcctactagctccggactccatttaattgacctgctaaatattatacgtgagagttagtagtttttaaacttttccttaaaccaaaatgatttcaaatatgatttgatttaaaacaggaaaaggttgatcattttgtgtttttctctggattaggttattgatagattgccaattataatgtcacttagctaatttcatatttttgttataataatccaaaacaaaaaaacacaggttggtataatcattaataacaccagaccataatatttttaaacct

SEQ ID NO: 14871 - DNA, 582 bp, Arabidopsis thaliana landsberg
  unsure (1)..(582): unsure at all n locations
aaaattaattattctggagaaagatttaatgctaatggcattgagttgtaaataagtccaaatccaggatttatttgttaaaatggctgcaaaaatgtatatatagattatatagtatcatctactctactgtcgttcaaaaggaaagttaaaactttaatgaaaatcatataatctgttgccgtgttgcgcatcaaacaaacaacaaaataaaaaggctttaatgttcaaacttcaaacttagacttgggtatattcatcttgggccgtgatgaactctctaattctctttgaaatttggttatgggccttatagcggtccatttagtagtcagaaactaaaacataaaaggagactctttgagatgacaataagcggtaggggtgaacaatacaaaataccgcaaccaagaaaattgaaccgttcaacccgaattcagtttttctttaattcacaaaaccacttgattttattattttcttagagcacaaaatcaagtgattttggagaaatattatntgtaaatccacaaatttgaaacaacagtcaaccgtcagatttatatttttgtaccctactca

SEQ ID NO: 14872 - DNA, 984 bp, Arabidopsis thaliana landsberg
tgaaacccgatacaagagaaaacaaggtttagactgggacatgattttcttaaactgtataaatcatatcctaagtctaagggaccatgatatatagcttaaattagtagttaatttatgttgatgttaccagttaccactatgttatttcaagtccggatattgcatgttcaagagagtatataatttttcaaaacatgaacactccagctacatgttaactataattataattagaagaaacagttaatagacatttttgtagctttgaccttgataaatctacaaattaaaattattgacaaagatactcaacaaggtcaacatgtagctgctggagtgttagtatatatattttgttaatcaaaaataaaatctctctagtcttgtatccttaactggaaaatataaatggcgggaaaattgaaactaaaggcttagagatgtaattggtttatagatcgtaggatttgaaaatcctcattgatcaaatccgaggaaaaaccttattatttaaatttatatactttttgatgacgttaaaacctatatgtatatgatttaaaatcaaagaggatatctagcaagtatagattttaaaaataaagttttacttcggatttgagttttgtttttctacgtaaaacaattccaaatttattaagttccatgcaaaataacaaaagattattaaatgaataatactaaatttcaacttgtataagaataatattatgtaattagactctttttgaaatttaatgcggattattacacaagggaaagtgcatgaatcctgaaaaatgcctaaaacgtagaaaaattcccaaaaagtgtctaatagtgcaacatattctagaaattattataacaagtgattttgattttaaaaaaacttttaaatccataatgcaatatagtccctgcgattttcctttttatttgatgttttaggaaaaaatatattcttttgaattagatgat

SEQ ID NO: 14873 - DNA, 664 bp, Arabidopsis thaliana landsberg
gaaattgataaataatttgtgtattctccataatattcagtttaaatagtataaaacaacttgaaaaattgagtactagtcttaccagttcagcaacaaactaatgataatccccattgagtcaaatggaagcagataaagtggctttgaaccacaacttgcatggcttcattgtatacataatttatcattcttcatccataatgtggaagaaagagatgaaattcctcaagcaagtctcgatggccttgaaaaaggatagccacctacaaaataatacattacattaaatccaatacaagaaagatggaaaaagaaaaggtagtgaaacatatatatatatatatatacacctcctggtagagctcagcaacgctcttgttttcctttttatgcgttttcaaaacctctaaaaatgagttgaatacatcattgttctgaaatcttgtctacagaaaaaatgatatttaagagaaaagtaaaaaaaaaaaattgtacagaaaagagtaatataatttctagtagggctgcaaaataaacagcaatagagaatacaaatgatataaaccgaaatatttacaccgaaactaacccttaattaaaacgatagatctgatatcctaaattttaacactaaaatctaaacaagtttattcatctctct

SEQ ID NO: 14874 - DNA, 495 bp, Arabidopsis thaliana landsberg
gtattttccttcttgataagatgttttcaatttttagtgttaattcaactctgtttttttttctttttttcttttttttttttgtgttggattgtaacttctaagatcttcattatttaggtgacataatatgtggagttaactgttttccaaatgagttattgaaaatattgtaagccgctttaatttaagattttaattaattttattatatactacagatttatgattagttaaaaaaacttcatcgtcttcgactactcaccgtctgaccaaaaaaatatctagatgttttattcaattcattgtttttgttcaccatccttttattgcaattggtactacaagatcctaatttatccatttggtagaggtgaattgtttttggatcagtctcacccaatagattcctctaatagagtgaatgctttattttttggctaagctttgatattcttttgtttttattcttctattttaagattttcttgtacc

SEQ ID NO: 14875 - DNA, 163 bp, Arabidopsis thaliana landsberg
ctttcatatatactaacttaagaaaatttttgccaagatatgtaccgagggttaaaatctagaatcctaattacataacggccccatgcatctattactcttaccacagtacacaagtcctgtatttttcacaaattacaaatgtctaaaatccaagatgaat

SEQ ID NO: 14876 - DNA, 841 bp, Arabidopsis thaliana landsberg
ggagccttctctacaggaactgtcgctgcagggattagttgagcttcctcttctactcgattttcttcttctccagcatgagtttctccctctgcaacaacattctcctcttctatttgttcactctctgaatcgtcccatgaaagctctttctcttcttgctttccttcccagtcccaacttttgttttcatcaaaatgaacatctctgctaatcactatcttttttgttgcagggttatagagacgatatgcctttgactctttggtgactccaaacaacacactcttattgctcttttcatcaagcttgattcttctttcatatggcacaagagcataggcaatacttccaaaaactctaagatgacttactgaaggtttttgtttgctccatttttcctccggtgtgatgtcatctaaagcctttgatggactcctgttcaatatgtaaaccgcatattgaactgcttctggctagaaacgccttggtactcccatctccagcatcatgcaccttgtcatgttcatcacgggtctgttttttctctctacaattccgttttgctgaggtgtatatgcggctgtgagctgtcatttgatgccatactctctgcaataatcatcaaactccttagaattgtattcccctcccctatcacagcgtaaacaaaccaacaactgacccaattccctttctgcactagctttaaattccttaaacactctaaaagcctctgaattctctttcaagaaataactccaacattttctactgaaatcatctatgaaaatgatgatgtacctttttccactttcagatgttggattaattggtccac

SEQ ID NO: 14877 - DNA, 3074 bp, Arabidopsis thaliana landsberg
taagattcaaccaattatctataaaaaatattgcataataaaattgttgcaaaggactccttatgtcagttaatttgttgcaacaatatgcaaactttaaaattatttgatactccaacaatttgcaaccaaccaattattttaaaatcaaataattttaaaattttgcatagaaactaaccaaaaaaaaaatgtaacagctggaaggttgagattggttacaaagacgaattatttattatattaagccccaaagctacttgatttgtcgaacaacctctggtctctctgatcatttcaagtctgaattttgttcatccccaacatgaataccattatatatccaagtctcttaagcaaaacccgaagattcagacaaatcctgggttttcttttgtttatctattcctggaaattcacaactaaatcgaaacagtgtagtgtagtgtactgcagatgttgcacacaaggtgttcgacgaaattccccaatactaaaaattgttttttctttttctttaaaccaaagccttatgtcacgtgacactcacgttataaaagccagatttttcttcgatacaattctgttattttctcgttgctcttttttcccgcttcacaatttctctctgaagcaagaaaagccctcgagagacacaagaaagcttaaagaatcttgagaatcgtcttcaatggagtcttcttcttctatcaaggaggggaaactctacaaagatgctaaagatcacatcgctaaaggaaactacatcaacgcattgaagatacttgaagatttgattcgaatccatagagaagatcaaaacgcatggcttattcgtatcaaacaaggtcaagtattcttaaaactatcgctagaaacagagaactctgatatggaattcacatacttgttaggttctgtgggatgttactcggaagatgagaggttatcaccattttgtgcaaattcgcttcacatgttggccaacaagcttggatctttgatgtactacaagaagtgtttggtgaaagcaaaacaagctttatctgttactttccaggatatcacggatcctgttgttcggcaaatacgattcaatgaaaaacagaagcagatattgagaataatcaaagatgcagagtctaagattgcttctccggagactctagttgcttctactatgaaacaagtctctaaaccaaaagttttggagtcagagaaaattccagagacacgtgagggcgtggtgaaaagattgaggtcgttttgggtgggattggatgtgaaggtcaaaagagactttatgaaagtaaacattgcaaagcttttatcttttgtcgagagagtccgttacagagatggacgagatgttttggagaacgttcttgcttctgcaaggaaagacacgatatggacattctggatgtgttgttcgaagaggttctctagtgctgaggaatgtaagaatcatcttgaagaagtacatgctgcagattttaaacctggtacaaaaaaggataaggtccagagaatagggaaggactgggctcgtaagatatcaaatggaagttgggaaccagtggatgcagcggctgcggttgaaatgatcaagaatcagctcgcagatgtgaaagcgtttgcatctaaatgtaagaatgggtggtccaaagaatggcctttagctgcggatgaagagcgcggtaagttacttaaagaaattcagtcgcttcttttgttgtttcaggaacgtaaaattctctcttgtagcattcgagattggatgatgcagttgacggttaagcatcttgcgcaattagaaatttctgagcataatcttagctccaagtgccgcttagtggaaacacctcagagtatttgctttttggaatgtcatgaactcaatcaaatcctagaccttctcaaacgcattaactgtgaacgggttgatggtacagaattggtttccaacgcaacagacagtttatgtggtcgtttgcgagttaaagaaaagattgaatttgatcatgagttttcatttatgcttctggataaaagactgctgagaggcaagattgcttcatttgatgatgaagggataatagatgtttgtgatcacaatgttcactacaccaagacacatcctcagggtgacgataccataacctggttacttgactaccctttgatagatgagagctttgaatttccccgatctatcagagcacacaatcttgaaatatgtgtggctgttctgcgagccattcacttcacttgtgcgactttgggaaccaaatatgcaaagaaattgcagatcctgaattatgatgcagcacttattgacgccaaaaacttatgtatactcgaagatgaaaggagaaaaaatgttccagaagatcaatggcacacatatgcatctcttctgtgcgataaatgtgaagaacgtttggtgatagacgccggagattctcacactacaaaactatgcttatgtgcagtacgagatgttcttgaaaaagcatcacatccgacatttgaattctccgacctagaagattgcatgactcttatacatgggcataaaaatctgaatgatgacacagtgttgaagtccatagaccttctgaaatcagtggtcaccaacaaggttctttccttatctaagttttaatttacaacagtataacataaattatctaaattatctaattgacttgcaggttccggtagctgattcaaaaattttgctgattgagaattcaaggactaatttgctaaacgacctcgtcaagctttctgtttttgactaccgctcttatatcctgcacctgctgaaacgatatcaacgggttggtttgtaactttggttttatacaaggagctgtcatattcctctcttttcatatattaaaactatatctattcttctaggatgagttggatgaaattgttgatatggatgccaaaaccaagttagctgcagcacaagccgaacatttatccgaggaaaaacaagagaaggggaagaagtcagggtcaaataagaagaaaaatagaagcaacaaggtcggtgaatg

SEQ ID NO: 14878 - DNA, 907 bp, Arabidopsis thaliana landsberg
cagttgactttaacgttaacaaatattcaattgtacaaaatttggatattttgtaaaggtcatggcaaaaaaaattgtgaaccttgcttggattgggaatcaaaagatgcgaaaggcaagcttcaagaagatgatgctaaacgggctgatgctttcgttaagaaaataagtgagatgacttagccaccttgtgagatgaccacaccaccaacttacatttatattacacaatatggtcacatcacaagtttactttctctagcccgttcagaatcctctaaagacttgctttcggatctttcgattcccgatcccagcaagtatcacctttctcatggttgttacttgtcacttattatttctttcttacatttgttttatgtttctatgttgtgtgaaaaaagagttatgcacttgtggtcttatatacgaaaaaccaaggataagggataaggatgtgagaatccaaatatgtcaatttacacattcaatgcctcataaaaagtatatttacggtaaacatatctgacaaaatctaaaaatccccacatactatgtactctttgttaataccatttcagaatttaaaaatgtttgaatggattgttttgacaacttgatgaataaatttaggttatttctttccctctatgtttatcctcaaccttctaacattgtgattggttttcactttcatttcactttcacgtattttctgatacgatatagagaacaatctatgttgcatggaaacggaaacggaaacgcggaaacgaaacatttcggaaatgagaaacgattttttcttaaaattaaggattataaacgttttggaaacgtatacacacattcgtatatatatatatatatatatataacataaaactatattaaagaaaaaatggtt

SEQ ID NO: 14879 - DNA, 785 bp, Arabidopsis thaliana landsberg
  unsure (1)..(785): unsure at all n locations
tgccaatttcaatttctctcccaaccagaaaattctctcactctctctcgattttgcggtaatggagttccacagccttttgagaagggatcttcaatttctctgcaagaggaacaaaatcccagctaatatgaccaatatcgccatggctgatgctctcaaatctcttgagattgtaagttttcttcatctgttcgctcgatttcattctgaatctgaacaattttggaaatcgctcacactcgcatcctggatctgtagttgtttatggattcatttatatgaatnnnnnnnnnnnnnnnnntgctcgtttagtgacgaagatctgtggaattgagcaagattgagaatcgtttttgctttgaaaattttcgatctcagatttgttgttctggtcgatcgctgcttgatttgttatataatctacggaaatttgtcaaatcaatcaagagcgagatatcgctttgggtgctttaggatatttttggatctcaaggctctctctgcaggccatcactgccttattcttacgcttaactccacctctgttgatgattagatcttagcatggtggtttagaaatggaacttgtctagaccctatttctaaagttggagtcctggtcatcgctcttgagttgtctgagcttgctcttcagttatctgagttggaccacgagtcattgctcgccgttctcataaacgcaccgagactccatatttggtggctccatagactatgaatgactcgtttcacgagcttcagtaattaatcgcaatgatgcg

SEQ ID NO: 14880 - DNA, 776 bp, Arabidopsis thaliana landsberg
  unsure (1)..(776): unsure at all n locations
tgtgcttatagactccagatttgtaatgagcaaaatcctaaccaaagcaaaccattaatgatacatctttctttaacttctattcaaaaacaatcttaggatttaagttttattacctcataaacggtaaaagagacttcaacaggtccattcttataaacctctgccatgatatcttgtggattagatttcacagtgtatgtactaacactgtaatgcttcgactcgctccatagtttgttgtcgctaacgcatttcctcgaacatttcggtgtaggatatgccggttcgcaacccgggtgagagcatccggtattatcaaagtatggatcacactaatagaccaataaaaacatcaccaaaatgctctaatttaaaaccataaccaaatttgagtgttcctagtgagacaatgatctttacctcttctgtgacaacaccgctatacgaaaagtattgccaagcagcaattggatagccaccgtcacaaccatcaccacaacggaatccacaacaagctaagagatcatttactgataaagaaatgttctgaattgagaaaaaaaaaaaactagattaggctttggattattagtcttaagttggtaattcaattgaatattagtattattaccatgccaaattggatcagaattattgatgtgattacagaccaaagccacagaacanagtctaccaaaccaaattataaccttatcttgcaattaagtcagatccaagatgtattactgttgtctgagcgccccccccccccc

SEQ ID NO: 14881 - DNA, 813 bp, Arabidopsis thaliana landsberg
  unsure (1)..(813): unsure at all n locations
ataagtatggattttgttttgggccttcctcgcactcaacgtggacatgactccatctttgtggtggttgatcgattttcaaagatggtccattttataccttgtaagaaaagaacagatgtagtccaagtcgcgacattgttattccgcgagatttataagcttcatggccttcctctttcaattgtctcggatcgagactctagatttttgagccacttttggcgttcgttgtggcgtttgcttcagactagtctcgtaatgaattctgcttaccatccacaaaccgatggtcaaacagaggtcactaatcgagctttgggtgatctattgagatgtctagtcggagataacattcactcttgggattctgttttgtgtcaggctgaatttgcacaaaatcatgcagttaatcgaagcacaggttatagtccttttcatgtagtttatgggtttgtgcctcgaggttcaataaatttaagcattgcaccagatcagacaagatctcatggaagggcttgtgacatgattgatgattttgcaaacattcatccaaaagttaaagctaatttggaagttgcttcttctaaatacaaagctgctgcagatacacgcagacgtgatgttcaatttaacgttggtaataaggtttgcgctgtcctcaccaaagatcgttttccgtcgaaagcttataacaagctaaaagcaagaaaggtgggaccactggaggtgctngagaagataaacaacaatgcttatagaccttgtcttcctccacacatgcacacttttgatgtttacaacgttaaacac

SEQ ID NO: 14882 - DNA, 499 bp, Arabidopsis thaliana landsberg
cgtcttcttccattcgtagtaactgcgactgtgattaccgtttttcttgctcttacttatctcttgggtttctcatgaacaaaagtaaagtaagtttcttttttcaattttagtttttttctacaaaaaagtttggattttttctttaaagaagttagggtttatccgtttttttctgtgagtaatcaatctagcatgtggaggcatgtttcgagtgaatggcaatcactgagtgaaggttgtgaagttgaaatcttttataaaaacaatggcactgacggcgtttggtacaaagccattatcgagtcaaaaccgctaagtgaagaactctgtgttcggttgtttaaagatttctctttgactcctagcgaactaaaagacaatgacaaagatttctcttttgactcctcttagcgaacttaaagatttctcttttctattgttttggatactttgggtgtgaaagaataatgaaagactttaacttttttgttagttc

SEQ ID NO: 14883 - DNA, 423 bp, Arabidopsis thaliana landsberg
aggttgttacgtaccaagtcagaaacatattgaaagctacgagtctgttttccatcaccataaacagtcattgggtgtttgcgaatggtctgcatagatataagccacaatagttctgtcagagtgttttcaaaaggctttatacgaaagcggttgtctttatgttgatgaaggagctaaacctgggcaacaaagttactaacaacacgcccatcatcaaggcacattctgggcccatatgtgttgaaaatacgagcaattctaacctgaaaattgaaaatgcagttagagatcactcttataagttatatccgtgatttggacataaatagtcatcagttctaaacattccaaaacattggaaacagaaagaagaagaaacatcttcaaatgtcaacatcttgataaacagcagagagatga

SEQ ID NO: 14884 - DNA, 415 bp, Arabidopsis thaliana landsberg
  unsure (1)..(415): unsure at all n locations
aacctgtacgcatcccattcatagataggcaaaacaaaccgatcctctagtcttcttcttctactcttcatgtggtatatatcagcaacatgaccagacattgtcgttgctaaggagtaagaagcacaggacttgacttgctttgagaatcctctatggagtgcacaaacttattcaactcttccataagacaatgaaagtgatcattgttaggcaagaagtaaaagccaatggtagcttgtttcaaatacaaaagattgacttcaagaccagtcttcttaagcccatccacataggctaattgccaatcttgaacaagatctaaaccagcgacaacaacaagactctttggaaagttgactcctttaaggttttgacctcacagcaacaacaaattacatgctggatgntctct

SEQ ID NO: 14885 - DNA, 490 bp, Arabidopsis thaliana landsberg
gccggagtatttgatgtgatctagagctaacttcattcagggaggtctctccaatcttcctctgagctgcaacaacactggtacattagttaacgttcaacttaattgaaatatttgtaagcccgggcatgttactcactttcacagactgtaagaagttcctctagatgtgttctgtcttggatggtctcctcaataagtttctcaacgacggttcctctctgatgaagcaagcggatggaaatgagtgggtctaacacaatatgatagcataatatcgaaaaacacgcgatgtgtacctctggatcatcgaggagcctccgttgattattatccccacttaggagatccctcacagcttcattgtagatctcaatcgcagagaatttgagggtaaatttgcggtccgtgtgctgaagaaaatgaaaaagtttggttacttatgaaggcagaaataagaaagagatgtcatgccgcacggttttgttca

SEQ ID NO: 14886 - DNA, 612 bp, Arabidopsis thaliana landsberg
  unsure (1)..(612): unsure at all n locations
cagagatagaatcgataaaggaagagatcaaaaggtttggttcaccgtacagaggtaatgaaaacgcaagctttcacagtgcaaaacaagctgttgtgtatggttttatctatgcgtcaccagaagccccggttcatgttgttaagaacaaaattctgtgtaaggactgccatgagttcgtgtccatcttgactcggttagtcgataagaaaataactgtaagnnnnnnnnnnnnnnnnnnnnnnnnnnnnaatggcgaatgttcttgcaaaagggaagaaacatcatttgtttaataagagtgataaaacatttgtgaacagacattgttatcgttatgaaaattattaagcaatttattcagaggcttgaccactgattcggaaacaactctagccaaaaaagcaacaagcacacaatatgtaaaaactggaagttactccttcaactgcggatcgctgggtgtagcagctgggatctctgttttagactctgcaattagaccttcaagcgttttatagaactgctcaggaagaggaccaggtcggtgctgaggaacattgcttggaaatcgcgcatcattctcaatcacttcacactcgtaatcatctg

SEQ ID NO: 14887 - DNA, 1257 bp, Arabidopsis thaliana landsberg
taacgcaagttttgttctctttttttttttgatcaaaattagttttgttatcatgcatttaaaatatgaacctatttcagtatttctcttagttacaacttaataaggttgtatctaaaattaatattgatttgttttatagtatttacctatggtaaaacagcaaagtcacttgtagtatatcctaattctacaccccaatctagaaacaagacttctgcgcaagttagcgcaacccatcaaacatagtcaagccgccccaacctatcaaaatgattaaagcatattaacattcatcatttagataacttcaaaaatgaaaatactaattaaaaaacaaaataatcaaactaatacgtaaccatttaaacctctatataaaatccatagtaatattatcaatagatcacacatacataaaagtagtagaactaaaaaatggcaaacctcttggtctctactttcatattttccgcacttttgctcatctccaccgcaacagccgccacattcgaaatcctaaaccaatgtagttacaccgtgtgggctgccgcaagccctggaggtggccgacgtctagatgctggccaatcatggaggctagatgtcgcggcgggcactaaaatggcacggatttggggtaggaccaattgtaactttgactcctcaggtcgtggccgatgccaaactggtgactgcagtggtggactccaatgtactggttggggacagccaccaaacacgttggctgagtacgctttgaaccaattcaacaacttagacttctacgatatctcacttgtcgatggatttaacatacctatggagtttaggtaagaatatcaccattatcgtttcacaagttctacttagtttttgctttattcataaattcgaactcctaaacgtaaaaatctcttgacatttaacataatatacaagcgttaaaatcattttttctgctatgcaagaaaaaaaagataataaaaaaagagaacaattatatttcatatttctaaacgttttatgttcttagacgactcgataatgatttgcctttctttttttggcgtgctatctccagtccaactagttcgaactgccatcggatactatgtaccgcagacataaacggacaatgtccaaacgtgttgagagccccaggtggatgcaacaacccgtgtactgtatttcagacgaaccaatactggtgtacgaacggtcagggatcatgtagcgatactgagtattcaagat

SEQ ID NO: 14888 - DNA, 606 bp, Arabidopsis thaliana landsberg
  unsure (1)..(606): unsure at all n locations
ggcacgaattttcaccagctcaagaaattgtaacttcattaggaaatgccccatttgtttcagctctttcgaagttccttgatagctccatatctccagaacctttactcgagatgatgacagacaagacgagctcttccccaaaatgccagaacaaacacatgcatccccacattgtttagttgtgtagtgctctagaccctgaagcatagaggagacaaagttatagacatattggtatatatggcgttgaggataggtttgtatatatatatgtcatgagataccttgaagacaagtgtttcaagatttggagagttcttgatcagaagtggcagaatttgccatccttgcttcttgtcactcgcgatcgatagataaacaaggttgtcgaacatgggtaattcttgaccggagaagtaaaacagctgcaaccaaaaccaaatcagctcaagtaataatacaatatttgagtcagaacctcaataaacgaatccagttttggcatcagaagactgtaacataaaaagatctttactagaacaataaaaaaggaatagcagactgacctcaagagcatcactangtaagtgaagaaccttaacc

SEQ ID NO: 14889 - DNA, 515 bp, Arabidopsis thaliana landsberg
  unsure (1)..(515): unsure at all n locations
acttaccgtgcttctcttgtaaatcggagcattttcctcaacatcatagcctttactcttattattctcattactgtttactatactgttgtatacagtctcctgcgcatcatatatctagcattcgtatgtgctttatannnnnnnnnnnnnnnnnnnnnnnnnncttcatttcctcttaagtagattttcttttttcttttttgggggtctctcttttgccacctttactctcattactgtttactatcagaaaaaagacagcagtttggggggatcaagcctcagtgacaagtcgagtgcagtcaagtccaacagtacaccgtcaactcctcaaggagaaggcagtaattttcatacagaatctagactttcagaaggctccgcattggcagatcaaattatagagactatggagaatagagaagctcatgaagacagttttcatgagattgagacacctgaggtacattgagattttttcacagttcttgagctttcttttgaacaagtga

SEQ ID NO: 14890 - DNA, 722 bp, Arabidopsis thaliana landsberg
atttgcaataggttggttgattacgaaagatgaacattgattgtcttgacaggttaggaatgttatactgactggaagcctcttctgtggacctcttttgatcactttctccttccttaatactgttgcgattgcttaccaagccactgctgcattgccatttggtacaattgtggttattttccttatatgggctctggttacttcaccattgttaatattgggaggtattgctgggaagaacagaaaatctgagtttcaagctccttgtcgtaccacaaaatatccaagagagatcccaccaatgcgttggtacaggagaacacttccgcagatggctatggctggttttttacctttcagtgccatttacatcgagctttattacatatttgccagtgtttggggtcacagaatatacaccatctatagtattctgtctatcgtcttccttattctcgtcatagtcactgctttcatcacggttgcattaacgtacttccaacttgctgctgaagaccatgagtggtggtggaggtaatgctttcttttctctttctttaacttctggttccattattcatctgacttcagggaatatatactcgtctgttgctgctacataattgcgattcatcaatgctttagcctaaaagagaatcccatgttttgaagttgtctataaattgttaatctttctgttcatctgacttttttattta

SEQ ID NO: 14891 - DNA, 669 bp, Arabidopsis thaliana landsberg
atataagcgaacaaaggtgttattatacgaagttaaaggtatccaactttttttctttgacttttgacataatgagtttcttacgtttaagaaattattatagtcagttttgagtttccatgcttctaaaaacttaacttaatatttttttttatatataacataagaacatctcattgaacaaacaacaatggtgtctttaattataataaaaatataaaaatgataaaaataaagttcgttttgggagacacatgtctacatttgtcactctcagattggttgattttttttaatagataaataattaattaaatgataaaattgtataaaaatctaatattcttatttgctagagtctcaaatgcatatatcacctatgaaggtgctctaacgactttcttacttttaagaaattcttataatcagtttcagagccgcgactacctctttaggaaaggggtaagtgccctagggcacattttatgttatacatcaattataattttcttaggttaattggccatgcatattgtcactctaaaagtcattttatcaaggttccaatccaaatatttataacatttatcaatttctttcttttgttggttgcttagtctcaaacatttcttatactttttttgtgttatttaggattatgggatacat

SEQ ID NO: 14892 - DNA, 358 bp, Arabidopsis thaliana landsberg
catcagcattaacccgccacacagttacaaaacctgccaatgtcatatggaagcaatttgggcgtgttcacaaagcacaaaccttttgtatttgaagatctttcttcctcaccgtcattgcacaatcacagtttgaggcaggtgaggaggcagggtttctcagctcagtctcgagcctcgcaagctcacgctgtagttgctttagcagagccttgtctgacatagcaacattgatccgcgcctttgtggtgacttcctttgcacaaaacgcaaacaagagagtgttcttcgttagctctacatgactccttaatgggctcagagtgcagatgatagctgttcttgcatgaccccccaa

SEQ ID NO: 14893 - DNA, 306 bp, Arabidopsis thaliana landsberg
caataagataccaaatctaagatgactttggtgaaccttaccatcaggatagaattatttaggtacacaactatttcaagaaatggaaaatagttcaagataagtcaggtcatcataccggaaatgctagatccagtagtgccgtctgattgccaccaaacttagtaaacaagaaacctccaggatgggactgaaaaagaaccatcaaatctctaattaactatacagataagcaaattaaaaccaacttagaagataccaaaacagatatagagaagactgaaaaagtttcctactttctccttt

SEQ ID NO: 14894 - DNA, 582 bp, Arabidopsis thaliana landsberg
ccctatcaccaaataactcgaagcatagatccgcgtaatccttgaaatcgtctctgagcatattataaatatcatttcgttagtgcaagaatatgttgttatcattcttaataagcgacatggcatcaacaacatacacgatcgttttgttcaagaaaccgttatattcatcttgtagtgtttgaggaaggtcccaatgaaagagggtaacaaagggcgtcatattctttgcgacgaggccatctatgagaccgttgtagtacttaatagctcctgggttcactcccctgctcctctttccttctgctcatatatataaatatcgtttatttactcttccaaacaattgcaatggaatactagtatattacaatagatatacatggagcaataatgtacatacttggaaggagtcttgaccacgcaatggagaatctgtagccagtagagttgagctcgtccagcacctatatatctagcaggcggttatatgtatatgtctagacaaatgcataaacgctagataatttagtgtgaacgttggcttgcatatatatgtactaaggaacttacctgccaaga

SEQ ID NO: 14895 - DNA, 588 bp, Arabidopsis thaliana landsberg
  unsure (1)..(588): unsure at all n locations
caacctcatggtcttgtaacgaatgcttggcttagacccgtttcttctaacttcatagagacagagaaatttgggttcttttgttttctgatgcaacatgtatttcttcctgatttacctagactttatcgtatgcctccagtgtttagacacggtttggaatctagttagggttttcactggaagccttactataatctcttccaacacatcgtcgtttggtatcttaataacctgtcttcttcttcttttgctttctcttccatgatgcatgatcatctcctgcttcttcttctcttcttcgtcttcttcttttgctttctctttcaatatctcttgcgtgatattcacttcttctttttcttcctctctctgaagaggacgaagcaatctttcccatgatatgtgttggcttattttgggatgaagaaaattcgtttcgttttacanagattgtaaccaaaacggngaagtgtcttcagtcaagtggttccacatttttcacttgagttcgactccgctaaattggtgttagcccaataatttgtgtgtactaagaaaaatcacaagtcctcacatacctaagaa

SEQ ID NO: 14896 - DNA, 1033 bp, Arabidopsis thaliana landsberg
ctataatacttaataaaaaaattaatatgataatttagatatcaaatctaatttgtttattttaattggttacttttttggaaaataataatgtatttcgtttttctaattaaattaaattaattaaaatttagatatcaaatcttatatgttgattttgattggttacttttttggaagctaatatatatattttttgtttttggataatcatgaattcagttttatctagattttgttttcaaaaatattaactaaccttaatattttttggtactatataagtaaaattgcgtggtaggaaattttgacctaaatctgtgttgatcaattttaggttctttctcaaaacgcattttacaaggagggaatagaatttgaagaagcattgtgtttaggttaaaaactgaatctctctattcatcttccttttttattttcatataaataccgatttgatttcattttatatccattctttatctctattaatatatagggtttagaaatcaggtgatattcgcttgattagattcatcttcttattatacattgaggtttgtgttttcatcttcacaccttctctaacatatttgagtgcagtacaacgcaatccacgattttgattggctattctgattactatattatttagaaaccttaatctctttactgtttagaattcacataaaaattcgtaggttgtgatttttttttttcagttcgtgtatagacctaggcatacgattttcccttttgtttttgtttttttcatgtttgggattttcgtgtttaagaaaaagattctgtaaatatgtttgtttgattcagtttaaaaggaaaaaattacatcatgtatttcgatatatcatatatttaaatgtattttgtatatattctagaaatgatcaaaaatgtataatttcattttctttctttcttcacagattatgatgttcatcaaatggacaaaatatcgacaccatgcgcgggaggaagcacctgaggagaaatgcacagaagattgtgtggt

SEQ ID NO: 14897 - DNA, 922 bp, Arabidopsis thaliana landsberg
  unsure (1)..(922): unsure at all n locations
tacccggataacatatatgcccatctcttatctatatggcaaataatttgtgggtcaaattacacctcttattatgcaactacgtgaagaactacacttacaaccttatgaaaaaatcaactggaacaaagcgcgacatctatgcgcaaaggtatggtttcaaatttactctatcatttgaagaatatgcaaccattacatcatttacccatgtaggaagacaagtactatccccatcctctagttcaagatttgatatgggatgctctccacaccttcgtggagcctttgcttgcaagttggcctataaacaaacttgtaaggaaaaaggctcttcaggtggcaatgaaacacatacattacgaggacgaaaacagtcactatatcaccattggatgtatagaaaaggtaaaacatttagcaaacctaataaaaattatagacgtatgtagtctctaaaaaaaggtttatatgttaaaaactatatgcagaatttgtgcatgcttgcttgctggattgacaacccggacggagatcactttaaaaagcatctctccagaattccggacatgatgtgggtagctgaagatggaatgaaaatgcaggttctaatagaaatattaacataacatatgtattgtatactctgatatgaacctatactcatcatgactacaagtcaccacaaaagatagcttatacaagtcctcaggagacaatataaggcacttgggaggaaattatattaaatgatccggtctcaagttagagaggatgtacgggtctaggcccaaaacttcgtactaattaattaaaaacgactntataagacactagatagttttacttacgtactctagtagaaaaagttacttaagatatcaaaatttgtgcagtggctttgaagtcaactttggatgac

SEQ ID NO: 14898 - DNA, 684 bp, Arabidopsis thaliana landsberg
ttttaataaagggttgactgggtttgataggttttttcttttgtgttgaaccaagaacaatgttggtgttttatttttttgggtttcgtcattttctgcatattatatgtttgatatatgtgtattaataatagttcatgtttttctctacattttgttgatcgatcaacaatgaagtcagaaaagagaggattttttggacaacaaacaccaacaccaacttgggtcgtaagaagtgtacctcttaacactctaataattccacttggaaatcaaaaataacaaacaactcaatatttcgaagagagatcatcgtcgtgaggtaggaagatgttggagacaaagtcttggaatctagaagagtagatcttaggatggacggttgagattgagtttgagttatattgaatggatttgtaacaatgttctatgcgtttcttcataccatagtcttgaaatgtgtctactatccctatatacaaaacaacattgtaccattcttcttctccggtttctctcgtcactcgccgagccctcgctggaatcttcatcccaaaattgatatttgagctgaaacaagaaaagttagatatatatatatattttctgtgatgcgaaatttctagcgatggtgtttataggagtgggataatgctttacctattgtgaaagacgtcactgagt

SEQ ID NO: 14899 - DNA, 703 bp, Arabidopsis thaliana landsberg
cgtttgctcccctcccagtggtgcaaattgtcccagatgcctatacctgtcaccaacgcaaaccatacccaaatattatttgagtccaaacaccaaaaccggatttcacaatttttttattgtgtatatatatccaaaggaccttcaaaccacaatttcggcagtcaaaaactttgatctcttttaaaatccttcaaattaaacttgtaccaaacggatcaagacggtttcaagttggttctaaaccaacaaaatatatatatataatctgaaccccaaccaaatcaaaattaggattaaactacataaactcactaaatgtgcttcctaacgtcctctttatctttttcattcttacctaataatataaggaatcaactccatcttttctacacccttatggtccaatgcacatgactcagtagtatcttgagacagagttttggaaattcctctcaacttccatattctcaaaaactatgtaacattaaggatcaatgcttacacactatatctaatacgtcacagttttggtttggtttaatcaacaataagacaaagatattggttcaaatttttagggaggactaacctgaaggggcggaaacggtgacgaccaaatcctctcatcctaatgggaccttctggactcttctcacactcttccatacggtcaaagcatttagctaggtaagcaccttgc

SEQ ID NO: 14900 - DNA, 712 bp, Arabidopsis thaliana landsberg
attcatgcctgccaaccaatctaatctctggttcttctaagaaaaacctcaaaagggcttccgattccttcaccgacaaaaataagttaggacaaggaggatctggctctgtctataaggtaagttctgttcttattatacattttctagagtttcatgttggaatgttcctacttctcaattggttaactctttgccctttttgtggagtagggagttcttactaatggtaagactgttgcagtaaagagactgttcttcaacacaaagcaatgggtggatcatttcttcaacgaagttaatctaataagccaagtagaccacaagaaccttgttaagctcttgggatgcagcataactggaccagagagccttctggtctatgaatacattgcaaatcaaagcctccacgactatcttttcggtttgtttttgtcaatcctaaaccttttactacagttaccatgtcttgatggatcttttattgacttgttcttgttgctttgttttggttcagtaagaaaagatgttcaaccgttgaattgggcaaagagattcaagattatacttggtacagcagaaagaatggcgtatcttcacgaggagtcaaatcttagaatcatacatagagatattaagctgagtaatatccttttggaagatgattttacttccagaattgctgattttggattggcttgattgttcccag

SEQ ID NO: 14901 - DNA, 777 bp, Arabidopsis thaliana landsberg
tggctctcagtagatccaaaaacttgtctttctaacaaaaattggtaaggctcagagtattgcataatgtgctcaaagaagaggttatcaagctcttctcaaacaagaggtgtcagaaattaagcattgatcatcatcgccaaaaaaacagagatcctaaaacgaaatctaatttgcgaaaaacagagaagcggcggagaaagaagcataagaattagggtttttgtttcagttacgatgatgaagatgaagaatcatgtacggtatttatagatacttaatgggcttattaaaggcccattaaagtgtaaccctcggactcattttaccgggttaccctctttaggtttaaattctcgccgacaatagaaaaaacagaaaaatccagctattccataaaggttcagatcaaaagcccattgggccttgaaatttggttttcattagtgtttcacgcttttgtgttttgtctgcacaaaatagtctcactctcaggttttgacacctatcgtctcctaagagctaaaagtcttctttcaactaatattaaaaacaatcctaactaagaggatcaaataatcatctttcttaccttgtcaagcaagtttcttgattcatcttcaagtttcattttcaattctttccgtaatctttccctctgattgattaacaatgctcttatcccatgagctcttcttcaacacttcatttctgttacgcctttcttgtttcagtttctttttttcagagcagaagatgatactcgagcttgaatgt

SEQ ID NO: 14902 - DNA, 773 bp, Arabidopsis thaliana landsberg
ataatgtgcatgtgaaatattggagaatattcactttataatacgtaaaacatctaaatgacgttgattctacttctacaaataaatagctctaattgaattccattttactaattatctgaaataaaagtataaacaaaaccaaatttttaggacgtgttatgatcataataattaattccctcaaacaattagtgggtttgctgaattatcatttgaaatgtatcattattttagaagagtcttacaagacggcactaaccaaaattttagataattattgataaatcattcgatcattatataaaatattaaataaatttcggataatcaagagatttaaaataatactgttgctttagcatcctatcctcatcttcctccataaataacccctttcgccacctctctctcatcaagaacttctcatttctccttgaatttttctcctcactagctctctcactctcaccaaagaaaaacaaaacactagaactaaacaaatggcagtaaaaagatcttctaagctaacacaaacagcaatgctaaagcaaatcctcaagagatgctcgagcttaggcaagaaacaatgctacgacgaggaaggtctccctcttgacgtaccaaagggacattttccggtttacgtaggcgaaaagcgtacaaggtacatcgtaccaatctccttcttaactcatcctgaattcctgatccttcttcaacaagcagaggaagagttcggctttcgtcatgacatgggaggactcaccatc

SEQ ID NO: 14903 - DNA, 455 bp, Arabidopsis thaliana landsberg
taacataacgcatgacatgcctgatcagtgatgattttttttgcttgtcggccgataaaagatcggggggttatttgactcccgggggaggtcgtcctctcaggctccacagtatcctagtagtcatcaaagggaacatgtacgaaaaatttcacaactcgcaaagagaaacataaagcaaatattaatttcgctgagactattccatacccttggccgcgcaacaggatgcggaatcctagaagatttgactgtttgcattgcttgctccacggctttagttcccccgataaaatttgggtgtgaggtgtttatataatccatctgcaaatggtaaacttaaatattttaaactaaatttaaaagaggcactaattaataaaattgagaggaatcaatttttttgaacttagaacatggtgcctactccaccagtgtgacaaaaaaaaaaatca

SEQ ID NO: 14904 - DNA, 553 bp, Arabidopsis thaliana landsberg
tcatcagtcccctgaactgatgtctttgatagtctcttcactgccttttcttgaccatcaagtaactttccctgtaacccttaattttgttacacaacgaaatatttgtccagcgatagattatgaattaagttttcaatcatttttaccttataaactataccaaaaccaccttgtcctagcttgttggcgttagaaaaattgtttgtggccatggcaacttcttcaaactccatcaatggcaattcgagatcgtctgtattgttttctctagatatgtgtctcctacttgatattacaacttcgttcattatcaaatctcggcttctcagttgatgatcaactgttacatacagacaccaaaaacagtaaagatattagttttaagaaatttacaaacaaaaagaaaggaattaaaatttacagatataccaataggtgtttcgattagtattgatcgcttctgcttccttttccacaagaagaagataatgaaacttaaaagaagcaaaacgctcactccaatactcgaacctatgatttttgcacttct

SEQ ID NO: 14905 - DNA, 745 bp, Arabidopsis thaliana landsberg
tgccagtacactattctaaagtcttgagcaatatgtaaagctactcttagtcgcatcgcccacttcatcggttgtgactcccctaaaaaaacaaaacaacagttactacagaatcataaccgagtgtattagataaagtaagttacaacaataagttcaagaacttacaatggaaaagatgcttagccaaagtttcattaggcataaactcagcaacaagaagtctctcttcaccttcataacaacatccaagaagatttgccattctataattccttaattgaccaacagctttagcttcctcctataaaaaaacaaagaccagagattcaaaatccaagaatccaaattaacataaaaaggtaaagactttattaagcaaattaccagaaactgacgagaatcaggccaagctttcctattaaaccttttaacagcaatacgtctttgattatccaatttccctttatacacaacatttggagctttttcaccatgctctgatactatattctctgtagcaaatcctgatgttgcgttcctcaacgtcttaattgagaattcacgaaactgaggcaaatcattcccttcacctttcctatctttatctaaaggcaaaaaacacaaaatccacaattcgatcacagagataacaaaacaaaccctagaaagtaaaagaataaaacttgatctttacctaaacctgtgacaccatgattagatcctttagggtcagaatcactac

SEQ ID NO: 14906 - DNA, 590 bp, Arabidopsis thaliana landsberg
  unsure (1)..(590): unsure at all n locations
gttctttcctccagttaagcatatcagaccacatttgcttagccttttcgagatcaaactttcttgccctcaagaacctgatatatttcgattgatcagagcaatggagaagaagaaaatcaaaagatcaagaggaaggacctaacctaagcatcatgtgatgatcatcatgcttagagggaagtagttcgtctaaaataagagcttgacggaaagcatcaaccgcttgcaactcttctgtatcgatttcatcgacgattgagacacacgccacacggctatgccttcgacctttcttggtcattgagtgcttaaacttgttcgtcgcatttatagccttcttctttagagagcaaagctttgttaatctcttgtcatcttctgagatctcaacatctgcaagattcttacttttatataacgtctggctttcatacaaaaaaaaaagattggcaattttctcagcttacctatcttattatgtcggtccatatgagcaaccattgtatccgccatgatttaaagtcctatttaatcacaccaaagcacanatgaaaactctgttcttgttccttgtctgacaatcaaac

SEQ ID NO: 14907 - DNA, 556 bp, Arabidopsis thaliana landsberg
gtacaaaatattcaattttaacatatatttttccactgttagatttaattggcgtgaaatttgatatccgtacgttagtttgaatttcgatccacggtaatataaaagtaagaaatatctggccatgtaatttatgtgtattaatttcacatggttagacttcttctaagttctaaaagaatgtattaaatttcatatgtcccattctcaaacggtccaaattagagttcatatgacagcaattacaaattcaagattatataaaaatagaagcaatcgttaggtcgtctcgatcttgaatataataaaaaaagaattaaaataaatatgtttatttggttggattattgtttggctatattgcaggtttttgtaacaccaacacatcttgccatagtaatggagtatgcagctggtggtgaactttttgaaagaatttgcaatgccggtagattcagcgaagacgaagtataactttaattcatcattagcgacgaattaatctaataattacattgataattaacttttgctaattattgttttagggaagata

SEQ ID NO: 14908 - DNA, 784 bp, Arabidopsis thaliana landsberg
gagagcatgccactaaaaatagtttatccatattgttatacttatggtcttagtcaccttatttcttcctctgtggacgaaggaaaacgaaagcaaagacaactctattaagagattttggtctcccatcaaagagactgatacatatgtttaaacttgagatctaacttatgataatacactgtacatataccatccttaacccaacagactatttataacagtaacaacaactaaaccgagtaacatcagcttcatcttcttcctatgtacaaacaaaaaaccacaacagaatctatgtattttgtagccatctggttgttggctggctcacctgagacacttttcacagttctcctcttctattaaacattaagtagagatttcaggtgggtctttgtttaaggttttattcactccaccatgatcagttgctgtctcagatccgatatcataagacgaaagaagccgtctctattgtttttgaaatcaataagagtcttgaggttagttctggtatagggtttcgagttaaaattgactagtagtttgtggagtaaaatacttacatgatcctcaaagtcaggactagacaagttgatggatagatttctcatcaatagtaacacctgtttggtgggggcaaacaaaggaaaaaaatgattagtttaaccatttgttccattggaccgacgtggtttcaattaagattgatgtaaaagtgaaaactgaaaagacaagaaacgtactgtttcaacatctatggggtccatcttcttcagct

SEQ ID NO: 14909 - DNA, 807 bp, Arabidopsis thaliana landsberg
cacaatcacaataataataataattcatatgcactcttctcttaaaagatcgacaacaatttaaaccaaaaaaaaacaaacaaagaaactcacttgcaatgtgacaagcctgtcatcaatttgaagctccttagtgacaaaatcagctccgatcgtagctttgtactgttgactaaacttgttattcacatatctacaaattgaaaaaaaaaaaaagctaagttttttttttctcaccgacagctacaaaaatcaaaattacgaaaagaagaaaatccaaagaaagaaaaatcaaaaagtttagttaggatactgattcatcaacgatgttttgccaaccctgtgatatttgtacacaaaaacaacaacaagagaatgattaacggatcaaacattaaaaaaaaaacacagttaggtagaaaaataagctaacccgctgtctccaagaattataactttgagtaaagttcgtcttcgcgtcgacatgttcttcagagtatgtatgtatctgaatctgactttttctttaaagaaaacaaaaggagcaacgaactctgttcttaggatgttggaaaaacagagatgagaaaatgaaagtagcgccaagttcgatcttttgggaactaaaaaaagtcttagctggaagactcgtggtccgtggggtttgtccagcttttaagagaggataatatcatagaatataaaataaaatttctgtatgaaaatattagcaagacaatgtaatcattgacaaaggaacaaaaaaaacaggtcataaagtaatcatgtgctataacacaacgtcac

SEQ ID NO: 14910 - DNA, 639 bp, Arabidopsis thaliana landsberg
ttctaaagagatcttaattacatagaaatattttgtaataagtaattattatactagtatagtaaaagtaatttacatttaaatgttgtaatatatgacgaaagggtgggacattgttttttttttcttttggattggagcgaaatatgagaggatgttgtttttggttgtaatgtgtgaataatttttgagtacatgatctgatttataggtacattttattattaattaaataattgatttattatttactgtgtaatgcatgtttttagttaagcgctgccaaatatcccttggacgatagtaaagtgtgtttcttttatccctagtgtattaacatgctttgaaatgtgtgtgccaaattatctgtaaaaaaaacaaattacacacatatgtctgattggtgacattagtgcatttttttctttttctttcgaaatctgcaaatcttaaagtcaccattcacttcctaagactatctacaatggttacccatttacaacaccctctttttcccttttaacacttcacatcgtattctctctcttccacatcattattccacacctacataactttttccctctacaatagttctgtttgataaaattacaacaccttatcccacaatttttattt

SEQ ID NO: 14911 - DNA, 691 bp, Arabidopsis thaliana landsberg
ataagcaaagatctatgagatgatgcatcatagaaagttctcaactttattgtacaaatcaaaactatgggtcataacggatatgcataaaataaactgttatgtttgtttttcatgaatgacaacctatatttatagagatttgtaacatatagttttagggttttacatatgacggtgtaaattataccgggccaatttgttttttttcgaagataagctcactaaacatattcgggtattttaacatatttgaaatattcggtgcaatatgtttttaataaaaaacggaagaaaagatatttaaaagatttaaactaatgtacgacgatataagttccccttttaaacttttttttttaatatttatctcaacttttaaaaaatgttaaacaaaatacgataatacatataatttttttgaactttcacatttgtaatatttacctcgattgtaaaagtattaaactaaaaatgataatacaaatttccttctttttttagttttcacatttgtaatatttatcctaatattttaaaatttgtaaatactaagtatttacgtcaaaagctgttgttcacattcaaaaagatatttgtagaatataaatattatacacgataactattatgggaaaatatgatcatttgaccctcagctatatcatttactgcatgggcatagatctca

SEQ ID NO: 14912 - DNA, 527 bp, Arabidopsis thaliana landsberg
aatatctggctgccatatctctcttcttatggacttatcccggtggaccttcttgggggaaatacggcttcggccggttaatatccggttcatacaaaaccggaaacgttattcccggtccaagaggcttccctttggttggaagcatgtcactcatgtcaagcactctagctcaccgacgaatcgctgatgcagctgagaaattcggagccaagaggctcatggctttcagcttaggagagactcgcgtgatcgtcacgtgcaatcccgacgtagcgaaagagattctgaatagcccggtttttgctgatcgaccggttaaagaatcggcttactcactgatgtttaacagagcaattggttttgcaccacacggtgtttactggcgaacgcttcgccgtatcgcttcgaaccatctctttagtacaaaacaaatcagaagagccgagacgcaacgacgagtgatctcaagcccgatggttgagtttcttgaaaaacagagtagtaacgaaccctgttttgttcgt

SEQ ID NO: 14913 - DNA, 1035 bp, Arabidopsis thaliana landsberg
gctactctaaggttcatttttctttgagtagtttagttcaatatagacatccatggacagttgtaaactaaatcctatttaatcagtttgatttgatttagttaacttgtccagattgattttaaccaagctaaaaccatttatatatataatctaaagtggatttcattgagtttctatatcgtagaaacttggattttaaagtgatagaatcgtacgttatatataatcctttttttccgtcgaactccatttctagtaagtaatcggaaagaaactctcttctaaagagaaccatttaggaaccgacgtgcttacatgaaaaaagactattatgagcttgtgccttttttgcaagactatcggtccgcacattaaaacggctgaaagaaaagtaatactaaaagaaagaaaaaaacaaagaagggaaccaaatgtcgccatctcagctaaaaaatttggccacttctaaggtctttcaaaaagagatataagatcggcacagtcggaagcaaatgagcaactcgtaatatctatcgagatcatacattctattgcccaggacgacaaggaatcaacttcaacattccattgcccttatcctctttctcgttctcactttttaccatccaaagaaaagatacagctttctgggccacggttgatgagagtgagacactaatgcacattcatttttcagttataggcttgtagctaaaacattgctgtcttcaactattttgaaacaaatttctttttttttggtagggattttcaaacaaaattaatatttatatctttctttcttcataatcaaatataaatgatatatactacatcaattaaagtgatatactagtcaggcccattggatggttcattatgatatcaataagaatttagtaccttgtcaagtttatgcatgccgatattgcaataatatttagggggtgtattgatattaacccttgaatcaaatatttggaagaattgatatttataaagttgttagatgatttttgttgaattaggaaa

SEQ ID NO: 14914 - DNA, 1107 bp, Arabidopsis thaliana landsberg
aagccctcttgcagctcctatggctatcctcttccttatgttccagtttagaacaggttttgctttcattcgggatgcggcgcttccattagacatataaggataaactagaagcttctcagtttgtgtgatgcagaaaccgtagagtcttaagagatttcgatgaacagctaaactgatcatttcaacttctgtctgaaactgaatctctcctcccaatgctcctccatctttaagccttttcactgcaaccactgtactatctccaagtattcctttgtatacatttccatagccacctttccccaataagttcttactgctgaagttattggtcgcaatctgaagctccctgaaaccaaatctcctcaggtttccaagtgaaacttcctcatgatgattcccatctgttgaataaaagaactttctttataaaaaaaaaaaaatttataagattgttctgtgcaagtaataaactgagtaagatcaaacctttaacatcaaagaatgtgttttggttatgtctttgtctccaccagagaaacaaaccaacagcaatgaagattaatgatacagtcccaacgctggatccaacagcgattgccattttgtgattcctcgatccaccggcgtataaaggaacttaaaaaagaaagcagtttgttgttagttaggtatgatcataatactaagattgaaagttttaaaggaagttcgttatttacctccagtttgattcaagttcatagacataggtatcaatgttgttccattgcagtctggttcggtacccgttggacatatcagcgggttcccaacgatgctgtaatccgaagggaaacaatgaaaggttatcatacggacaaagagagtgaaagagtgagacattgtcaataaatcaaattacctaaacgtctttgcagcaaatcttggaacaggaccactaagattgttgtatgataaatcactggaaacaaaaaaaaaaacagatcaaatctcaacatttcatgtctctacatatgaatttctttactggttaatgtaaactgaagatttattagcttacagaaaggcaagttgagtcatattaaatagtgacagaagaaa

SEQ ID NO: 14915 - DNA, 688 bp, Arabidopsis thaliana landsberg
  unsure (1)..(688): unsure at all n locations
gtaaagctgtcggagcaatcaaagattccactaccgtaagtatcgccaaggtcaacagcgaattcaaggttaggattacattctgaaactttcaaattttttggtaacaaaaaaaatctgtaaatgactaataaaatgtatatgaaatcgagatatataggatttggatgttgcgatcgtaaaggccacaaatcacgtagaatctgctcccaaagaacgtcacattcgtagtaagtttcttaaattattcccccaaacacttgaatggggatacgatctttatgagagtttttatcattctatccaggaatattctcggcgacatcggtagtgcaaccacgagcagatgttgcttactgcattcacgcattagccaaaagattgtcaaaaactcgcaattgggttgtgagttctatgtaacttaaaagattcttttttttttcaatttacaaaactctgtttttggggttgcttagattgtgtttccaacacgcaggttgcgatcaaggtgttaatagtcattcatagaacactaagagaaggtgatccaacatttagagaagagcttctcaattactcacatagaggacatatacttcgaatatcaaacttcanagacgatacacgtcctctgggtaaatagcctattatatatcctttggtacatagctctttatgtgttaatgaa

SEQ ID NO: 14916 - DNA, 981 bp, Arabidopsis thaliana landsberg
  unsure (1)..(981): unsure at all n locations
atgttaataccagcgaattacatcaatgatcaatattcatatataaaagcattcagaagtctacaaaattcagaatgcaaagacccgtaccttattataagagactgattcttctcttctgcatgtagaaaggttcaacatgtaagtgcagatactcactggaagaccgattaggacttcccaaatcatggaaatacgaaaagcgtgaatataaatgcatctcctcacctctcatcatctcatcataagctgcatccgccacagcatagacatgtggagcatccataaccttcttctgataagctgagataacatcatttccataaatttctacattcttgaatggattgaccgcaatcaatacaggtcctgctttactctgtataagaaaaacatgaaagttctttaggaattaagcaccaaagagtgagaaactaatcggatgagccaaatgatgttcaataactcacataaatcacgtcttgcaaatatctgacacgaaggttataaagaacagatggttcatttagataactgagctgtataagatcttcaacaccttccaatatatctgggtttgcaggaaaaagctcttcagtagacactttcacaacctttgataacaccaaatcacagaaacctgaaagtcagactgcagaaactcttcaatatcacagatggaaagtgcaacattgttaagaaaactcacatttgcagtggacaacataacaagcgacgtatcagcggaagtagactgtatcttccccagatgccactgcccattagatacccgacaccaaactcgaagtttctgaaatacaatacaaacacagtaaccacaagttgtcaataaaaacgaaattccagagctcagttnttcatatctaatactacactaaacacaactgtgacacctgcaagcaaagctatctaccaagtacaaacatattccatttnccatattctaatcaatctattaag

SEQ ID NO: 14917 - DNA, 182 bp, Arabidopsis thaliana landsberg
actaagtttcttaaccattctgcctctctccccgcagctgctaatgatacaaattccgattccatattcgaatttgtaatacaagtttgtttctttgatgcccatgaaatggcacctcctttaagtaagaacacccaaccacttgtagaagaatgatcttcctcgttgttgatccaatgcat

SEQ ID NO: 14918 - DNA, 461 bp, Arabidopsis thaliana landsberg
accccagccaatgtagctttactatcacaatggatagaaatgtttgattctggtttcagccacaatggaatctgggagagtaagtttcttaaccattttgcctctctcccaggagctgctaatgctacaaattccaattccatagttgaatttgtaatacaagtttgtttctttgatgcccatgaaatgacacctcccccaagtaagaacacccaaccacttgtagaagaatgatcttccacgttgttgatccaacttgcatctgaatatccttttaagaccgaaggaaacctagaatatgacaaaccttatttaatggttcctttcaagtacttgagcacccgccttatagcttgccaatgatgagtactaggattactagtgtatctactcaatcttcctaccgcataagctatatcccggctagtgctcgtcatggcatacattaagcaaccaattac

SEQ ID NO: 14919 - DNA, 408 bp, Arabidopsis thaliana landsberg
acctatggacggcgatccgtggcgtagagaaattggcgagccggtggtgaggtgaagtggagatcggtcgagtggatcctgtgaagacaagcgaagttagcaaacgagagacacccgctgactctatgcatctctctccagctaatactcaccgcgagatccacactgtgatgactgcgaaaactagaacaatatctactataaacagcaggaaatccctccaagtctctgcaactgctgatggccgagaacagtgctgcgttaaaaaattttacatcataaacatgacgtatactggaccgaagcactggaatccccggtcttcagatgcaacataaaacttttaaaattttggactacaccaggctatacactccatctccaggtcttatgtaagtaaaacttttg

SEQ ID NO: 14920 - DNA, 552 bp, Arabidopsis thaliana landsberg
tacctaacgtcctgtcctctactttgaattacagccgaagctggtttgttatgtttattcaaggcttgatcatgaataagactgactcttgcgtcagtgagatcaatcggagattgaatttttccggtgctacaaactttccattgagggtctaatttgccccattccgctggtcctttctctgttttttgtttgtatgtaaatagcggtttgttgcctgctttcaaattaaattagcaaaatcatacacataaacataaattttgataccaaaagatgaattttattagaataaaacagagatgtatagtgatcataccgatttcacgagcataaacgagtaaaatattaggggaaaataaatcgatgaagaacactacaaaaaataaaattgtttttgtgttggcatccattttttttttctttcagatttgattttgcttaatgttcttgagtatgttttggacatggaaaggcgtttggtatttaacctatttaaaaggaggctttaggggaaggtttgttaatggtcttttatgactttagcagttg

SEQ ID NO: 14921 - DNA, 509 bp, Arabidopsis thaliana landsberg
ttttgatggttctggttcaccactcacttttcttcttttttttttagatactccagattcatcaaaagcggctcttccctcttcttcagcattcagaacattgacaagtctttgagtttccagatctactgatctcatgtcgtaagaatcatgtgactcttatcaataagaaaataacaaaaactatgtcaatcacctctaccttgccgcaaattcatttgtttgtgtttcagtatgtttttcagctcactatacacagtttttggaaagagtgaaacgggagacggcatggtgagtcacccattccagctcccaatctcgccaaacaaatcgataaaaatagatagaatcagttgagtactttggttgcttctggatcacccgtcttcgagggcggactgcgatattggttcaacacccatgggcgttagctcttcaccttctgtccttatcttcttgacgatgcctatcaaatattttgcttaacgatgcatttactcgtaaaaccg

SEQ ID NO: 14922 - DNA, 1040 bp, Arabidopsis thaliana landsberg
  unsure (1)..(1040): unsure at all n locations
accaaatccaaggagagaaatgaggatctgcactctttgtatattttaaaaaagagaaggaaactcttattccttggtaccaaatctcctgccaatgataggccgaacatcatcagcaacagccaaagtctctaagaagggaagtatagtaatcaacnnnnnnnnnnnnnnnnnnnnnnnccaacttttgatagggatcccattatttatttgcaatctgtacacctgaaacaattaacaaagaaacaacttggataatcaaaacgggtacatgtatcattatacaccaagaaagtttgtaatttgtaatgtgacagatattcttcaaactgaaactgatggtggggcctttcatcaaattaatagtgttctcagtaacagagtatataaaacatcatgaaacatcagactttaatgaataatgttgagacccatgagcagatcttaagataaagtacctgcggacagttgtcaattatagccactntggccagatcaagacccagaacagttaaatccttggtgtaaattccatccaaaagaatgcatgaatcgcgataaaaacgctgtgatatgaactttccatctgggtccagtatatctagaagttgtgaggcatagatgctgtggcttgctgtgaagataacgacatgaaacaactctcccaccctctccaagaacctgtaaaggtgtggcctttgtctcacatagaccgtgttttcttgcatgttgaaaaagactctgaaggaaaaatctgcaacattacacgattccagagtcgaatggaccaaagtttctgcatttaaggaaaagagaatttggtaagctcagtagctcatctaccttagaggtaagagaaacataaaatttaacagtacacagacataaaaatgcttaagcatatttcctcaaaaggaagaaataagccacttcaccttctgtttctaaacatgattcagtgtacaccatccattttaaggaacaactgatataatgaacgagcacccgatgagagactaatggaaaaggagaaatcagac

SEQ ID NO: 14923 - DNA, 465 bp, Arabidopsis thaliana landsberg
aagaccaaaccttcttcatgtttcttaatggacatgcctgaaagagatatagatttatttattactttggatatctgctaaatagacgttaatgtgtcagtacgagttatggatgataagcggccaacataaagacgattgttcccataacaaggcaatttcaaactacaacatctaaaagagacaaaaaaacacatattttgagtaaaacctgttagagactatacaacaagagcataacgcttcactaattcaaaactgataagaaaaaaagagcccaaaagaattcagagacaaggaagcaattaatcgaaaagaccaatgctaaggaaaccatcatcacatatgcatcaaaccaatataaaatctaatttcgagctcaaaagacactaaatttcaatctctattatcaaatttagcagattttttttagtacgagactgaatgatagcattacgaaatgcg

SEQ ID NO: 14924 - DNA, 764 bp, Arabidopsis thaliana landsberg
ataagatctagaaattttgtgatgtcaaattcaatggtttgcttatggataattgaagttattggagctccaggaactctatgtgccaacgatacttatcagcttcaagttgattttccagaacattatcctatggaatcgccacaagtgagtgttctgaattctgaaattgtaacctgagtacttaatttagatcaatcatagaatctctgatctttatcaagtttggtctctgttttattgttgattgtcttgatctttaccgagtttggtctctgccttgtcatggaatgttttgatctgtctcgagttgacttgagttctctgttctttacttcttgtttgcgtttgtaatgttttttttttttaaaatattgtacaggtgatttttcttcatccagctcctctgcatcctcacatttacagcaatgggcatatttgtctaggtatgtcactgtgtcctctgttttctgataccttcttactcttttgttggttattatctatcactttctttacttgctggtcatactatgtggtccgaatgataaacacacaactcctatattgtatgatctctaatatattaataatcacaatgtgagaggtaacataagtcgtttgtatacctaaactcatttgaagtcttacccgaagataagaccctcttcgaaactcatattgcttgagattttgcttttagatccaagggtacactcaaaattcagtagcttattatttaacataggccacctggaagaagt

SEQ ID NO: 14925 - DNA, 630 bp, Arabidopsis thaliana landsberg
  unsure (1)..(630): unsure at all n locations
ctggggatgccatactcgatttgcgtaggctgtcctaaaggcgatagacacgacatccaatatcgaccaacaccttctccgttcacccaaatcaaacctttccccattccgttcatcctaattgctgctgcactttggctctctggtgcatcgaagtatgtctacaatatctcaaacgttgttcattagatcactattcttgttgctcaagttacttccaattattttttctgaaaggttaagtttattcacctggtaccatgtcattcccggttctttccctgaagctttctcccatttaaccttcttcaatccttcttcggcgtggataccaagcctttcgccttccatacccacctgcggatttggaaaaatcagatcaaaatagtcatgacaaattgagaaagtaagatctataacaagccttgtttccccatttgttttcttcagtgagatcaagtgttccagagcccaaacctaagatggaaacactacgtggacctgtgtatctatgctccatataagatccactatcctgttgatacaaaaagaattcatatatctcatcatcaaaattggaaactatgcatggggcttgtgtattagtctttntaagaacattatgttctt

SEQ ID NO: 14926 - DNA, 744 bp, Arabidopsis thaliana landsberg
  unsure (1)..(744): unsure at all n locations
aaaataacattccaaatagaattagggtttagttgtctttgaaaaagtgctttgtaaagagcaagatattatgtttcgtttagtatatctttgactcatgatatttgacatttgattaaaaatcatgtttgccttacatgcataatatcttaaacgcttgtatcacatgtctctaactatcacgaaaaactttgtgtataaaaaattcaaatctttaatttttggacgacaaattcattagcgttactaatttcattgtacctatcagttttataacgataataatacaatttatttcgtcccaaaaaataataatatttatttattaagttatgagggaaatagctggaaataggtgtaaatatacaaatatgtatatgtaatatgcaattagagaaaatacttaaatatgtggaccaagtgcttaactcttatagatgatgaagaatatatgaaacaccactatactatcaacattaatattagtgagatgacaaacataaattagatgatttgagtcaatatttttccctagtaatcttagtaatagtttttttttctttttatttgcatagttcatatacatatttgtatacacatatgttgtgcagatctaaattntgtttagtacctattttgcacatataccaaataaattgtgttagaatttaaaaaaaaattcataatcacaacataatttgtgacactatctaattgttgatcataganaatctgaatttttat

SEQ ID NO: 14927 - DNA, 289 bp, Arabidopsis thaliana landsberg
  unsure (1)..(289): unsure at all n locations
nnnnnnnnnnnnnnnnnnnnnnnnnnnnnnnnnnnnnnnnncttnntttttttttttanancctnnnnnnnnnnngaancaaaggggaacacaaaaatttacattctggtagggtcagagtttcaccagctatgacaatcttttcaaccgaatattccaggggaaaaaaaaatggaccacctgggggatgggattttggatcataagtcattaccccaccccattcccatgttggctttggggcccccccccccaaatccccaaaagaccggtgaatgcaaaaaatttt

SEQ ID NO: 14928 - DNA, 384 bp, Arabidopsis thaliana landsberg
  unsure (1)..(384): unsure at all n locations
ggacatgttgggnnnnnnnnnnnnnnnnnnnnnnnnnnnnnnnnnnnnnnnnnnnnnncagcatctgaaagaaaaagatgtcttgggggtatgcggagaaacaggctctggaaagactacacagggttggtcttgccagctgctccttgttacttagtgatgataaaatatttgctgtttgctctttcattactgaggatatcggccagcttatagctttgagttattttaactctgcaacattattccaggttcctcaatttatattgcatgatatgattgattcggcgcatggtggatactgtcatatcatatgcacacaaccttgtcggatagcggtgagtatctcgttgttaagatgtgatactgtaatatattggatga

SEQ ID NO: 14929 - DNA, 667 bp, Arabidopsis thaliana landsberg
  unsure (1)..(667): unsure at all n locations
ataccaaatctcagatttctactgagctgtctgggaatgtggagctagtcccatccaaagttttgctgcaggaaccaattcttttttcatcaaatggatgcagtattaatcaatctacggatgtcttaaatgctacagctagtcctaaagaacctgcattgtcaactgctgcctcaaaacctgatttttctagagtaccaggcgagataagcttggctaatctttcaattaaagaattacaagaaactttcagagccacgtttggtcgtgaaactacttctaaggacaaacgatggctcaaaagaagaatcaaaatgggactgattaattcatgtgtagttccaacaactaccctgacaattaatgatagcaaactgattggtggagatcaagatgcaattgatgcttttagcaagggtacagtagatgaagaaacagctactgaaagcatagatacaccagctagtcctgacggcataaaggggcattcaaatgattttgggcatagtcctgttgaaacttttgtggaccattattctggaaacgaagattttgaaggtgaagatgggtctgcaaaaagagtgaggaagcctacaaggagatatattgaagaaaccaatgaaaaacaacanattgacgggtcaatgatcccttcaaagatccaagc

SEQ ID NO: 14930 - DNA, 596 bp, Arabidopsis thaliana landsberg
cttgccactttttgccattctatctggttttcgttgcctcttttatctgaattcatatgattgagaacctcactgtttgatctagttacatttttctttaaaaatctccttagcgagtttacatggattggttgatatttccatttgcattttcagccaattagtctctcgttactgattattttagtgaacttcaggtgcttcaatctgtggttccgataagcgatgacgaggtagttcttggacaatacgaaggatatagggatgatgatactgttccaaacgactcaaacactccaacatttgccacaacaatccttcgcatacacaacgaaagatgggaaggtaccatgtcccacttcactcttcatattttcatctatcagttcagaaacaatctggaaattgacataaaatatgaagaaaaaaacagaggtttgatgggtcaacatgatcatagatagcatcaatcttttggttaaagcatgtggaaccaaaatccgacatgtttgcatgcacattctaacggtcaaggatatatctttcaggtgttccatttatattaaaggccggaaaagcgttaattcaagaagcag

SEQ ID NO: 14931 - DNA, 912 bp, Arabidopsis thaliana landsberg
  unsure (1)..(912): unsure at all n locations
tctattatgtgtcactgcggtccataggctggtgaacacctaatagtgtagcattgtcaatatttttctttaccattggttctaaagcttccccacaaaaactcgtcatttttacaaaaaagttgcacaacatgtaggcatctgctttattacaagttcatggcgtcactagtctgcttcgaaccccttaacattgcttacaatgaggcaaagtttctttttttcccccttgtttttcctaatatgacaaaattgatcaataaaaaagtagttacaattgttacaactttttattgcaacttttagttaaaatagttataatttttattgcaattaaaatagttacaatttttttgttttggttatgttttttttatcgcatattttcgttaaactaccgcatagtttggtaaattttttgtaatgattcaaatatttaaatatataattataataatttagtacataaatactaggccagagcattcatttatattcggtttggttctttcggttctaaactctgaagatcnataaaaaaccgaaaaagttatggttcaactcgattcggttctaattattttatccaaaatattttccaaaatgaccgtatccaaatatcggaaactttttttgacaaaattataataaaccaaaatatcagaaaaattaacaaaaattaattagattagaggtaaaaaaaaatgtattggacttagttttgtaaagggttgaccaaacatttttttgttctattcgggtatctaaaacagaaccagaatccttttttggcctggtttagtttggttttccaatttcggtttttgttcctagctcaataagaaaaatcaaatattattttgtagtttaatatataaacacccaccctttgtcgagctttattccaaagca

SEQ ID NO: 14932 - DNA, 737 bp, Arabidopsis thaliana landsberg
gggcaattcatccattccttatgcaaaaagcccccgtgatttgaaggatttgcagtctgttggttattaaggtagcttgtcaaaacaagccagacatttgagtcgaaaccgtctagaagatatagttgcttcgggtttgatgtccactggttataggttttttactccattagtaaacatttgtctgcgttaaagatatcacgattgacacccagggatttgttttttacctatgcagtgggggattcatctaataatgaaaagtgtagttcaagtgagcaaatatcaagtgaagcgaaatgtaaagatgaactggcacatgtagatggtgtaccccggtcgagggaattcagagaggcgggggagaaaaccaaagatgctgttggtaatcaccaaaagcgaaatattggcgaggataataataagggcaataggttgcgagcagcggttgatgctgcactgcgaaaaaaacccagctttagcaaaaacagagggttggagcaatctgatttgcctccagtgtctaatgtggattctggttgtaataaggctttaaaatgtttgtcctcaaaggtgccggtcataagagattggcctgtgggattccaaggattgccaggagggcatccaaatttacggacagacaagcagacaaatacagtaatgaaaagcagtttacctcgctggtactgatgcaacgactgcttccaatctgttgacgccgagttaatgatcct

SEQ ID NO: 14933 - DNA, 555 bp, Arabidopsis thaliana landsberg
ggcaataggttacattacataccttggtaggtatagtatttgtcgtagattctgttgtagacgaagaacttgacctctgcgtacacatcctttggattggagatgagagttgagttatcgattcttgcgtaaagcgaaacgtatccagtagcgccatcttgtttgtttgcctggctgctctattccgaccatttatatgtgaatttttgttattttttgcctaagtgattgaataaagcaacaattatatatatatatataaaagattttctttgatgaagatcatggtttgctttccttagccagcaggtttgatccacgtttgccgactaattttcttcttccgtgactgatatctaacatctatggtggatcctccttgtttagttgtaattcgagatgggttttgtttgtatagatccaacacgtcgtcaatatagaaaattacacctgaagaaacattaaacttaaatatcaaagagtatttttttgtaacataacaactagttttaagttctcattacgtatataactaaaagatgtgcatggaacaaa

SEQ ID NO: 14934 - DNA, 730 bp, Arabidopsis thaliana landsberg
gtattttaaaaatatgtttaaaaaagcatctttagtagtttaattatttaattataaaaacttacattagtattcttaatagaaaaaaattaacattattaatcataattttaaaattatattataacaaaccggaatctaaaaactatatatgatcacctcattaattcatcatgtgctttgaaaatttctagtccaactttataggaatatagttttaaaatttctatgttgatttggagtggtagactggtatatatatatatttgttgatagcttcctagaaaatactcattccattttagactgttattaatttagctcattttctattaggatgtgacgtttccattggttgacattgccaacattttacttttagttctcataacaggggttgctaatataatgtattaagactttttggtgtcgttatgtttttgtttggttgagaactgagagtccagcatcaaaaatggagactcgtagcaagcttatgctactcgcttgtgccactttctccattatatctcttgttaagtctcaaaatcaacaaggtatttttactgtctcacactttttcctttttctttaatattcttgatatatgaaattatctcaaccaaaagaatcttgttccgcttgttacctactattttaccaggattcatcagtctgtattgcggattaccttccaacgaatctccttatatcgaaccattgaccaata

SEQ ID NO: 14935 - DNA, 812 bp, Arabidopsis thaliana landsberg
gggcggagatcacgacaaatcgtgaaaatctccaaaatctctttgttttacaccaacatcaacattaagggaggggaagaataacgaataaataatcaacacataacaaaagaatgtaacacaatcttgaatcttgtatattcatgttatcagtcttgcttgatttatactatgcagtagtcagatggcaaatacaacgctacttctactacaacatcttcatggagatatgatcctccagctctggcctgacttccttgatgcaaaactctgcatactactgtatgactcctccttgcttgtgcacctccaccaccactagagatggagtcagctcaaatatctcagccgcaattgtcaacggtccttttgctccttctctacaaccttctaatctcaaactccattctttcttcctcacagtaaagctcacgattttcgcaatctcttccagcttcgatatgatctttgaaacaggagcacctgacacaaacctcgtcccttctcctccttcttcctcaaacaaaccagacagatcaaaccctgaagagaaagatataatgtcaaacgcgtttaagctcgagggtcttggcattgaacctattcccatccgttttacatcgaactctgcatcgctctctgaaactgtcgaagagcggcctgatgatgatgcctcttcctcctcatcttcatcttccctacacagtttatcatcttcgatgtagaatttaacatgtttgaatcctttcttgaaccatctgttcttcatgatctcgggtattgtatccgagtatccggattcgatcgcttag

SEQ ID NO: 14936 - DNA, 348 bp, Arabidopsis thaliana landsberg
  unsure (1)..(348): unsure at all n locations
caaagaatattttttgtcctattttgttataacattatgtttttaatatgataagacttcttcacgttattacgtgaaatgtaatangaagcgatgtagtaacaataattttggggacggtaatgcattttcgtgtaggtcacgcgcttgaaatgcggcggttttatcttcgccgttcgtatcaaccacgcaatgttcgatgccggcggtctcacgctgttcctcaaaacgatgtgcgagttcgtgcgtggttatcatgcacctacggttgctccggtgtgggaacgtcacctgctgagcgccagagttctgctgcgtgtgacacacgcacaccgagagtacgacgaa

SEQ ID NO: 14937 - DNA, 869 bp, Arabidopsis thaliana landsberg
aacccgcctagctagttgtaaccataaatgttttttagagttgtttattatagtttcctacaaaattctctggtttaggtgttaatgacaaaaaaaatcttcaaattagtattaaatatattatttaatcatgatttgtttttcgttaaatgaaattttgataggcgttatgatacggtttttcaagtttggctcagagtagcatttgattcattttaaattttttttcagaaagttaacaagtctttttaatattcctatcaaaaatacgatgcactagttatgaaacgttattgttttagttgaatataatttaacattagattcagaaaagaaaaatgaaactttgaaaagaatcactaattgaataagccatacgtgatgaaatagcttgtaaatgaataaactaacccgtaagactttgcggtattcagaaatgacaaagacaacgtagtcaggaagagagaattgacgagatcttgcagagaaagggaccaagtagtagttgttgacgaaatcattgcctccaagtgttattaggacaagagctccgttcacgagccgattcatctcttcttctccgaccaacccgcttactcgaaccttgtactgctcgaagtactctagctgctttgtgatcctaataatattcagctgcattcaaattgtcaaaacacctcttagcatcaagattttaagaatgccgttaactcgatggtaagatttattccggttgaacttacaaactggattccggtgtcgttaaggattccaatacccgcggaggcgaagttagctccccttaagagtttgtccttcttcagcattggactaaggtacggcattggagactcttgacccaaatgttc

SEQ ID NO: 14938 - DNA, 735 bp, Arabidopsis thaliana landsberg
gtcacatgatgaacaagatgaagaaaagtttcatcccagcgacaagaaggaaaaatatatggtgttgcatttgttgaagattgttttacgaaaaacttattagtttttgtacttctcttaattttctgttggatgatttatcttattttcctattgttcactctatgttctcttaattgcattcacaagatagtaaaaatttaaataaaatattataaataaaatgagaaaactacaagataattattaaaaccttaagttgctaagtaacttattacatctcgtactaaaataggatcacaagccatttgtgaaggtagatttccttctttctctaagatggccttcttcaaatgtgggattttgtacttgtttaggcctcggatttttataatttcttgcatgcatgattgcaaagtcaaaaaagttcggttcacttgtttcaatgggtattcatcaaaagattgttttaccgcaaaaacaagatcttctatcgtctttggattcacccggtgctgtagtgattagatgacactaaaaatctaataattaaaatgttcacgtccgctgagtttggtggttgacacatcaaacgaatatcaaaatcataacgagaagcagcttctcggaagtccttatctctcggatcaacgtgcgtttttgcattatctttgtgaataaaaatagggtttccaaaatcttcttctgaccatctgtcacgaattttcagaagaa

SEQ ID NO: 14939 - DNA, 923 bp, Arabidopsis thaliana landsberg
cgatagaatttgatgaactgatgttgttgatctaagaaattgggttttaggtgaagatttgtgtgctaatgttttgattatacgcaaagataatgtaggtttagtgaagtattgttcaacatttatcgacaattgtgtctgagttctctatctggtgctgagatttgcttttgttatattcctgaatcagcgatgagtaaaagagctgcggaagaaatgactccttcattggagagcaatagaactggaccagacttttttggctactacagagctcaagtagaagagctcttgtctcaagaagagaagatacctcatcataaccatgtggatgctaagaagtcttctgctgagattataggagctgagttgtcggatgtcaaacaggagaagttgaatgccttgttaaggcagtgtgtgttgaattccattccagaagttgatgaggtacactgagttatacttgaaaatcataattggtatcatgacgcgtagctataagagacattaatattagctatgcaatttgtttgcagatgcagtctcgtgttgattcaatgtatctgatgtctcagttgagtaataaaaaacggtcaaccttaccaaccaatgctgagtctgtgattcctgaggatcctaggtgtaaagaggtgagatgatgtggttcatgcattctgtgtctgatagatgtttatggaatcatttttgttactcacatttgtttccttaggtggaagatgatttacgattacttatgaagtctgatcctagtcttgttaaggaaatagtgggcaatcattcaagtgatctacttgccagagtaatactctctaaggaactttcttcttctgttcacatttcgagatcccaaaacatataatggtattcttttctctctgctttgactagttgagcaagagaca

SEQ ID NO: 14940 - DNA, 580 bp, Arabidopsis thaliana landsberg
  unsure (1)..(580): unsure at all n locations
taatcatcttcgatgtcactaaccctcaaaattcaaaacaaaatgaatagtctaaataattggcggtttgggcggcatccaattgtgacaggccacgtagagtgggaccaacaacttcattacctcgtttggctctttgctatatataaagtcaagcattagtatgcccaaaaccacacagaaatagaaataacttgtaatcaaccaaagtcgaaaaacagagttattttgtcggatcaaaatggtgaagattgagataggaagtgtgggtgactcctttagtgtagcatctcttaaggcttacttgtctgaatttatcgcaactcttctctttgtgtttgctggcgttggctctgctcttgcttttgccaagctcacatccgatgcagccttggaccccgctggtcttgtcgctgtcgctgtggctcacgcctttgcccttttcgttggtgtttccatagccgccaacatctccggcggacaccttaaccacgccgtgacactcggtctcgccgtcggtggcaacatcacagtaataaccggntttttttactggattgctcaatgccttggctccatc

SEQ ID NO: 14941 - DNA, 858 bp, Arabidopsis thaliana landsberg
acgatttggtgagtttgccggaaactagtaactatattatatttattgatgaacaagtctctaacattagcgtgtgttactctactaaaggtttttcttccataatgagataatgatattagagtacacattgcttaattgctaatgaccaatgacataaatctaaaccccgatctaagctgcttgctggtcccgactgctttcccggaacattattacatcatacagcatctgaaaccggtgaaagattagagaaccgcacgcagtgtcccgggtattaagatctggttcagctgtgaccaaaaacggtttggctcctaaatcctctgtttaaggacatgctttaactgaaccttttggctttcgattcgtgcttcaatgagttttgacttcaaactactcttctgtgcacctctaggccattctatgcaacctttcattcctcctcggtttacatgaggatgatttgcagattccggggaagagttccattgtccaaccaaatgcatcatcgggctatatccgcctttgctcgagactctgtctggtgaaaccattcccgcgcttgactttctcccatatgaaacccttcctccatacataccgttcattgatattaccttgtagacgctatctctatctccattgcttgcacctgttgatctccaaagctttgctattgacgaaacctttttggatgaccgtcttggaatggaacacacttcacttatctctgtggctggagtcattgtatcatcccaaactttgcctaaagactgtgcaccaccactggaggcgttgctgtgtcggtgattgtgattcttgccgttcacagaaagaatgctcccatctggtgag

SEQ ID NO: 14942 - DNA, 591 bp, Arabidopsis thaliana landsberg
gcaacacccatgacaggtctccacccatttctcttggatcatacacgacaatgggagttacatgtttgtgatccggaacaacggcatacaacaaatcatcaacgacacaatacaacacctgccagaaataccccagttgatttcctgcaggtccccaatcttcccatctacgtcctcttagatcgtaagccacacgattgttaccatccaaaatgtaaatcttattatccaaaacgaaatgaacattaaacggtgctttcgaacgaccatagggggataatatactaggcacattttcccaagtattagtctctacattgaacacttcgacccaatcatcacttcgtttagtggaacctcccaccacgtaaatcattccgtcaatcactgcagaagctgcgtaggaacgagccatttgcatctcctggagatagcgccacgtatggaatctgcagtcgatgacaaacacagtctttgcgcgtcgattcaagcttctgagtccacccataacgtaaatcttgtgtccgattgtgacggtagtgcatccaggaaacatgggaggaagagatgtgactaagctcaaattgtaag

SEQ ID NO: 14943 - DNA, 1165 bp, Arabidopsis thaliana landsberg
tcaatttaattcacaaatctgcgcttccttctagttttttacaataatgagatttttcggcaatgatacattaacattatatattgtctcaacgatttgtgcaagttttgaaaaccaccatcgtaattctgcgatggttcccggcgttgttctgtagcttcttcctggttcttcttgctcgcttaagctgagatttctccgtttgctctcacgactcgcaatgctgataaccccacagaaaacgactatatattgagggaaattttattggctacatttaattgttaattttaatgattaaaaataaaataattatttcaatgctatttttgtctaaaaaaacttttgagtgatatttttgttccaaaaaattaaaatgatactatttatggaaatttctggaaaaaaaacttaaaaacatggttcagttaaataacttttggtttagttttacattaaaatctacaagaaatacaaaccaaacagtccaaggattggtttaacaatctctaacatgaaactcaaaaacatatgaaaagagtctcaagacaattatccagcatggaaaaccaattataagaaataaccttccagaattgaagcttagcataaaaatggtgcaacctccccaaagatggctaagacttgcgactatgcaccctagcttcttgtcggatggactgacgattttagttgtcatttctcctatagttgtcaagagatagagtggagcgaaaagtaacccttcgttggtgtacccataatcaaatttccatgcaaccattaaaacaagagctgatattatccaagtgtgcatgacgggtgaaaataatctcgacgtcatccttccgtgaccaaaaaaataaattaaaacactattaaatatattattataacaagaaattaagaattgactaacaaaaacacttacaaactaggaactatatgatatccacgtctgtgtattgccatgatgtaattttcatcactactcttatggcttaccatatatataagaataataatacttgtgattgaaggaaataataataggtgtgttttcttcccataaaggaaaatgtggaagatttgatagataatctcataatatatcacaaaaaacaaagtatatgaaaatttggtatatccttgatgaaatgcttta

SEQ ID NO: 14944 - DNA, 588 bp, Arabidopsis thaliana landsberg
aaaatgtatttacaaaatatttggactgattttgatcgttttcctaaattatggccaaattgcacattttcacaatcgccaaattgggaaattttacaattacatattctttttttcttctacatccataagttcaattttcaagatcacacacaccacaaacaatatcagactgagcccacgctcggatctgtgataaatgatctatcaaaactccgagattaatggctataaagtcattatctaaaggggaattgcgaaaacttaggagatcaacttctcagatttcaacgaatataaggggttgaaaaacgataaatctatagtgtttttgaaaagtaatagtttggatatggataggatcagataagaaggaaggaatcgaataattcttcaaaaagttttttcagattctcaagaaaaagaaggggaagatgacttaggtgacttttcaagggtcatataaagcttatctagttaaagcttaaccggacgaaaaccattgtcagagacatcagaagaatttgacgaaacagtcgagagacttttagagaatgtgtttttgatgtaagaggtggttcagttggt

SEQ ID NO: 14945 - DNA, 498 bp, Arabidopsis thaliana landsberg
  unsure (1)..(498): unsure at all n locations
cacgtacggaaggggcatacatatatccaaaagcgtgatttataccaaattacaaaatcaaaaatgtcaacggaaacttgaaatcaaccaatagaataaaacagatcgagaatcatagagtacctctgacatcgttctcaagcctattaagctcaactttaaccggatctgagccatggagtaaagtaatgaactcattatcggcgtcaaaactcggcttcattgacctccgtcgtgttaaacccttacttccacctcctcctcctccttcacggaaagacgatgacatagtcaatgacggtgacgaaatcctcgccgtcgtaccaaactcactcgccgttggtcttccattgttaacctcaaacgcatatccaccttcctgcatttattcccgatctataaaacccttacttctctaatctacacaggcatcaaaaggttcatatctattgaagtctcanatccatccaccagaaacaaaaaaaaaatcaacacata

SEQ ID NO: 14946 - DNA, 2644 bp, Arabidopsis thaliana landsberg
actgttggccagcttgtatgtcccgggcttcagaaccttggcgatgacgaacgacccttcccaaggaggcgtgacgttgtaccgccctcgggcgtcttgtcgcagacaaagcaccaagtcgcccacctggagatcccgggaccgaacccctcgggcgtggtagcgtcgcagagactgctgataccgcgccgagtgtagtatggccatgtcccgagcctcttccagccggtccagtgagtcttctcggtttgttcgattgctttggtcgtcataggccctcgccctcggggaaccgtattctaagtctgtgggcaagatggcctcggcctcatagactagaaagaacggtgtgaagcccgtggctcggctcggcgtcgtcctcagactccagaccaccgaggggagctccttcatccatcgcttgccgaacttgttgaggtcattgtagatccgtggcatgagtccttgcagaatcatgccgttggacgctctacttgcccattcgtcatggggtaaccacggggcccagtccacacggatgtggtggtcctcgcagaagtccaggaacttcttcccagtgaactgggttccattgtcggtgatgatggagttcaggaccccaaagcgatggatgatgttggtgaagaacgccaccgcctgctcggacctgatgctggttaggggtcggacctcgatccacttggagaatttgtcgatggcgaccagcaggtgcgagaagccccgggtgccttctgcaagggactgacgaggtctagaccccacacaacaaacaaccaggtgatgggtattgtctgcagggtctgagcgggcaggtgcgtctgtctcacgtagaattgacacccttggcaggagcgtacaatcctagtggcgtcggcaccacggtcggccagtagaagccttgtcggaaggcgttcccgacgagggctcgaggtgctgcatggtgaccgcaagcccccgagtgtatctcttgcaatagttcctgcccttcggcgacggatatgcatcgttggaggatgcctgaggggctgcggtggtagagctccttttcatcacccagtaagacgaacaacttggcgcgccgagccagtcaccgagcttcggccttgtcgaggggtagctctcctcggaggagatattccaggtacggggtctgccagtttcggtttggcgcaaccccattccgctctccctcgatgcgcaaggcctcaccctcggcggccgaggatacctcgggctgggccgaggcctcctcgggctcgagcttgtcatcgatcttgacggagggttgatgtatgtcgcctagagaaaacgtcagggggaaccgtatgtccgccctgaggttattttagccagctcatccgtagtcttgttgtaccgtcgagcgatgtggttgagctctacccgtagaacttgtcttccaggcgatcgagacttcgtcgcagtaggcatccatcttccggtcgcggcagtgggagttcttcatgacttggtcgatgacaagctgcgagtcgccatgagcgtcgaggcaccaaacccctagctcgatggtgatgtgcaacccgttaaccagagcctcatactcggccacgttgtttgacgccggaaaatggaggcgcagacgtagcggagatgtttcctgaggggtgagatgaagagcaggccagcacctgctcctgttttcatcagcgacccatcgaagtacatggtccaaagttccggttagatcagagccgttggcaattgggtgtcgacccattccgccaagacatgggattttatggccttccgagggacgaatgagagtgtttcgcccatgagctccacgtgccactgttggtatcctacccgaggcctctcgacactggatgaactccccatagggggaaaggatgacaccacagtcaccggatgaaactcgaagtagtgtcgcaattatcaccgtgtcaaaattattgcgtacagtagcttctgggatttgtgggtagcggatcttggtctcggatagcacctcgctgatgaagtagactggcctctagacgagcagtgcatgcccttcttctcgactctcgactacgatcgcgacgctgaccacctgagtggttgcgagctcgtagatgaagagggcttctctggcagcggggggcaccaagatgggcacgttcgtgaggagcgccttcaggttcccgagggcttcctcggcctcaggggtccaagtgaagcgctcggtctttcttaagaggcggtacagaggtaggcctctttcgccgaggcgcgagatgaacgggctcagagccgcaaggcatcccatgaccctctgtacgcctttcaagtccttgatgggccccatgttggtgatagccgcaattttctccgggttggcctcgatgccccgctcggagacgatgaaccccaagagcatgcctcgggggactccgaagacacacttctcgggattgagtttcacgcctttcgccttgagacaccggaatgtcatttcaaggtcggaaaggaggtcggaggctttcctcgtcttgactacgatgtcatcgacgtaagccttgaccgttcgaccaatgtgctcgccaaacacgtggttcatgcacctttggtatgtcgcacccgc

SEQ ID NO: 14947 - DNA, 734 bp, Arabidopsis thaliana landsberg
attttcatgtgaaccatgtgttttgattaccctcataaactaagtaactagtagtctagtataatatcttgcatgactttgttgtatagcctgaaattggtattgaataataaattccgaaacaaattaatcacatgataaatttcagttataagtttattagatggtaaatagcgctcatatgaatcaatgttttgatatattttttttgacaagctagtttaattttttgttgagcatgaaaatagtaaggataatgaattccaccacaaatgcatatgatatagattttaacttatgtgatggcaaatagcttcacgtgaaccaataatttctcttttttttgttggagtataagaatgaaaggttccaatcacatgatggtaaggcataatagatgaatgttcttcttccgtagattgatgcaacattcctacctcgaatgatggtgtgggattggtcttaaaacgaaagtagtaggtaactccaccagctttggcttaggtattcacgatctatcatcagaaccgcctctgtattcaagctcacaaaggtgcactggatcttattttcttactagtttcatccaaattctagctagtgctacaattgatctccttttgtctgcttcgtttatactttctctcgacttgctaatatctaaatcccggtcatctatgttcccttatgacgaactatagacatagttattctataaacatacacagctcact

SEQ ID NO: 14948 - DNA, 680 bp, Arabidopsis thaliana landsberg
ctctcagtttagattttaccattgtttcaagtttgttctcaagcataatcatcatgtccaaaacaaatattttcttggtgtcacactaaaataatccattttttcagcctgctacacacaccagaaagtgatcgcttaaacataaaatctttttgtatattagagataccaaaacaaaagcaaagtaagaaaaaaaagatgatcacagagatgacgatagagttagatccgacgagcttttttacatacaagttggcaaaacatgaagcttttcttttccttcttttttgttagcctgattttagtttttttcacatatatcttttacatgtataggagataagatatgtttcctaattaactggaacatgaaacaagaaaaatatgaaatcaaaatatattacgtaacgctttttgaatatatgagagcaaattgagtcatgcagaagggaacgtcgtggctttggagctttccgcgttggcattgtgactttttgatgtctttatttcttttagttcaggctaagataagaaatatagcttagatttgattttttttatataaaaagtaaaaaagaagatccatttgaaatggatcccaccatatagtatagatgatgtttcatcgattcgtcacccatgtgatatgcacatggtgtatatatgtttacaagataaaa

SEQ ID NO: 14949 - DNA, 650 bp, Arabidopsis thaliana landsberg
attctatgatcataggaaactcaacaatctctgagagccatgagctgttacaagaaatggatgccacataacagcaactggaagatctttctagacggtatgttgaactggaggcaaaatcaaaggcagacataaaagtgcttgtcagagaggtcaaatccctgagacgttcacatatggaaatggaaaaggaactgactcgatctctgacagagaagtctgacactgaggtaaatcttaagcttgtaaataaaaagcattatattattgcttgcatcatccgcttgtggtaaatgtatatgatcctacagaaagaacatcaaaacataaaacatgtttaattttttcagaaactcctccaacaggaaaggataatagtcgagaacacgctagaagcaagaagaaggctgtatagtgactgtaaaattctccacgacaggcttaaagtgaacaacacaaacttgtcaatggatgagtccagtaacaacagagaagacttatctgaagtatcaaatgccttgcaagatcagattgaggtaagctattggtgcatctcctttaatatctgtagcaagaaaaatcgtattcaaatgtttacattcgataaccatggctcaaaatcgccaagctggattcctcgttttaaattt

SEQ ID NO: 14950 - DNA, 707 bp, Arabidopsis thaliana landsberg
  unsure (1)..(707): unsure at all n locations
ataatctaaaagatttttaacctcctaaaggggaagagggaggagaagatcttagtaaatataaaatcattggaagttcgaaagtagatcattaccacatcgtagccacctaacttgataacggctctccaaagcctacatttcaaagtaaagcatgcagacgttatcacgtcaaacaaggcataaccaaaagtatggaattttccaagaattaaagcaacacttccaacaactcacttgagacaatttaagggctgtccgtaaaactttggggctttaaattccaggaaattctccttgttgaaggcctccacttctttaataaacgcctcttgatcctgtggtgcccctgcttcatcaacttccctggcctgtataaaaacgtgaactcgnnnnnnnnnnnnnnnnnnnnnntgaccacagatctcacaaaaaacaatattcaacgcttaacgcaaatgcaggcagactagttgtctgaaatgtgacagaaaagtgctctcatcacctcagcatcactcaacaaccatgtcttccacttcttaacactttcttcaggaacatgaggactcgacggatcccccttcaaaggatttgattccccaagtgttgtctcctcttgaccgccatcactagataatcttcttttcagactgatcaacatcaccattcctcccatcaacactgttctgaccaccaacctcttc

SEQ ID NO: 14951 - DNA, 897 bp, Arabidopsis thaliana landsberg
tgacctgctagaccagcttggtgcctttcaaatttgtatgttggagggaacctgataattgcttcacgcatcccttgaaaaacattcccagcttccatttcagtatgtagctgatctttttctcttagccaatcaaaacatctttgagatatgaaatcccttgtttcatcatacgttatatcatccaaacggtaattaaaatctccaagaaatatgaccatgtctgcctcagatagttcaggccttgcttcgattgtattgacacccaaagcctgtgaaaggacagttattagactttttgaaaaattatacattgcattctctgaaagtaagtgatagcaactatgcaatcaaaagaaatacatacattgccaccacgaggcattgtaacaccaaatgacgcaccagctgcaatggaggagaccaataacaagagtgaccaacgaataggtaaaaagtaataagctgagcaagcaacacagcatgatagaaataaattttgtagcataccaactcctgcattgagtgaactagactgccgtgagaaggtcattgttcgataaacatggtagaagtcagcatttctccgattaacagcttctagatgtgcagcatgagtacaatttacaaagctcagtactcgatcatacattgtgagtcgcacaccttcagcgccctaatgagacaagaaatggctctatcataatatagataagatgtcaacaatggaaaagggaaaagaaccatttaagcaaacatctgacaatgttaagagataatccattgtttcccttttatgagatctttttattgttgataaatgtgagcaactttcctaatatggcaccataccttgttaccaattgctcgtccaaaaccacaaggaaccgcagcagc

SEQ ID NO: 14952 - DNA, 574 bp, Arabidopsis thaliana landsberg
agagagtttgattatgtagagtcttttggtattcccaacgtaaaactttctcattgggcatttttaatgtgtgccatattggttccatatgtttatgtgaggttttgcctctaacatgttcaattttcttagagcgcaaaccttcgcctgccttactgtaggggtctactgatgagtgaatgattgcttaattcatgtttcgagctcagactggttgattatcattgacctttttgtagggaaaagtggaatcattaagggatacgttgaccaagaagaaagctcaagttgcgtgtctgatggatgaatcaactgcaatgaagagagagatagagagttttcaccaatcagccaagacggtttgtaaacttagttttaagagggacctagtgggtggaattttgcctaaagaattgacaaattatcttcccttatttaacaaaatatattttcttgttcagtgtttgtaagagggtgaagcaaataaaaatactggattttggcaaatgggctgcaaggctctaatatgcttattattagtttagattagctttgaaaagttgctttcggtata

SEQ ID NO: 14953 - DNA, 935 bp, Arabidopsis thaliana landsberg
ttacgaagatttctcaagctcatcatatccttcaagcccttcctcaatatcttccaaatcaaaaatcgcctctgtcgctgatcgttttctactatagctgctcatcgttttatcatcactcttcttcttattcttcttcttaagtttcgataacaagctcttgattcctgatttcttctttgacgaagaatctgatgatttcgatttgtgatgattacggttacctccgccgcaacaacagcagatccacgacggccaacaatcacaggtcattttctttcgtttttccgataccggaggttcgtatccgtataatgctggtctattgaatacacatcctgttcctacatagactggtccttggattccatctaagcctctcatgtttatctatgttaacaaaaaaattatattttagggttttcagttttgaatttggggattttgattatgaagacttacatcgaagaagacgatgggtctgtttgcgtatcgatcgttatgatcgattccgtcgaatcgttgagggaattggacataacagagctttttaccaagctgtggatccattagaaagcacattgattctcttatggctttactgttgatgatgtaatggacacagtcgagattaagcatgaatggagcatttgtgagtactgcagagactcgaacctgcgacatcacccgaaaacaagttagatttggtttcttagtgagcttttgactgtttgctttgctttgcttaccattgcattcatggctccagctttcttgtggtgtgcgtaaccaggacgcttctctcttgatacatacactagaccgggtaattcgttaccgtcaatgtcgaatgctccttctttaccgagatacacctgaaaaagttgagtcaaagtagtcgtttagatccaaagggtggaacctttgatggatat

SEQ ID NO: 14954 - DNA, 786 bp, Arabidopsis thaliana landsberg
  unsure (1)..(786): unsure at all n locations
ctcacgggcacagcaatggcctgctagttcagcaacagtgtgaacgctggctaaggtttcttcgtctaggtctattgtcgtgtcgatcgctttcttgaatgatgcttctttgttgatgtacatccgtttgaaccaagagaccaagtgaatgctttcttctggttgcgattcgtctagagattttctttccgttatgagttccattaggattaccccgaagctgtatacatcgaccttcgttgtcactcgacccgttactgcaacaaacaagatcacaatcatcatcaataaacaatctttagtacaaactgaatcatatcatcataaagaaacaaactaacctgcgtattcgggtgccaagtaaccaaatgttccnnnnnnnnnnnnnnnnnnnnnnnnnnnnnnnnnaggagcgagacgaacgagtccaaagtctgcaactttcgccctcatatcatccccaagaagaatgttagaaggcttaagatccctgtgtataaagctctggtgagctaatccatggagatactccacacctctagcaacatccaaagctaaagtcaatctctgtttccacaacagaggcttaagtgcttcctctgaccactcaaacaaatgcctactcaatgtcccttgaggcatatactcatacacaagtaacttctcattgccatccaaacagtaaccaagaagcgtaaccaaatgacgatgcctaacctttgttaaaaccgcaatctctgatttaaactccgcaaagcctttaccagcaataactccattctccat

SEQ ID NO: 14955 - DNA, 984 bp, Arabidopsis thaliana landsberg
aaaactccaaaacccggattgacacactattagtttttattcgtttgatgtttttaatgtattcgatcatttgggtacaatacaagggaaacggtttggacttttccacatttcacaagatcagtgaaaatgaaacgactcattttgtcgactactaagcttaaaacatctcactgattacattcataataaaattcaagtagtaacgtaacatcacttccctaaaatgttcctcgttaggacgcttatttcctacaaactcaaaatgcaaagagaaagattaaaagacatgctccacatgttccggggataagtgtgcacttgcttcgacttggaaccccgatttcaaacaaacaaacaaaatgataagaccacacaattccatgaaattaaaatagcaattatttttcttcttcttttttttggaaaataagttttacttcttcggaacaccaagccttagacgaaaatcttcttccataagaggaagcccctcacgtagcttcacctttggttcccaaccaagatcttctttagctttgcttatgtctggtttcctctgccttggatcatcaggtgtgttctctaccatctttatctccacgtccggtttaataagctgcatcaattctcattatatacgacattacttatttgttacacatttatgtgaaatgaaataacaaaaatgctaacctctttaaccgtctcagcgagctcaaccatcgggaattcgcctggattgcctatgtttatcggtccggtttggtctccttccatcaaacgcattagaccttccacctacagaaccaaagttaaaatcatttctgaaatttgatccgcatgtttttaccaatcagactttttctttgtgaaatcacatttttcgttcttctattttccgcgattccataagatcaatgctagtgagattgtctaaccatcattccatggtgtttcagatttatttctcttttattacca

SEQ ID NO: 14956 - DNA, 536 bp, Arabidopsis thaliana landsberg
catgttcaagatcggtgttgtctctaagcacacccttataccctcaggattagctcaatctgagctcttaaaacaaaaacagaacaacaatcaaatataaacattagatacaaaaaaaaaatgttatggatgggagaaatttattacttgatgtgaagaggagacatgctcatgaagaaaacagttgtacttagaggatcaatgttatggtccacccaatctcccaatgtcctcaacaccctctcgtacgctattggccgtttgatctcatcatactctgtgtccccatcatcgaacgatccacgtctgtttccatcatcacaaatcttcaatcctcagatattcaatacataagtatgtgtgagtgtgtatactataacattactacttacaggactttgatggagacagtattcatccaccagatgtaactattgaagacaagaaagtcaacgcctatccagttgactccatgcttctcgatggactctggcattattatacggtcgattatactgtgcttttccggatcgtcc

SEQ ID NO: 14957 - DNA, 756 bp, Arabidopsis thaliana landsberg
  unsure (1)..(756): unsure at all n locations
acctgctctaccctcttagccccaccaccaaccctctcatattctttatcacttctttcactgcaaccttcttgagcttctttttcattttcattttctctttctctttcaatatcttgtgagttctctgtttctccatcttctttatcagtgcatttcaggccttctactgtgcttttcttccttaactcaatctccacctgctctaccctcttagatccatcgcattccttctcatcttcttgatcacatatgtcatcacttcttccactgcaaccttcctgagcttcattttccttatcttcttcaacatgacagttcttcaaaacctcttctccggcatcatcatttctagtctccttggatggctcctcatccattttcttcctctttgcacggcttttccgggcttggttcaggaccatctccaactccagaaaagactctccaccaatttcagtcgtcttgcttctggtagaccttgtagttctcttctcatctttaacctccaatccaaaacattcattttctatctgcttgctccttgtcactctcttcctgcttttcacctctgagatttccactgccttgggagtatcctcaacttccaatttgattgatttctggacaatctcactgttcttacctctccgagccctagagttgccttgtttctcctccacaactttttcttcctccgaattgcactacttgcgttctttcggngcctcccaaccctttttttctcctcacaac

SEQ ID NO: 14958 - DNA, 920 bp, Arabidopsis thaliana landsberg
acaaagccgaagagaaacacgtttctagaactccagtctcagaatcacaaacttgaatttgtttgttttaaccatatgactcataagattgaatttacttcatttaatttaactaaacaaaaatgatcaacaacatctcactcattgaccattgaccactagaagtcacatgcagacaaactggattaatgcatcagtcaaaatcaaagtgtggtttttttttgtatatacacttcctccttataaaaccaattaatcatagaatgaaattaacttctatttaattcaagcttatataatcttgattaatacttcaccaaccactgacatattattcaaatctcacaaagcgtggcctcaaagaaacactaccacgacttttttttcttatccttctcttcacctcttttaataacttcaatttctatcttcaatcttttcctctttcgtttaacaaaacagagtaaaactaaaccggattaaaccggaagcagccatgttcgtcaagctcaagctcatcttcttcttcttcctactctgtcaaattatgatttcttcctctcaaaatctcaacttcacctacaatggtttccatcctccattaacagatatctcactccaaggtctcgcaacagtaacacccaatggtctcttgaagcttaccaacacatcggtacaaaaaaccggtcacgccttctatactgaacgaatccggttcaaagattcccaaaacggcaacgtatcatccttctccacaaccttcgtcttcgcgatacattctcagatcccaacactaagcggccatggaatcgccttcgttgtagctccaacgctaggtcttccttttgcacttcctagtcaatacatcggtctcttcacatctctaacaatggaacgacacgaatcacatctttgccgcg

SEQ ID NO: 14959 - DNA, 543 bp, Arabidopsis thaliana landsberg
ttgtcctatcattcttacattaagccgaggaaaaaaaagacctgaggctttttctgtcactacatcacatgactggtctgagaaatcaccaggtcataagctctaatgtgataaaacaagaatcaacaaaaagaaagagataaaagaaacggtggctctgctcttccaatgttgcatacagaaactagagtcagaatcccttgctctgtagttcgagttgatcgaagcagaaactggatttaacagcggtcaatattagccggccggtccattcttctcctggcttcaaagtgatcggtctctccactgctgcaccatccacacaaagcatgcttttgtactcttcatcaccaaaatccgccattgttttcgatttcttctcccatggattccacaccactgtaccatccatcacgattaatgaatcatatcatatacaacaaacaagtaatcgaaacgagttgttgtgcgattattaccggtgtctggaagtccttcctttccgataacatatgttcttttccgttcatgatcaagaactgc

SEQ ID NO: 14960 - DNA, 684 bp, Arabidopsis thaliana landsberg
atgtccggtcaacgagaaaagaagtcccggagaaaggataacttataatacaactccgacgagaacttgagcccaatccgccattgctgtgaagtagaaaacgtaaaagcagacgccttttttcgataaagcggtggcgtgactcgtgagagagagtaaaagagtcaaaaacagagacttgaaagttgaaacaaagaagaaaagctgagctaagcccaattcttattttattttcttcatatttattttgagttaattccaacattattattttttgttacaattttgagataatctcgtatatattgcccactagaaagtaaaaagattagcatttcgggatggaaaaaatatatttgtcaaacaaatttactaagatttatatcgtcttgattttatagtcaccaaaaaaaattataaatactaaattttggagatatgaaaagtgtacaataactatataaaaaagttgaatttttgtttttagtaggaaaaaaaagtggagaaatattgttctcttcttacggaatatattgatcgcttagcaagtggtggacccgttacttgtaatctaatttagtcttctcaagtcaatgaaattccactaatcaagaatacattccacgtaatagaataacaaaattcctccaaacgtatttcgaaaagtggcgtgtacatttattg

SEQ ID NO: 14961 - DNA, 511 bp, Arabidopsis thaliana landsberg
gggggataatctattgctgcacactacgatatatgtatattatagtgtatattcatttttatagctaactttgaatgaaccaacaaaggaatatttcaaaatctattgttacatagataaaatgatgagaatacgtacagattctttgaggtaaggaatcacattaaaccctttatctctgagtacaaaatatccaatctgattgatttcgttgacgaggcagagaaaacataacttcatgtagttgggaagttcttcaagacgattcacatcccatctgcatgatatatcgattcactgaagaaataagcaaatagatatagagtgaaatagtttgatattattttgcaaggtattaatagtaacttttcaactatggtcgtgaatagttggagctcctcaagtgtcccataaatatcgtatatatcgtcgatagttgtaatgagcatgaaaacctttgtaagcatttgtccgtgatatgcaaacctcggctcatacattactccaacac

SEQ ID NO: 14962 - DNA, 594 bp, Arabidopsis thaliana landsberg
tggagagcattttgtcaatgaaaaatccattttactttgattctatctatccaacgaagtctcaattgctctgaactttatggtttttagttgagatggtatgtaaaaagactgtttctaatcatctagcagtatattttttatttctggtatgagacagttgctcattgctttatctattttggttatcagagtgacaaagaccatttaaaaccaattttcactgatgtggatcaagagatgatggagccagagctcttagactcatctggagatagctcagatgataatttcgttgatgcaccaatcacgcaaagtgcaagtggaaggaagcttcatcgagcttggactatctctgaagttgaaaaactagtggaaggtgtgtccaaatatggagtagggaaatggactgagatcaaaaagctttcattttcaccatacacgcatcgtaccactgtggatctcaaggttggttcaacataactaattaactgtctcatctcaatattcttaatccttttggttaatcacaagtgtctcttgtgataggacacatggcgaaatctacaaaaagcaagttcttcaaacagaatg

SEQ ID NO: 14963 - DNA, 764 bp, Arabidopsis thaliana landsberg
aagcttttaaaaacaccacaatctcgcatagagagagacagaacaaattcttcagagataaactaagcaacgaagacacagattcttcagagaaaaactatattagtagtgtcattacatacagattaagagattaagatctatatttgcatcgtaatgtaagttgatctacttacaacatcaacatgtaacttggatcaacatactaactaagagtaatagagtaaattcatcacagaatttcagaggaaattcttcaacctcaagagcttgtttaaaaatttcttaaactttagcaggttgaatggagaaatcatcttcaatttcgatttttcttgacgcaaaaaccgatgagacagcagctcagacgcagtacctctctccttagggttccttgagaaacacttttgaataaacgcccttgcgtcgcaaggcaaactctcgggaatctctggagggttaccattagagaggatatacacaaaatcctcaggtataaaccctatccatggcttcttacacacatacatctccaacactaaacaccctaatgaccacaaatctagggttttattggcaacaccgtcatgtagagactccggaggcatgtagttaagcgttccaacaaacgggtattcgattttccagtgatcaggaacttctccgacttgtaatgagagtccaaaatcagaaatcttcacttcgtaagaatctccacaagggaagacaaggacattttctggcttgagatcgcaatgaacata

SEQ ID NO: 14964 - DNA, 604 bp, Arabidopsis thaliana landsberg
  unsure (1)..(604): unsure at all n locations
gaaaactcattcccaaatccacaattgacttgctaatataagagttatatacaaatttttaggctctacttaagtctgttcacacaattgattcgccctaaacatatttctaattgcgtaacaaaatagtgtgaatcacttgaattctatgttttttaaaacaaaaccgaacaaacacaagaaccagtgaatcaaatcacaagtttacgatagactaaaacactgaggtgacaaactggcacgagaaacgaaggttcttataagaactagaatcagctttaaggcataacaaaagtctaagacaaaaacaaaaaacaatcccaaatagagataatgctaaacgttcaacacaaaacatagagatctcaagcttgcttaaacgatggcgttcgcagcacttgcgattcttggccacagatcagcacactcctttccgattggtccagtgatagcagatcctaattacatcacacaacagactcatcagctacaagtaaatatgatactactgatttatcactacgagattggctttgagttgccccatatcaaacttctagataaattcagatacacaatacttcctttagntactactaactca

SEQ ID NO: 14965 - DNA, 687 bp, Arabidopsis thaliana landsberg
tcagaactaaaccggatctgaaaaatggcgaacgaccaagtgattcttcttgattactggccaagcatgttcgggatgaggacgaagatggctttggctgagaaaggagtcaagtatgagtacaaggaaacagatccatgggttaagactcctttactcatagagatgaacccgattcacaagaagattccggttctcatccacaacggtaaaccgatttgtgaatctcttattcagcttgagtacattgatgaggtttggtccgatgcatccccaatccttccctctgatccttaccagaagtctcgagctagattttgggctgaattcatcgacaaaaaggtaaacaacttgcttttttttttttgtttactaaaaagttgtatagttttttagtttgagatccggaatagttaattagggttttagatgaagttaatttattgggagttattggtataacatgatgaaaaactatacaacttttaaaatgttcaacaatcaaaattaggctcacgtattttcaatgctttatgacataatcaaaattaggctcacgtactttcaatgatttatgactttgatgatttttggttggttcagttttacgacccatcatggaaggtatgggcaacaatgggcgaagaacatgcagcagtgaagaaggaattgttggaacatttcaag

SEQ ID NO: 14966 - DNA, 701 bp, Arabidopsis thaliana landsberg
tggttgggaagaaggaaaagtgcaggccaaccctattacgaacaagttaaggttcgcatcctattatgtgttcaagttatgttttgatacctttcatggaacatgtcgtactcatgtaatgctacctgctaacaagtctatggagaactatgtgattggtaaggcagatgagtgcgttagtaatgtggcgatgggtcaagttaactccattgatgaagataagtttgtgggttttattgagtctagtgatttgctactagcaaggatattttggttgttgattctcgagaacatagctaggctatatcttctcaaaacacaccttaagcaagctgaaaagtacaaggagacaacctatgttctagtggaaacgtcattcaatggagctaaggtagattgtaacactagcatgctggttttagaattccaaaatctttccttcattggagggaagcttcaattgcttgttttagggctgagaatgaaaacaataacacttcaaggcaagttaattttaggcttgttgatgacttcttaattaagaaatgagtttataaattccatggaaaatgctgggagtgaatttcaagatgagaagctgttggtttcgtatgagcgctcattgctagtcaattggagaagcttggagtttaaaattcaaaagtgtgaagagtatgtgtggatgggtttatgataaagga

SEQ ID NO: 14967 - DNA, 601 bp, Arabidopsis thaliana landsberg
ttctaagttagctacatatgtaactttctcccttgtagactttcatttgcagcaaaaatagtttctcatatggagaggcaaatcataaacaagaagaaacgagtgttttctcttgaaccaaacaagaaccctagtgcagttttcacgagaaaatacacaagccacttggttcctgcactcaagaagctcaacatgaacaagaactcttcaaaacaaaccgtgaagcatgaagtagatatggctttggctttgtctgctcaagaatttccatggagccgtttcttgctgcagaagctatcgtcctcatcgaatccaaccactaccactagttcttcttccgatggaattcggattcttgaaagacccgataaagaaggcggaaacgaagaaggagggatagaggagagactgagggaattgaagaagcttttgccaggtggggaagagatgaatgtggaagaaatgttgagtgagattggtaactacattaaatgtcttgagttgcagacgattgctctcaagtccattgttcaagatagtacttgacttttagtttaagtgtataatttatagtttggttcatgtctcttttgtaggcttt

SEQ ID NO: 14968 - DNA, 900 bp, Arabidopsis thaliana landsberg
  unsure (1)..(900): unsure at all n locations
taaataatttatttgaacaccattttttggaaagatgctagtaggctagtactacaaagcaaagatagaaaagaaaagatttgcttctttctttaaatcagataaacaatgattttcttttgttgttttaggcacactaaaaagcaacaaaaagaagaaggaagaaaagagaacagaaattgacattccatttatcatcatcacctttacatagtgacagtgtaaatcattttcttaaaaacccagtacctattttccaatacacatcatacgaatagaagaaacaaagaatacataaaaccttcctaagcatttacacaaaagctatatagaataataataattataattaacaacaaacaaatattgaataatctatatacacacacaaggacgaacataaccaattatatcaccatttaatacgaacgacgacgatgatgattcatgactgtaaagaggcaacgaggagagcagagccaatgctagaaccatcttccatggctttaaccaccacgtattgactcacttcttctcctagtatctctacgagagcttcttccatgtattccctaaacatggtgtaattaatgtacaaacctccttctactgcaacaactgttcttttctgcatttggatttcgcttctgcttctcccactcgtgattcccccgcttccatctcggcctatcttcttcaagattcctgctattcctgctgctgcaagcctccctgctcttcgtgtaaccacatcgcatattttcaccactagttttctcaccttcagtggtacatctgatacctgtatcgngcagcattcgtaacaagtttcataacattttcaacctttaagttcaataatagtgggctntttaacttacccctatgtctttcaagatc

SEQ ID NO: 14969 - DNA, 565 bp, Arabidopsis thaliana landsberg
gacggtttcatacatttcaagaaattcagcggcgcagcgagcagcgactacgttgtaagcgtttagagtaacggtcattccgtaacagaatttagcacagatctcaaatgaagcaggaccaccaggaatctctgctatttcaatctcgtcttcatgatgatgatgatgaatctgattctcttcatttgatgatgatgttgatgttgtgattagcttctgcaaccgtgcactttttgaaagcaacggaaactgaaaacatcaaaacacataacaaaagatttgatcaaccaaagtttcatatcaagattaaggatacacaaaagatttgaatctttctatataaaaatgtgtaccttgtgaagatagaatttgacatcaccaatgatgacaataacatctgttgctaactcacttgatacataccttaaaaaacagagattaacaagtatattgtcagatctataagctaagtttctaagtttgtattcagacagaaccaacattgttataatcaagaacataatacagaaaggttaaagatgaggattagaacacaaaccttaca

SEQ ID NO: 14970 - DNA, 904 bp, Arabidopsis thaliana landsberg
  unsure (1)..(904): unsure at all n locations
ctctccaaattcaatctcagagcaatcatcagttcataagcaagtcacacaagcggttctcgagattgataatgagggatctttcaaagtgaaagttgtgaagcagattctttggattgaaggagttcgatatgaactccgtgagttgtatggctcgaccactcaaggtgcagcctcgggcttagatgagagtggttcgggtacagaatgtgttatctgcatgactgaggctaaggacacggccgtgctgccttgcagacatttggtaacactttctcaatcttttgcttgtggtttcacaattatcatttcattttccaaaccttatcgagatctctgcctgatagctgataataccaacatgaactgtcatataaacttccaaagttatgcattttctttgatagacagttgttgttttcgatcagatccaaccatcaaggtctatagatcactttagaattagtttcaagagaagaactttgtagttgctttattcaaacgtcttataataatgctgtatgtccttctttgcagtgcatgtgtagcgactgtgctaaagaattgaggcttcagtccaacaaatgtccgatttgtcgacaacccatcgaagagctcttagagatcaaaatgaacagtagtgatgaacaacactagtacaaaaaaggttctttctttacataaaacaccattcttgattctttcttcatttttctctgaaaccctccatatctgaatctgtatttccgctatcattgttgtgcaacttccttcattccgcatatagatttgtttgatctaatgctttgtatttgcaagatataagcatcatcagtacatgtatagataacttnctaacactctcaccaaactacttaatgtttgtaattgaatgcttttgttg

SEQ ID NO: 14971 - DNA, 509 bp, Arabidopsis thaliana landsberg
atctatatattgagttttagaaagtaaatatcgattactatttttaattattagaaatacaattataaattacccttctcggagtatatgatggtttacacattttatcaataaaaggtatataattatattttagctgttacacaataatttatttattacataatcacttataggtatttagtaaatgatggcgggttgtaaataatataataaataaatgattatgtaacagttaaaatataattatatacattttattgacaaaatgtgtaaacaattatatactcctagaatggtaatttataattgtatttctattaaactaaactatgaaaagattttaactttctaaaactcaaaatatttacttgtaaaattctagtctataaatacaaatttcttgttatctctaatactctaatataatcaattcgttttttttgttataaaaatctagaaaaatagtgagaaaaaatcttggctcgtaaaatatagagagagaaaat

SEQ ID NO: 14972 - DNA, 576 bp, Arabidopsis thaliana landsberg
tgtgatttctttatggtgagcttgaattctggaataagagatgaagtaccggcttcagagtcgttactaacagtttccaccttcttcttcttactcgtcttggatttttcggttttatcggcttccttctttctcaagttaagctcctgtttctgcgtcaatctcccacttgtagattcagctgttttgtgacaaggatggctcgattcagaccaagactctatctcttcttccttcttcacatctttgtagatgctcttcctctcttctctcttgttccgacctgtttgcatcaaaatcaaccacagaagtaactaatgactgtattcttcttcttcttcttcttcttaagcataaagaaagcaataacatagatgatgaacacttaccggaactagaagtaatggtttttcttggtctaagcatctccgtaccatctgcctcgaatatggttacattaaagcacatatttgcctcatgagtgaaagtaagatactcgttttcacccaaaccgttgtcattcacaaactggttccatccacgatcttccatgtagtgaaaatttgggttcttgga

SEQ ID NO: 14973 - DNA, 599 bp, Arabidopsis thaliana landsberg
tcttaaaacttgttatacatacataatactaatcttaaatccacacaaatccagagttttttagaaatttctcaatctcaatcgattcaaactaatctgacttatgtgaattcaaaaaacgatgaacaaattcttcaatccaacaacatgtatgaacaaatcacaaatgaaccctaatttcaaaaatttcgaaactaacaaaatgcagattcgatagatacagagaagcaaagcaacacctagattggggaaagcatcctaaacaaagagtgaaattagcaatcgatggataacgaaactcggattcaaaatcgaagtcaaagaggatccattgaaccgatgaagaatcgcaaaacaaggaagaattttgagaagggtaccttaggaagaatctgaaattgaagaaatgcacgcaaaggagaagactttaggaatcaaggaggagaaaactgagagagtgagagaaaaaagcagagaaagggtaaatcagaagtagcatcaattgaagaagaagaaagctttagctttaatcaaatgtgaacgatagagagaagaaacacaaaacactcgatctctgggaacacacaaaaaaaaaaaaa

SEQ ID NO: 14974 - DNA, 720 bp, Arabidopsis thaliana landsberg
  unsure (1)..(720): unsure at all n locations
atgaatcatgaatgaatgaatattattccacgctatgtcacgagaacgaaccaacaacacaccccatcggagaccaatattatcagcggatcacgtcaagcggatcggatttgaaaacatcaattgacttaatttgatttattatgttttgtttgcaagacacaaaacttttaaattcatttggtcacagatcagagatcaccaccgtgcatttggagtcattcccgaaccaaaactctagtcttggtcgtcctaggaacttttcgagtctatgacttggttcaatcctgccctcagtctcaggttttcagatttgatacactgtttaagctcctgaacaacatgtgacatgtctggtcttgcaaccggagatggatccacacacgacatcgctagtttaagagctttccgcacagaaccagaatcatactcgccaatgaggttaggatcaacaatggtgctaatatcacttcttgtaagcatagtccttacacgttctgcgatgtgtcgattttcgttagcttgctcaagtacgggttgatttgtgattatctccaataacacgatcccaaaactatagacatcactcttttcggtcaagcgatatgttctgtaatacctacacagacaatacataacaaatcatgtttctttaaccactcggaaattatatntggaatgcaccctgttctatattgatgcttactcaggatctaagta

SEQ ID NO: 14975 - DNA, 993 bp, Arabidopsis thaliana landsberg
tttttttgcagtctaatgttttattagtaaaaaaacaatagtaaatacacatatacagagagaaaacaaagatattgcgtaccaaaacagagaatagattctcttaaaactcatacgagaaacataagctgattacaacaggaaaattatgtttttctgctttagtccgtgcatataaccaactcagacctgcacgagctaaatatgatatgtattgtccttctttcgtgacactcaaaactatatcccttgcgattgcattcacttttgtagatggtagtttaaagacgatcctcccaaattttgagattaaacgatgaatcatgtataagtaagaaaaatacattggccaattgagataatcatttatggcttccagagcaccattacaatctgaccaaatttcaatattatcctgatgtgaatcactcagactttgtagtaccaaaagatctcatgcaattctgcggcaatgcggtttgaggcaggtagaaacatctctctcgcatagaacataatatcaccatggtcattccgaatgattcaggctcttccacacttatgagcatcattaatccaagaaacatgtacattacacttaagcatgtacattacaaccatatagatggactaaaactctataccctccatatgtttctcgtatgagatttaagaacatatatgctttgttttgagatacaatagctctgtttttcattggatcagtactattaactcttggtttttaataagaaacattagactaaaaaaaaagtgttcttttttggaaaaccttaaaaatattcaagaagatatgataattgtaaagagaatgcgtagtgtttacttagtttgaatttgactccggagcgaggactctgttgttgttggaagaaatcggaggttgtgtcccaagcaaaacaatgaaacgataattaactaataatgacgaaccgtatacaaaataacaatgattagatgaggttaaatttt

SEQ ID NO: 14976 - DNA, 530 bp, Arabidopsis thaliana landsberg
aattttagtagactgtgaaatgctacagcaatgcacagtaggtactgttgtctggatagacaacttgtttacaactgtttttttttatttttgtcatcctgggaaagacagtattagcattatgttcttaatggccagttatctaaacagattaggcagtgttgtactggggtttgaatatgagaaggggttgaacctaattgtgtatattatcattgctaaaaaaattttgatatggaagattgtaatgaagtttttctttcaactgccatacgaaatattctctttccttacttttagctgttgttatcttttgactgtaggtataggatctcccatgcatcaaagctctcgccgccctattaatttatggagcaactctaacactcagcaacaaaatccgtcaagtggcatgatgtggcctaacttgccatttcacatcaacagcatttctactcagcgcccacctgttactgtattctcttaagcacctcctataatggtgaatatggcaatttcccctgtgcacc

SEQ ID NO: 14977 - DNA, 410 bp, Arabidopsis thaliana landsberg
gcggcctcttttgtcaagatccatcaacctttcagaaacatttccagatagaaagttctttcttgtgttctctggagcaacagggacattgatcagctaccaatacatactcgggtggagtttaagcagaaacaaggtgtcattgcagacccttgatggcactaaacttcctcgagttcctcgtcatagagctaaaaataagggaccatcagtggtccttattgttctactcattttactggcaatcatagtgtttttggctcttggagcagcttatgtctacagaagaaggaaatatgcagaaataagagaagaatgggaaaaagaatatggcccacaccgtttttcttataaagatctgtacattgcaacgaatgggtttaacaaggatggacttcttggaaagggag

SEQ ID NO: 14978 - DNA, 483 bp, Arabidopsis thaliana landsberg
catacagccttttaggaaaaaacaatttaaagggtcaaattgtaaaattcaacgaactgtgtgaaacaaaagaaagtgtagtgcctttttggaaaggaaaagattatggaactcaaaagtgtaaaatcgaaagagtgattacgtgagaaatgcaccaccgacatctgaaccgggggacgcatcaaaacgttgtcgtttttgttgtagtttctccgcgtttggtacatcaacacttgtagctgtgaatctttctaattcttcctttctttcgctgacagtgctttctcacacactaatcgccattgttctgcattgccgacactgattcgttcgattccagcattttgctcttccgcagcgatgcctcgtcgatctggagattgcatgagatgtctggtgattttcgcggttgtatcagctttagttgtgtgtggacctgctctttattggaaattcaacaagggtttcgttggatccacaggt

SEQ ID NO: 14979 - DNA, 751 bp, Arabidopsis thaliana landsberg
agggaacgaggagtttctcatagactttgagttagatgatcaatgtgagggcggtaggggtaaacatggaagctggaggaactgtgaagccaccgatgtgtctgtccatggttattgcttgtttgatgaaaaacgtcgaagcttgtgttgcacatatgccaaaggccaacgtggagaaccatattggaatcacgttgatgatcagcttcgtttcctcgacttttgtcaacgttagaagtctccatggactctgtttctcgagggccagaggatttttgtcttcgataattgctgccttgtcaagaaatctacaaggaaacagtttagaatggttgaaattaacaaatggaagacttttgagtttggttctactcacttaagatgctctgtgtgacagagaagccggccactagtaaactctgtcttggacacttcatgaagcagagaaggatcagaaggataaggtagatttcttttggcaatggcggcaacaaagacttgcaagattggtgtcaaagggctaccagaaggtgtccggtaacgatagaatggttttccaatgaagaagatgatgagtgatatagccatgactacagttagtatgatgccagcaacgccccaaccaacccggtcttcgatataggcaacagcagtcacggccgttagaataccagcacatagactaacgttccaccagttaaagaaagacattttcatctttctttcttccccatggtcatcgtcgaattgg

SEQ ID NO: 14980 - DNA, 619 bp, Arabidopsis thaliana landsberg
tgattaaagtttagtatataaaaatagaatctatttgtttaagaaaacaaaattgcagaaaattggagcgaatgttacggtaaattgcttacacccaggagttgttagaacccggttaacaagagaccgagaaggtctattgacaggttggtttatttttttttttcctcattaccttgtcatattattttatcatgaattatatgatcatgattaagattccaaattatatctatatgacttccttttgtctttacctactcagatctcgtcttcttcctggcttccaagctcgttaagaccgtccctcaagtaaataattgttattttcgttagttataaagtttgtaacataatctgtggtggataagttattctttttgtttttaatcctgtttaagattattggatttatgtgctactttttttttgttttggcatgggattaggcagcagcaacgacgtgttacgtggcaacaaatccaagactggtgaacgtatcgggaaagtattttacggattgtaatgaaacgacaccgtctggactcggaaaaaactccagcgaagctaccaaattatgggctgcttctgagattctggttactcaacattccaagac

SEQ ID NO: 14981 - DNA, 477 bp, Arabidopsis thaliana landsberg
aacccaagttcttttggacggtcaagaatttttctgagctgaacaataatgtttacacatcaggcaatttttcgatgaaagaaagaaaatggtgagtatatatatgatacaagaaaattttgtttctagagattaacatgtgcaagttattacacatgtagggttctaaagttgtatcccaagggggacgtaaaaggagaccgaaaatggttatccctttatctatatctcgatcaaagtgaaacactaaaggaaagtgaaaagattttcgtgcaagctcaattgcgagttttagacccacgtggatccaatcacgtgacacacaaaagtaggtgtactaacaacattttatgtactacattcttatttcctaacgttttgtgtgattggagctgggactctttctagatttatactaagctataaccatactttaatatatgcgatttttttttgttgtagtttcgtcttggtaca

SEQ ID NO: 14982 - DNA, 578 bp, Arabidopsis thaliana landsberg
  unsure (1)..(578): unsure at all n locations
ttcctaggctttaagtaaaggatgtgccaattgggagatgtagtaagcagattccaaattggtagccattaaacttgagaaatcttcagctgtactttctaaagttggctttaatatgtacttgccaacattgtttatctgcataatggcaaaccaatgacgttattaaggtatcccaaacgcccaattatcctttttttttttgctttacaaaaaccaatcaagacccaaatgagaccataagaacctaggaaagcttgaagaagaccttacaaggatgttgagtttggcaccaaatagagaagaaacagtctgcatcaattgcactctctgaggtcgagaggaaacatcacagattgaaccactcacttcaaacccttttgcatgccatccacttaagcattcgtttagcagagtttcgtctatgtcacagatgtgaactcttgcaccaaagcatacaagttcctccactattgcatacctaaagtcaagctcaacctcaaatctctttgtttcaaactttgcttgaatattatattctcaccanagagtggatatatagaaaacagagtagaaac

SEQ ID NO: 14983 - DNA, 114 bp, Arabidopsis thaliana landsberg
agatttatttggcatggcttgaccaatgcttcccgaatctacttagacggcttcttcttgttcttaaattttgctgcggatgcaagctcatgtacggattctgagatcttttcg

SEQ ID NO: 14984 - DNA, 623 bp, Arabidopsis thaliana landsberg
tggaacaagattacatctgctcagggtgctaccagtatcgagttttttcattgcaagaagcactcgattggcggtttcttgtgcactcagatttccttatcggctctttcgtgaactgcacctagtggtcagaccttctgcgatctttacggaaggtgtgatgcaaatttctgattcaggtatgggtttctgaataaatctgttgacacttgcatcttagctttcacaaggtactttgaatagatgaaattcctcagtgtaagaattgttattttggtttccgtgtggtaaaggtataaattattttcagtatctcaataagaaaatattggatttatcaattttctttgatcctttttagagtatgaacgctaaatatggaaatttagaaaaaggagaaaaagtgctatcaagaatttaggaaaattcgaaaaggaaaaatagatgatatgttttggaaaaacacgtcaaatactccatacgtatagacagcttatatgatgacgatgaatcttctttgaaattggaacatgattgcttatatggcatctttgtcttctgcagggctgatgtttgcaagttatcctaccttcacatagtcctagagtgtcatctaaatctgt

SEQ ID NO: 14985 - DNA, 739 bp, Arabidopsis thaliana landsberg
  unsure (1)..(739): unsure at all n locations
gcaagcagattatcatgaaaacacattttcaccattacaaataattttacatgcaatgacaaggtacctgtacaagtttaatgacttctgggttggagagaccaaacatgtctgtaccagatccatttagttcttcacccaaaatattaggactgtcagaattctggaccttttttatcctgttatatatnnnnnnnnnnnnnnnnnnnnnnnnnnnnnctttgaactgccaaaaaattagttaccgatgttagccagagatagattcttgacctgaaagttcaataaaacagatactaatagatatgtttaactcacctgctctccactatctgcagtcactataaacagcggatgagtctttgtctcggcatctctgagcacttccatcttgtacaaggcagatgcactatgatctgcttaaaaccaaaagcaacaacccacatcacattgagaactaatcacaattaaccaaatatggaaaaatacctgatttataagtaaaagccaaaaactgattaacaaataacctgtgagtgatgtgaactttctcattgccaaataccctttaggccaaatatgattctcatccttgaaaaactgagagtatgtcacacccttttctgtaagacaagtcatacgcctatatattatcatcggagttctactataaccaactattaataatgaaccatataatgaaagatattacacctacttatatttaagttcatggcgt

SEQ ID NO: 14986 - DNA, 602 bp, Arabidopsis thaliana landsberg
ttttactacctgactaattttataacatgatttgttagttagaatatttccaaataccaaaacgaacatcaaacgtgcacaccgacgcaaagaatgatagtttcgtaaatacgagtggacgacattacaacgagtctttctttttaaaacatttagcagctgagactatttcttgaaagtctcagcttgcagcggaagaaaactatcgaatgggccaaaaacatggcgttgacacaagagggaaaggcgcacaattttgtggttgttgggagattctcactgaatttatcaatggttcttcggcatctttcgatgacttgccagacgattgcttagctatcataagctctttcacaagtactccacgggacgcgttccttgctgctttggtttcgaaaagctttggcttgcagttcaattccgatagcgtatgggagaagtttctaccaccgccggattatgtatctctgcttacaaaatcgcgagttttctcttcaaagaaggaactctatttcgctctttgcgatccgtttccaaaccacaatggcaaaatggtatattatatatatccttatacagcaattggacattatgtatggatt

SEQ ID NO: 14987 - DNA, 653 bp, Arabidopsis thaliana landsberg
gaagactaaacacatgcgtcctcaagttaaattaagattatacctttcttgtttctgctccacaaggagatgatctcagacttcaaaggatgcatcaccaccgggaagtaatcgatacctagcttggtcacagacgccaagctgacttcccaaaagagctgccacgcctcaggaccatcagtgtacttgaccagcctccaaacccgtactttgcggtttgcgttcccaccaaactcgttgaaatacacaatagacccttccgaggtagtgattgttctccgaaaacgcggtaactcgtaatcttttccattatcggggaaataaatgatactacacgcatcatgatgacctccatagaaatcgtaagctaaaaaagaaccggtgaggttggaaagccaatgaagaatcccatttaaagcaatggacttgtgatgactaaaccaataggcagaatgaagacaagtcacatttttaatttcccattcccctgtgttagatgagtaaatcgcaaaatcgacttgagcaaaagtgtgagcgatcaaccacacaaccttgtaactcacaacaataccactttgcatctttgtaaccaatccactgtcgctgaaacgctcgtggttccttaatttctcaacattgtgagaagtgtttta

SEQ ID NO: 14988 - DNA, 760 bp, Arabidopsis thaliana landsberg
  unsure (1)..(760): unsure at all n locations
tggttccgcttgagctagtactacattgttcactagggcggctggttcagttgacttattaacatggcatgttgatagaatgacatatgatctagcgatataatgatcaaggtgtgatcaaatgagcatgatacgccctctccatgcatgttcttcagcttttatttccatttttgaattctatcaagtcctgtttttcttaattttgtaaatgatacgtatatattagttgatatcttatgggtttgatttccagtgagcagggtcatattcaatatttcttaaagacttatctcaagagaatgacccgtaaactgaaacttagctccatcttcgtgtctaggcaaatgccgactaataacgtgtaatgataatctgaatcacagtgttgaaggaacacataaaatcaactcaatagtaacacataacattaatcacaccatgaccgtcaaagaagaactttgtcgattttattatgtgagactttgagaaggcaaaagtttacttatatacttaacagggtttaatgtatatttcttaccggaagacaacaatatttcataggtacataannnnnnnnnnnnnnnnnnnnnnnnnnaatgaacaacaagaagcaagaatggacatgtatcaatctgggttcaactctgggcaccgatgttttgagcctggaatcacaccccataactgttatatactagaggctaattacatacatataaacactcatttacctttggattagaaatccaggatcata

SEQ ID NO: 14989 - DNA, 389 bp, Arabidopsis thaliana landsberg
cccactccttaaatgacacgactgtagcgaccctaaaccttactagaaagaagtccggctaggttcgtactagtgacgagtacttcgtacgagcatatcgggtttaagcacaaaactagcgccccaacctgccaatacttagcattgtcccttccaatatcgatatccggcttgtcatcccttttaccgagaaagaaagttatgcggttcaaacagactcttatatcatcaaccatccttactttatgaaaaccattttatatgtagtagaaattttatacaaacagataccaatcaaacataaaaggttcacgaagatcccatttcacaaatacataatacacaatagtatcctttacacttctacccaaccaatctacaccaagaac

SEQ ID NO: 14990 - DNA, 474 bp, Arabidopsis thaliana landsberg
aagaaactcagcacctccaaaggagcttgatttccggtgatactccgatatttctggaagaaaaaaccagtaaaaccgtcagctcccggagcactagagcttcttatcccaaaaactgcctccctcacttcattcttagagactgaagctgtaagcactgtattcattccatcagtgacccgagaaggataatctgcaaaaagatcctcaaagctgcgagggtccgaggatgtgaacagttctttgaaataagcttcagcaataatcccttttgtcgcctcatctttgtggagattgccattaacatcacatagctgatcaatattctgcttccctctgttgtcttttacagaagcgtggaagaaagaggtattcttgtcaccactatgcatccactttgctctgcttttttgactccaaaggtttcttcatctgatttgcttacagagatcattttgagagtccaaccacctc

SEQ ID NO: 14991 - DNA, 673 bp, Arabidopsis thaliana landsberg
aggataaaagtgtatgtctttgaatggtaacccattatcaaagcggtagagcttgtgcaactttgacagttatcatttatcaagactttatcaaaaacgttataaaaagttttattctcaattttattatacaactttctcgtgcaactctttttatagtttgcaactattcagctggacaattcatctaaattaccagttgggcccatatatattccttgtttcagtattttttcttacaactcttttaaataggtttaatatgagatggaatcttgattacacttctctaattcatatcattaccacctaattttctttgtgtaaacatgtttctgtattcaatattcttggattagattaaaaggacaagtagatgttgacaattaaaaaggattgaaagtgattagttttgaaaaacttaaatgcattcagatttcagactaaggctaaacacaaatagatgagaaaaccaacacgcaaagttgttgtctctgcaaactttaagacatatcaatcattatcagaatccctagtcctaatggtaatccaataagaagaaatatgtttatctattggtaacataaataaatcatacgacaactatttatattcgtaaaacgtaagtgttgttgtcagaagaaacggaattttgacgaaatggggtaatttg

SEQ ID NO: 14992 - DNA, 666 bp, Arabidopsis thaliana landsberg
  unsure (1)..(666): unsure at all n locations
catcatggtcatcatcatcttcatgctctcttgatcccatatccatgtcaagggcatgtaaacccatttgtacacttagccatcaagctcgcgtcacaggggatcaccgtcactttcgtcaacactcattacatccaccaccagatcacaaacggctccgatggagatattttcgctggagttaggtcagagtctggccttgacataaggtacgcgacggtttccgatggtttaccggtcggatttgaccggtcgttgaaccatgacacgtaccaatcgtcgctgttgcacgtgttctatgcgcatgtggaagagcttgtggcgagtcttgttggaggagacggcggtgtgaatgtgatgatcgccgacacattctttgtttggccgtctgtggtggctaggaagtttggtttggtttgtgtctcgttttggaccgaagctgctttagtattttcactttattaccatnnnnnnnnnnnnnnnnnncatggccattttggtgctcaaggtaattatcctctccttcttcttctttaatatttctttttttctgcctcattatttgtctcctattttgtttcattgataataacggtagatctttcaaatttaaacgaacacattttttttggtcttagtcaacgtctataattattttgaaatgca

SEQ ID NO: 14993 - DNA, 492 bp, Arabidopsis thaliana landsberg
gtgtaaccaaaatgggtcttgattgtttctttgtatttacatttgtatcttcatttgttgtttcatgttataatgagtatcatattatttcatgaaaacgtaaacaacaaacaattagaccgaaactatatttgttgttcgtaaaatatagagagtactcaccgtagggtaaggccacttgcaatgttgttgccaccaatttttcaagacagtagttgtgtctcctggcaacttcccagcccttcttttcctcattatctcttctctcacatcttcaattctcgatttaaaacccttatccgaaaaataaacaaacgtcataacaagaaaataaatagtaacataaacgtattattattgtgactcataagtcataacatattagttaattatacctgtttgagttctagtttgagttcttgtctgactctttccataagggatctttccgattcagtcggtagcaacggaccaaataccgtcatatcgtgg

SEQ ID NO: 14994 - DNA, 749 bp, Arabidopsis thaliana landsberg
ttttgggtggaacgacactgatcagcagcgttctatgactctcgcgagtggagaacaagctgtttgttctaaaaaacgacctcgcttaagctaggcccatgtctttgtatcataaatgtttctgtttactctcatccacatgtggtcatgtcttttaagcacaagttgatgaggaaagaggattggttacaccctatatgatcgatcccataccacaaagatagaagcatgtgctctgtttggtttggtttctctaaggttatctaacttatactagtctctctttacatatagtgcaacaaggctattggattcttcgtcgaccacagcttgcattcaaagagtgaatactacaaaactcacaaatttcttttgctttccgatcttgaaaaaaaaaaaaacactgagtcttaaaaaatgattatgaacgcagagaagaagcacttgaagatgaccaagaaatggcaacagagagatcgattgctagctctaaccgcagaagaggaacgtattgtggtttacacggctaacaaaaactctttgcgtctccactaagttacctctgcattcaactctttttccatttgaagaagggttctctagcttcaggcaagtgaaactggaggtacataacaaataattgatgaattcaatattcagataaacgaatacattcatatgaagtaacaaatggagtacataaaggtttattggtccacataaaaagattataatcaaatcaaaacaat

SEQ ID NO: 14995 - DNA, 882 bp, Arabidopsis thaliana landsberg
aagattattgttgattttgacatttttactatatttttcattttcaaacacttaaaaatatacgtgtttatcgatttctttgcaaaattgcaaactttaatttatatcaaatactaaatcctaaaaacaaatgaaaccgattaacctaaacataacgagtaaaaccagtgttctaaaaatcactacacgctattttggcggtgatctagcgctgaatgcctagtcggtttaggcaggaattagtcggaaactaggtgttgtatattttatgtttttataaatatttaggttatacaatagatgtaaacgatgaaattaagtaaaattctgatagcctagtggtactaacaacctactaaatatctaaatatctgcagcccctagttcgatgttttcaattgcacttttctcgaattttttttttaatttaataaaaagggaaaaattagtgttttcgtcatggagtcatcttcttcccaaaatccctaattgagacaagttgtctgcattttcacaactcgttttccgtttttcttccaatttttttatatcattttctcatataatttaaccaaaatagtacatatctataattattttaaggattcatagtcaaaagctaaagttttaagaagattttcattttcaccgatttaagcaaaatcgcggcagtccatcctcacctagcaactcttcgccgtaataggccatcgaaaccaaatttcagaacatttagtaaaatacatgttaaatcatatttttgtaacctgcaaaagggcaaatccacaaattattttaaaaaatgacaaaaaccacaaatgccattcaaaaaaatggcaaatccataattggtttcaaccaaaatacgacatttgtaattag

SEQ ID NO: 14996 - DNA, 701 bp, Arabidopsis thaliana landsberg
  unsure (1)..(701): unsure at all n locations
ctccacgaatctacttggtttcaacatttaaaggttatagtagtctcacataatgacttcactggatcctggggcagctttctatttttccaactggcttcaaatgactacgttaaacctagaaattgatgttgtatactacgaatattctatcatctgggatgattatggttaccataattttcgtccttacactagttcaatggaaatagtgcacaaaggtgtggatacagagtttgataagatcaggcaagacttcacatccattgatttttcaagcaacaagttttatggaaagatccctgaatccattggcttgttgaagggattacgttttctcaacttgtcgggtaatgctttcacaagcgatatacctcaatcattggcaaatttgacgaatctcgaggcattagatttgtctcataatcagctgtcaggtcagattccccgagatcttggtgagctctcctttctgtcaaccatgaacttcgcccacaacaatctcgaaggtccaataccacgcggaacacaatttcaacgccaaaactgttcttcattcatggacaaccccaagctttatggtctcgatgatatctgcagaaaaacccatgtcccatatcctagaccacatgaattagagaaattatcagagccggaagaagagcangtgattaactggacatcagcagcaatagcgtatg

SEQ ID NO: 14997 - DNA, 735 bp, Arabidopsis thaliana landsberg
gagactttgtgttcatttgatacagttgttagagtaactaaaatgaaatttgaagattttgtgtgttattagagtagattacaatgaaaatttgaagattttgtgttgaatttgttactgatttgagagaaatgtgtggatttgtgtttaggttgcatcacaacgaaagagctaggaacagtgatgagatcattaggtcaaaatccaacagaagcagagttacaagatatgataaacgaagtagatgctgatggtaacggaaccatagacttccctgagtttctgaacctaatggctaggaagatgaaggacactgactctgaagaagagctgaaagaagctttcagggttttcgataaggaccagaacggtttcatctcggctgctgagttaagacatgtaatgacaaatcttggtgagaagttaactgatgaagaagttgatgagatgatcaaagaagctgatgttgatggagatggtcagatcaattatgaagagtttgtcaaagttatgatggcaaagtgaggaaactattctcatatcttttctctctttttctttctttctttttttgaattgaacaactctgattattgctttattctatgtttgactgttcattattatgcattcgtcccaaatttcatgttatgaactattttgtgactttgggttaaattatttgtttggaagtttttagtttattttatattatgtgaagtacaaatgtaatgg

SEQ ID NO: 14998 - DNA, 563 bp, Arabidopsis thaliana landsberg
ctatgtcgacaggaacaacctctcacgggaggcagcttggaatgattataataagcctattgatgatttagcattacacattccttcccgttctgcaatacctcgtgttacttcaacgttctgcgaatggtggaggaagacgtatccagaattaatcaagtattcttctaaggagaaggatgctgatgaatcagttgaaacattaaacatcataagtgatgatactatttcaggctcaagcaacgatgaaatgactatagctgagtattcaaacaagagactcaagtgcgtagaggaagctcgtgacaagagacgcaagtacatggaacaagctcgtgaaagaggtaacaatgaatcagtaggaatattgaatttaagaaacatgtttggtgatcatagtagtttttgttctttcaggctctaagagaacaagcaatgatgaaatgaagatagctgaggattcaaacaagagacgcaagtacatgatgcaagatcgtaagaaggatgagagtactacgggtgtttgctctatttctgttcaccatcagaaatagagaaaagga

SEQ ID NO: 14999 - DNA, 489 bp, Arabidopsis thaliana landsberg
gtctctcctttcaaaaatcatctctattgtcgaattgaggcatagatctcacagaaccagtctcagacatatattccgacatgttatcgacatcagatcttcttgtcgatcttgatgaccctccattaaccgcggtttcttttgtcgacttcttcttcctcctcgatttctttggaatttccggtaatccactaggccaagaagacaactcgtcttgttcttcagtggcttcctttggtctcctcgacgatgacgatgtccctttgttagaagagcgacgtttagttttgtctgatgatatgtcttttgtcggagaacctttctcggacgctgctttcctcgtagattttggtaggcttggcaaatctctagaccgaccaccatattccgacatacattttatggaggaatcatcttctccgactccttcagcagattcgaatcccccgccggagtgagctcagcattcttcaatcacataacataacc

SEQ ID NO: 15000 - DNA, 857 bp, Arabidopsis thaliana landsberg
  unsure (1)..(857): unsure at all n locations
gtcataagaaagataattcaaaggacaaatcaatagatgttatttattattgtttgtggtgcctaccttttaaatacatataaaggtcaaaaaaataaaaacaattagtagttgtacagataatgccaaaaaaataaaaaattttaagcttaataatataatttaattgaattgatccaaaacatgtttatggtatatatctttttgatcttttgagtatataccaaaaaaaaattaataaagaatgtgagattattattattactttgcgcttgtctcgccgatatcatgcagccagactatagtggccttatgagttcctatgggtccaaaagatagaacgtcttcaaatttaataacatttctactagctgtaaaaatttcaacatacgcagattcattaatcagtgacgtaataaatatttgagagaaaatagtccaacaactttgaaaagaatggaagaagcatgaacaatatatcacagcaaagataaaaacatactagaagccatgctttgatatggataacttcttgtttccgaagagttttttcttttgttcttttgaatgttttaatgtataattcgaaaacgtatggattgtaagggggtacattgtgtatttatacaatgaataaatgttatggagaaaatatttgtattaaaagttcgatgcatgacaaaaatcttacttttaaaagttgcatgcatgacgaagatctctatcaataaaagtttacagtaagtaaaattaatttcctcttttgaagttggatgcatgacgaagatctagtgattgtcgacactgatagcatgatccgatactagatttgtctcttcagcttaattncttaattt

SEQ ID NO: 15001 - DNA, 548 bp, Arabidopsis thaliana landsberg
agtatgacacaataagtttaatatataaaattacaaaagcttattaaatagaaaatattatgactgtgatttatgatgtaaactagcaatccaaaatttctacaaatatttccccatgttgcatagtgtgggtccttatttagttttgtattatataaactttcattcatttaccgttggaacactagtgtgagggcttcgcgcttcaagatacccattcttgaaaacacttcatcatcttcaagttcgtcttcttctctttcttcttaatcatttgatcgatcatctgcaaacactacctcctcacactctgttccttgtacaactctcaccaacgatattagtttctttcttctgcgagaagcccaaaccaagttccgtcgcttctaaaccctaatatcttctcgtcaagttattgatcatcttctcaacctctcattttctctgctcgagattctataaaccctatggatttggggaagaatcatcaaatgttactttttctacaagaaaaatccaatggttcttgaaccctagtttgttcacac

SEQ ID NO: 15002 - DNA, 488 bp, Arabidopsis thaliana landsberg
  unsure (1)..(488): unsure at all n locations
ttgggcatggagaagctggtagcccgctgcgatgtgatagcatgccccacaacgagctcgcgcacaggacgagcaaggagccgtgcgctgcgctgggcgatccaggacgcgcagggaacttcgtgagctgggcgcggcatggggagtactgcagacgatttcaaattaatttgccnnnnnnnnnnnnnnnnnnagtgagtcgggcttccgaattttgtattcgcacgtgcgatgagtttaaataatcaccggacgcaccgattttcggaacaacgatgttccgaacatcacgaaaatttaggaagagcccgaataaaataaaaacgatgtcgaacttgcgacagacgaaatagatgcgatattaaaatcgcgataggcgaagatgattaaaatttagcatctgttttatcgactgatattacgtgcttaaatccatactcgttattgagcggaatataaacaccaggggtgttacaccctccgcctcc

SEQ ID NO: 15003 - DNA, 477 bp, Arabidopsis thaliana landsberg
tgctcaatgatcatctctagttccttgacctttgcttccaaacttctctcattctcaaggtctctttttagatccactatctccgcccctagctttaaagcaatctcattcttggagatgatttccttctctcgagttgaatcaagcaaagccttcaaccgtattaactctgacgacaagatttcaactttctctgcatgaattgcagccatcttactagcatcatctgcacgacacaaagccttactcttggcatctttagcattagccaattcttgattgacattctccagctcctgtgttaccaaaagaagagtagctgattctgaagcatgttggttcttgacattctctagttctttcttcaactcttcttcttttctctgaaccgcctctatccctgcctcaacaacctcaaatttctcaatttcgaagttctccagggactttttctgagcttctaaagcctcatctagt

SEQ ID NO: 15004 - DNA, 584 bp, Arabidopsis thaliana landsberg
tccatttccatcatcagctccttctgcttccgatacatacgattaagctcacatatctgaaatggaaaaagtatcgaactcttaaacttgagaggaaacaggaaacaacaaagatgaagaagcattacaaaagaaaacgcacctgactttcaaagacagattcatgtacaagcatggtgtgtcttaatgcttcttttacttgtctaagataaagatcactatacaagaaagagaatgtatcatcaacatgcacgttcacgccgtatctagtcgtatcaatgtctagtacaggacacaaactccagccagaggcagttctagcatccgtaatgtcacggtttgccccaaggaaaaagctgttctgctgcattcttcattcactttcacactctgcaccaagaaagaatatcattaaaataaaataaaaaagtaaaccccacaatgcatcatcaaatctgcttttctatacaaacaaaatatgcaaatgtaaaaagatgagatttaagataagatctcaaagactattaacaacattttgagggagaaaaacatagggggtaaataaaaaaccaagcttaaacaag

SEQ ID NO: 15005 - DNA, 693 bp, Arabidopsis thaliana landsberg
cgggactacctaagaagaagaagaggaagacgaaaactcgattaaattttccaagttattattgcaaaagcatggaattgataatgatgaaaccctaacctctctgagagctttaacgagagagtaagcgaacttttgtttttctttaagagaagaagcaaataataaagggaaggttttttctttttgtatagaaccggttcgaccgtgttttcctttttgtgaatttgtaaaatttgatggttttctatttattttttaattgctaaaataaattgtaacattaatgaatttgtaaaataaaactgtagtgtaaaactgtattaaaatatcgatagcaagtatctggattttccgatttatctaggattcaacttctaagaacatggacaaaagaatcattataatatatatgtgtaagaaaacaattaggctcacaaaatctcactaagttcaacaagttcaatctaacctcaaaacatcatccctgataacagaaaccaaacgatcaacacaaccaaagaataagacgaacaagaaaaagaagaggctgaggaagccacaatctgaatagggaaattgcattgtccttgagatatattctgcgttgtaatggtggccaaaccttgaaaatagcaagcactctcatcttgattcttcacttgaaagaacatgttaaacgcatatgacggg

SEQ ID NO: 15006 - DNA, 375 bp, Arabidopsis thaliana landsberg
gacagggcatcctaagaggagcttctctgtaatcttcgacggttcatcgtcgtaataaacgttgttgagatgcgtgatcttgagacaaggtaaagaaacaacaagctcttgatgcttcattatcccaacatttgtaagctttaaagaaaccaatgtcttgctcttataaatattcttaggcatgaattctttaataaagataagattcgtgctcccaacatctagatgttgaactccgcgatcaaccgcagtggcgatccactccaagaatctgttggtatatacagtgttaccgccaaagtttaccttgaagtattgcatgtgtaacccacgattaaactccatatattttgctcacgaccatctgggaagcta

SEQ ID NO: 15007 - DNA, 837 bp, Arabidopsis thaliana landsberg
atactcgttttttttttgaaaagatgagggggagggtttggtagaagctttagcagccaagccatcctcaaacttgatttctgcaacatcaagaagagatatctgtagtctttggtcttaaacaaatccaaggcaaacatgtatagatcaccgcctttctcaacctcttctatggcatccaaacactccacgcattcctcaaaggtaaacttctccttcttcttaaccgatgtattcactggaatcttctccatcatctcgggagttacagtttcaacaacatcctctgagtctgacctaatcagcggagtagactccacattgccatcctccgctctatcgtcacttcctttgactggctcgtttgtgttgactactactgatgatggagctggttgatgatcatgtagctgtggtgattctgaatgatgatcgatcactctcttgcgataacggcgggttttggtttttccaggttcgatacgtcctttgaagatggttgccagtttatcagcatgaggaatatgtctccttttgaagactcgagctcttttatttatctataaatcgacaaaaaaataataatataattacaaattgatatctaagaaatctaaataaagtttttctttaccatcaagtatttatcccagtcctcttcggttgcaccaaacttgcgagtattggcatcccacttcattatgggagaggcaatagtttcacaccagtgcttccaagatgtcctggtacgtgtgaagtggttttcgagctgcttatgtgtgtatcctagtcctgtgatccgattgattttctcaagaatcattttccaactttcct

SEQ ID NO: 15008 - DNA, 951 bp, Arabidopsis thaliana landsberg
acctttactgcaaaaatccggcgagaatcacgacccaagaaagcgcgtagactattatatttgtgttgctttgggtaatgtcaaggtgatataccaaaccatactgatacacaaagaacctgagggacaaaattatctccaaacagcgagctccaacaccagagccacgtagatgggcttgctcgtcgatccaccaagattgccagctcttgtcttgctgaatccctattgcaccttgctctttgatccacctgttccagtctctccagtcaccgactattatttcccaggtaaagcctgaagggttgaagagaaacggggcgcataaccaagtaaaagacatgaaccacactgagaaagtgatgaatgagtcagccatgttgctttgagatgtatgcttgaacaactcgtagacgaccagaagaatcatgagctcaaaacctttgatgaaatggcttcgagaatataatctgtaattttcactgaagttggcatggaacaccactactttacgccctgtgggtctgtatttggcacctccatggagaattgttctgccaaagtaatgcgttttagttcctagagagaaagtgaagaagaatgcagcaagctgtagctgcatgagtatgaaatcttgaaaggctataagaaatcctttctccaacccaatctccatcaccattggtagaccggtcaagagacctagctggataaatgattgagaggcaagggctgtttccaatgattttatgtttttcaccttggcctcaagaataagcgtcttctgcaacccactgagtacgaggtagagttgaccatagagataaatataaatcccgatcacggaaatctgtacacacgtcaaaagaaattagagctcatctacaactgaaacaattattcagctaaagttttatgaacgttaccaagctactgaagtagaatccaatg

SEQ ID NO: 15009 - DNA, 824 bp, Arabidopsis thaliana landsberg
ttttcttaatcgacacatctctttgtttttatgttatatatatttatatttatgtatacaatatattttgataaagaacagtatgtgtttatataaactccaacaatactccacattttcttattcaaactcaatatttaaatgataagaataccgattctcaggttatgtcggaactttggtttaaatctcatggttaacaaaaacaaatgaaaatcctaaagtaatagaaaatgatgtaacttgcgaacttagatcaacattaacataccacgactcttgacctccataggaatactaaggcaattagtttcccatgttagttttgatatatttttaatcgttaagggattaaaaaaatactatttaaaaatctaattctatatatttatgccattgaaatgaaattatatataaaaaaaagtcaaaagtataggaaagaagaccgacaattgccaagaggtaaccccgagttcagcaagcttagcatccgaagtttgtctcatgaccttgactccatgaatttcagtgggaacctcaggagcgaatatcgaatcatgattaagttccatagttgaaactcaaactaaatgatgaacaaagaagagatgaatatgtgttgtttcataaaagatgtgtccatatttaaaaccatcgcgtaacaacgatagtggggtaacattgccgtaaatgaaataaggttgtacgtcctgataataacacatcgaactacatgacaacagagagaaagttgtggttgctataattctagtactcgtaaatagtgccggcccatgtttttagtgtggctagtactgattttt

SEQ ID NO: 15010 - DNA, 200 bp, Arabidopsis thaliana landsberg
ccggatcttttttagggaccaattaattgactacttgagtcggccatttgagcatggagagtccactgacccgctcaacgtgtgcctaaccattgcagatgctggaatgcattcaataaattagtccatagagcatatttcggcctggatgcaagaatagcgacatggactaaatgacctgatcaagccaatgagcttac

SEQ ID NO: 15011 - DNA, 369 bp, Arabidopsis thaliana landsberg
gggggggtctcctggcaagtctgtcgataactacaacttctattcctgtcataatcaactgcaacaacggaggggggtgttatttctttgaaggcaaaataactaaaacggcatttctttattacattggaaaagtaacttaaattttagccaggtgggaaacagtgaaaaccttcaatagaccaagtagaattgagacccttgttgcatcacctgcggctgaaaagccagcggtctaacacgaaatgtgggatggggggagaagttaaaaatccagtcgtgagtttcgaagtgcaacaaagccaactattatactatacagaaagtttactacagcagaagagatcctgcagtattgatggtgcataa

SEQ ID NO: 15012 - DNA, 870 bp, Arabidopsis thaliana landsberg
tgctgattcactgttgaaagaaatgacgttagttgcaacattaaaacctctttacaactcattacttccatgcggtatccaacaggtaaaacataaaaagcctcaaaacagtaaaaagtctttggactcattaagctttaacagagggatgcgtgaatcagtgaaacaagacgctcaatgcttcaaacagatgatctaggtctatctaaatgattctaagagacaacaattatgtatcactagaaaatacaaatccacaggaaaaaactcgaactagttccaaaacatatcttacttggtggaacatgagaaccattcctgtttcgaacagaagcccctgcagttggatgcatctggcgcatgtggtttatctgctgctcaagcagttcgctatattccattatctggtgcttcaccatgagcctcagataatatgccttgaaaaattcgcggttctcttcttcaagcttctgccaaactgtcaactcagaaggaaaatatactatcataatgatctactagagacaaataagttcaaccttcatatatctagttgctaatatcaaccacgatctatgatttttaaataatattcttccaaagtggttcaaaccaatacaagctaacaagtcagacttggtctaagaattatccaatcaggttcaaaaaaatccaggaagtgtggaggttacctagttctgtaaaaccaggttcgatcttagcctgttctagaagagtgtcaacaacttctttctggttcatgtaaagctggaggcatcgttcaattagattctgaacctgcaaagaaacaaggacaggcccgaaagaatagtccgtcacatattctaagaggtttacacacaaaagctg

SEQ ID NO: 15013 - DNA, 716 bp, Arabidopsis thaliana landsberg
tgatctatatgagaccatatgtttacatagaattttctttaaaaatattatcttattagtttatagattgggatcaattgttacaacggtccacctttgagatcgaaaaaatttactaatttataggggtaactaatttaccgctatcaacttatagagattttattgtatatcaacgtatatatttgtacgagctttgcattttgatgaataagtggtgatgtcctatgggttatgaagcttcataactcataggacaaacacacaagataaatatgctaatgaatccatcagtcgagtcttggaagcctttaagcaattggaagcaaaagatattatggcgactatcgctaatatattgactttgatccaacagaaccatcccaaagctcgtatgaatttgagaacattgctagatattgcggtggaaattaaaaaagtcacaaagcataacattgaggaggagggtacaccatctttttatgttactcaaagggtagcacaaatcaatagtttcatagatacttctgctcttgatgaatcaaaacattatcaaacagcagttgttaccctttttatccacaatattaggtacttggaccaactcaaaagacttgttcataatttatcagatttaaaaggtttattgattaaaatcatatatggggaatatcttctgtaggaaacagaggagatcttattagagatgcttggca

SEQ ID NO: 15014 - DNA, 483 bp, Arabidopsis thaliana landsberg
gccaatattataccattatctaacattttattcatttgtttccttggggttaattttagttttttctgtatgaaaaactaacaattacatctgttaaaaaagtttgaattatttaatcataaaatgttatgttcataactttgattatattttctaatgtatttttgctaaaagagtttaaagttaatcacttggagatgaaagttagtaactttagtggatcaatctcttttttcttctttgcaggggatattacagatgtagtagctcaaaaggatgtccggcgaggaagcaggtggagagaagccgtgtggacccttctaagcttatgattacttacgcctgcgaccacaatcaccctttcccttcctcctccgctaacaccaaatcccacctccgctcctccgtcgtcctcaaaaccgcaaagaaagaggaagaatacgaagaggaggaagaagatctatccgtcgccgccggagaggg

SEQ ID NO: 15015 - DNA, 772 bp, Arabidopsis thaliana landsberg
cgagttagcgcagagagtcttttatgagttcgcaaggtctacagttcaaatctccatttatgcagttttttcatcattattttctaataacacgatctcgttttagaggttccaaaacgacgtcgtttcgatctaactgaaatttctaacgaaaatttaacttcgttaacggaaaaataacgatatgcccaaaatagcttagtcaacaaaatttgaccatttttatccaaaagtcaaacaaaagttcgtgatttcaatgacatttcacaaattcatgttttttttgtactaaatttgatagtttgcgatttttttgacattttttcggtaaataaaacacaaaagttcattgctaaattgggagaaaagaaattgcattatcaagggtgttggttaaggattctcctatctgcatacttacgcatcagatagttattggtaagagaaatgtctagcttgaaaacaaaaaaaaatatatatatgaaaaagtatctagaatcttaaattagaaaatcatgtaacatcagtcactgttgttcttttcacggaagaagcagatattgatgtatgaaatatatactaaacgatgtccaaaaggttttaggccacttttcatccattatcagtaggtaactctgtttaggccacttgactctgattagtgatcccaaggtactagtttctgattttttatgaacaaccaattgtctttagaaagacataaactcttgtttccataaagagcctataccaactcttgctattcaatgac

SEQ ID NO: 15016 - DNA, 190 bp, Arabidopsis thaliana landsberg
ctatgtcgtcgaaaattcgtcgaaacggctgtttccgctgtttttccgacgattttatccgttgaaaatatcctatcttcttgtagatattgtgttatattgtacaaacaaattatggtcaacaacaaacgttaaatgtaagtattgaagaaaatgtggccattcttttacgaatatgtgggcacaatga

SEQ ID NO: 15017 - DNA, 508 bp, Arabidopsis thaliana landsberg
ttatcaaatcgttgaatctcttctgtgcagctgaagataaacattacgtgaagatcactggaacgccactttgctgggatattctcttctacatcttccaattcatccgtgttgttcttctcttcaccgtcatcatcttgatcggaactggctggtcgtttttgaaacctttcttgcaggagaaagagaagaatgtgttgatcattgtgatcccacttcaggtattagccaacattgcttccattgtcattggtgaaactggaccttttatcaaagattgggttacatggaaccaagtgtttttgcttgtggatatcatctgttgctgtgctattatcttcccgattgtttggtcgattcgatctttgagagaaacctcgaaaaccgatggtaaagctgcgaggaacttgtcgaagctcacgttgtttagacagttctacattgttgtcatcggatatctttacttcacgagaatcgtggtgtttgcgcttaaaaccattgcggctta

SEQ ID NO: 15018 - DNA, 560 bp, Arabidopsis thaliana landsberg
tcataaaccacaaaccctaactattaaaaagaattttttaaaatcaaagttctgaacttctgatcaatttcgaaatgttatcgttaatcatcagaaggtctccaagcagattcatcatccatggaatcaaaatttcttgtaactctctgtcggctgtagattcaagttcttcagttttggtttctagaagaaccttcagttcaacacctgcgttaagctattttggattcaattatggaaaaatctctaatttgaatcagagatttggtaattacgcttattctgggagtagtttcgcttccagtactcgatcattgagctcagaagctgtagctgtggcagcgacttgtgatggacttactgtggaacgaattatagctaatcagtggccgattttagatgagaatgaaggtgattggaagagtcacgctgcagcaattgcacagtctattcaagtcatcaagagacgattacaggtaaatttcatttacaagctttgcattgagtttcttctctgatagtgtgattgtgcgaatactcaaatcatctcttgagaatac

SEQ ID NO: 15019 - DNA, 669 bp, Arabidopsis thaliana landsberg
ccaaaatcataaattcataatgatttatgaacaagaaaatgttcatttattgttcttccaatcaacgatggtgtgatatgtgtcctctaaaatcactttccccagctagatcagtctatattaaaatgtctcacatagatagattgggtatttttactctaatatataaggcaacatgtgtcataaaatataacactgctaaatattattattttaatatatgtgtataagaattcacgagaagaagatgtagagaataataacgaaagacttcttattcttcttatatcttgtttaacgacgaaccaacatatatatatacgaacaaaagacttggtgaaaaaatcttataagttggagaaaaagttttttaatggctaaatcttatataaaataaaatcgaaaagatagattatccgttaataacaacatgaggttttttactcattgtcaactaggtttaaatggtaaacccatgcatttttcaatataatattagagctaagttaacccaatattagaaattatgggtttcccgatcaaaactatgacaattttttgggtcggttctcgtgtcatcattgtgtagggtcatgctaatcatctctgtataattctaatgttgttttttgcttttttttttatgggaaatcttcgaaagatctttga

SEQ ID NO: 15020 - DNA, 511 bp, Arabidopsis thaliana landsberg
ctcgttcctcaacatcaaaccacgaaaggcgagaactgaaaaagctgggtcagattcactcgcaaagctaatagctgagccaacggatgctcggtctatgtcattcgttggcacgcatgagtatttagctcctgagatcataagaggagatggtcatggaagttctgtggattggtggacttttggtatatttctctacgagttgttaaccgggaaaacgccattcaaaggaaacggaaaccgcgaaacgctcttcaatgttgttggacaaccgcttaagtttccggaaggatctataagctttgcagctaaagatttgattagaggtttgctaactaaagatcctaagaagagactagggttcaagaaaggtgctacagagataaagcaacatcctttcttcaataatgtcaattgggctctaatcagaagcacaaccccaccagaaatacccaaacgcgtcgagcttttgaaactaaatgcaacccttaagtcttcacttgaacaacac

SEQ ID NO: 15021 - DNA, 566 bp, Arabidopsis thaliana landsberg
cctcttcgtctttctacttccaatgttatctccagtttctaccgtacggtacttcaagattgagtggctggctaacaaaactagcatccggtccagcaatactggtgcctccagattggtgggcttggttgggagaccaagagcgatctcagaaggcgagagccacacgccgtcatctacagaagtgatcatgtcgataacgccaagctccaaagcagttttgagaaccatggggaaggtcatggcatgcaaaatcctctccgcttgcaagctcaccgtatcttcgtgataacgttgttcttctttgattagatccggtttaggaatgatggttaaggaatgttgaagatggttctccattgttgttgtttggttggaaaatcgagaaagataggtaataaaggtatagatggtattcatactttgtcattttttatactcagaaacctcaccaacattatgcctaatatttgatagctaaatatataaattaattaaaatatgggcacgtatttttcatttataaaaataaatattcgcgtatatttaaaatgatcatctaatat

SEQ ID NO: 15022 - DNA, 1012 bp, Arabidopsis thaliana landsberg
atagtcacgtcctgagatataacatgtctaataatttttttaactcgtcttatgatttgtattctaaaaatagtgatttttaaagttaaggaatcatttattatagataaaaatttaaattgtatcattgagacatttatattttatggtttacaattgttattaagtaacattataccacaaaactctttttttggttttgtacaagtttttctaaatcagactgatttgatatgtctaatattcgtggtgttaaaaataataaattaaggatttaacccgtattaaaacagcaaattaataataaattttctttttttattaatggtgattcaaaaacccgtcccaccaaactagtcccaccaaaaaacctatatatatatatatatatcaaatgcatttaaaaggcaatttgcggccaatatggtgtttgtttaacgctagaggagagaggaagattgttttctactaagagttgaaactctttgaaatgtgatgatgttcacgagaattggaatggaggaaaaagagaggacaagttggatgatctgcaatctgttctcctcctcatgagtgaagttctgtggtgtgtttatgggtcaaagatatagcaagttaggttttctcttaaggtctgaaccggtgaagttgaatactctctagtctctacttttctttttgagagtgcaaaaaattattaataagagttttacttgacgtaggtgaaaatttgagttataatagttataatattctgaactgtattttatgtagtttcgatcgaaacttttgtctctgatttgtctctgatttgactactttttagaaagaagaactcacaatgtaacgatattagatgagtaagattaagatgattcataccatatcaaatttatcatctaagaaaagaattgaaaaaatccaaacacaaaacatagttgttccatgtgacgaccaactatcggtatccacaattaatgttaataaaagtaaaatattaattctaggttaa

SEQ ID NO: 15023 - DNA, 651 bp, Arabidopsis thaliana landsberg
tgggtgctggtcgattgtggaagtttatgagcatcttttattggctaaactttttttatttctaatagtcaaattgaacaaactaatggggcttgctacaagcatgagatggattatactaatattcataggactagtggagttagttttgttgaacatgaacgctgaagaacaagctctagtaaaaagacatttatcttctttcaataataaagtactcgtagtacaactaaaaatcttacacaacaagctccaactgtcaaaacctcaaaaattgaaaaacttcatcaaagtctcctaacgagtctacttaacgaggaggagagacaggcacattagctttcgcgaaactgatccaagcaacaacaccaatggctagaatcacccaacccatagcatcatacttggcatcactacttttcttattcttcacttgctgtgtttggaacaatacatcaaaatatgatcatgatgttcaaacacatcttcttatattatctacaagtcgattacatcaagcaatgaaaatgaaatgtgatgatgagaatgaacataaatcaaaaagagagaacctttgagctcggcggtgctggagcttcaacgcgacacattggttgtgagcctaagccttgttatgaagcttctgcgtgc

SEQ ID NO: 15024 - DNA, 720 bp, Arabidopsis thaliana landsberg
gtctaactaattatattacaatgtcagagttgagtttatcaaatctcctatattgaaaatgtaagatgctactttttataaaacaaaaaaaaaaaaatagtagaaagcgacatatataagtagttttattcccaaaatttaatttctatgattgatatagatttataaagatcaggtgctgtcatcaaatattttaaatatttaaaagttagaacggttcatacttcattggtcagatttacttcaaactaaatttaaattattaatgtagttttaggtttaactaatttaggttattgatatcatgtgaaagggaagttgtataataacaagaacagatttgtcctggaaacataatttatgtaaacagtccaaagaatccacttcaaagtgggcactcacgagcaagaagaacacattttttttttgtaacttttatttgtccttttatcagcaaaaaccatgatggtgaatcaatgacgtagctactatctacaaagtttctttaaaataaaagaattttcaatagatcactgattaactaattattatattttgttgttaatagacagatcatgatctaagtcgcggtaaaagataacaatacaacaaaactaaaaatgactaccgtctgtgatatcggaaacgctagttcttatcgttttttcgattagtattaaagcaatacaccctttatatactacaagaatataggttact

SEQ ID NO: 15025 - DNA, 476 bp, Arabidopsis thaliana landsberg
aatccaataccaaacaacattgttaagactctatacaaaattagtaaactcacatgttgaagcatccgggacacttaacatcctgaaaaaaatcacacaaacaatacagaatcagattcattttcatcgcatcaaatgtaatacaaatcagatttcataaaagaaaatagaaaacagtaccatgaagaaggagttgggagattgcacgagacgcttgagcttatgctttctcttctcaagctcagctggaggatgaaggagatcgatgtcattttggagcacctaatcaacagatccataaaaaaaactcagagattacagaggaaagtgaaagagagaggaaaatcaagaacaaggagagatatttcaccatgattgcttgtggaaaggcggcgaaagcgaatataattaaagaaaccctagaagcgaagagacggagactgcagctttagcttcaatctaagtatatatgtctg

SEQ ID NO: 15026 - DNA, 717 bp, Arabidopsis thaliana landsberg
gatgattcctaaaaatagtcatcgtgatgttcttgtttttgttctttatttataaggcgagattctagtgttttgggctgctttttgccctaaattctatttaatcgttcaaaaacacagtagatttaaggatgcaggtaacaaaggaatttctggttaaaaaaatttacattcattgaaagaaaaaaaaggcgagattctgaagaaaaacgtaccgaaaacattagaaacaggtagatcataatcctactatattatttgagaagtacattttaaatataactttaatttttgtaattaattacatgacaatgtcattagaaaaatttaatcaaaaacaaaatcctttaatgatatcgttaaggttaccaaaattatttaacgataatattcatctcttagttgtagggcttattggatctaaagacgggtcatcaaagatttcctaaactgaagcaaaatatactgaatgttcaaatatctatctgttaccaaattataaacaaaaagttcgtaaaacaatttaatattttatatacaaaatcaattaaatcttagtcacataaaaattagcacaaaaaaaaatattcaacaattaaaaaattatcaaatctctgtgttatataagttttgatactatattcgaataaagatgtaataaaccttttcaatttatattttttaactaatttaagctaactaatatatttttttttt

SEQ ID NO: 15027 - DNA, 1124 bp, Arabidopsis thaliana landsberg
ttttatggtttgtcggcaatttcacaaagttcataaagcccaatatcaacattgggggtggggccaagataagccagagaaaacgcgagagtcgacaaggaaaaggcaatgcaagaagaagcttaaatctctcttctctgctcctgaagtctgttcatggcgatgtcgggaactttccatttgacttctgactatgtccctggtacttcactatcctgtaccctttacatgtctctctctttctcgcttgtcgataatttttctgttttattttgataattgtgaaggcatctatctatgtgcgtctctatttgttttccgggaatattgttactgttcttccttgaattctctccgagcacctagtgttttatgcccctgtcactgtaggcggaaacggcatgtgtgtggagaaatcattttgcttttggtttgttgtccaccagttgttcgatgaaatgattctcttgagttttatagacttctgcttattcgtgtgtgtaatgcaacttgcttctgtactggcctgcctctagggttctatgaataacgaatgttctatctttcaatctgcttactctatgttgtgtatttgcttggtaatacaggttacacactttcagacagccgttgcttctttaactctgctgtttcaagaagaacacttgccatattaccttgctcttcctgtctcgatcacaagaatgggcgtctgaaatctgtccccaatagaagttcttttgtgtgccgagcaagttctggcggctataggagaaatcctgatttctcaagacttaataagcatggttaccggggaaacaacaggcaaagcggagggagagaggattttgatatcgaaaactctgatatgttgtcttcaagaaatgggcctttattcaacctgtctagttcccccaaattccaagctacctcatcccctggacctagagagaaagagatcgtggagcttttcagaaaggttcaagctcagctccgagctcgtgctgcagcaaagaaagaagaaaaaaagattgaagaagcttctaaagggcagggaaaagaaagtgaaacctgtgactctcttcttaagttactaaggaagcactcgggagagcaaagcaaga

SEQ ID NO: 15028 - DNA, 757 bp, Arabidopsis thaliana landsberg
agaagagtttccagaaatcagctctcattgtgaccttgactctcttcttcttcattccagtttcaatctcggttccattcattctgtttcatggtgattaacaatctttcttcttcctcctctttccttttttttatcgactagcttatgtatattgcttgacatagggattagagatcaatgctccaatggtggagtgagcagcttcgtacagctccttagcaacctctctagctcccatggatcttgcttgtaccgaaccaactccttctttttcttgtttcactctgatcttgtaaaagggtttaattgttgtctcctcctttgttatgtctcatctttgtagagaaataggaaatggagagcaagattcggtgactatgccgcttacgcaacaagcgagtgtagcgtgtgagaaagttaaacagatgaaggatttgagtcaaggctacaacattgttgcacagtctcaaggaaacttggtagctagaggtctaatcgagttttgtgacaatgctcctccggtcttcaactatatatctttaggaggtcctcatgctggcatatccgacattcccaagtgtaatgtgagctctctttccattactattggactatgtgtcttaatcacaatcatgatcatcataacaacaacattggtgttctctgtttcaagtctacactttgcgagttgctgaaaacagcggtctacaccgacttcgtacaagtaaacctttgctcttcttcttctttaatc

SEQ ID NO: 15029 - DNA, 497 bp, Arabidopsis thaliana landsberg
catttactctatcggattaggcagtaacgattatctttttatctacttcatgcctactttttactctaccggtaaccagttctcccccggatcctatgccgacgatctcgttgcccgttacaccgaacaactcagggttcgtatacacacttctatatcctctgtttcttagttttcctctggttttgcctctctgttttatagtttctactctggttctttatgttacttgatcctctgagtgagagattaaggttttaatgtctgtttttttttgtgatggagcaggtactgtataccaatggagcgaggaagtttgcgttgataggagtcggggcaatcggttgcagcccgaacgagctagctcaaaacagcagagacggaagaacgtgtgacgaaagaattaactcagcgaacagaatctttaacagcaaacttatatctatagtcgacgcttttaaccagaacacaccagacgcaaaattcacttacatcaa

SEQ ID NO: 15030 - DNA, 647 bp, Arabidopsis thaliana landsberg
aaaaatttgaatgtaaacaagagagcctgacttttcttggtttgcgaccaactgtgattacattgacccacagggtacaactggtcaacagcataatatgagagagtttgagagctaaaacagcacgcactttctattcaaaaacgtaaaacaccacagctttcctctgaaatacgtgccgttttcctcgtatgcaatgtttttttcctgcaatcacaaaaccttttcagtacttcaaaaataaaaaaccaatgatgaaattatgttaacgttgatttcatttttccaaaataaggttccttttgttcaacgttcttgttagagtttacgaatctagatgaacacatttaacaagcctggtttaccattcgtgttctacgatcaaacacatggttcaaggttcttgacttcttggtaagtaggtattgggacacctgaaccatccgtcagtttcttgtaagcattttgaagtcttcttgttaccggtcctacttttccttcaccgatcactcgcccataaattttcacaacctaaaaccaataacctcgataaataagcggcacaaaaaccaaacaaaagtgtttctacaagaaggaaatcttcactcaaaacattgagatttgcatattccttgaatgtaaaatag

SEQ ID NO: 15031 - DNA, 442 bp, Arabidopsis thaliana landsberg
gaagagtaacacgtcatctgtgtgcttctttgtctactatttttttaaaagtgatgacgccattgctcttgcccaaagggagacaaagcaataccgtgatgatgtcgtggagattttgttgagatgctacgagcgtgtaaatgtttcatgtttgttgtttgattttactgactgctgatttctttttttcttggatctcgctcaaaactagatcctcactacagagcataactgttgatttttcttattccagatcttgctctgaacaagggcatctaaagtcacagatgcgtgtgattattgttctagacttgcagacttccttcttttttttttttttgcaaatccagatttgttttctgaatggtgaattcgtggtccagtaaggttttgataccttgtaaagagataaacttaacagaacaaaactttgttgaatatc

SEQ ID NO: 15032 - DNA, 624 bp, Arabidopsis thaliana landsberg
agactactacagctgtgaacatgaacaactccgatgccaaggaaatacaacaagagcttgaagatggttcaaggaacggcgatcttagctacgtagcaagcaaaagaaaagtgcctcgtggacctgatcctatacacaacaggttcttactactttctcgttttattttatcacttttaactaatccttacccctacctgcatatatgtgtcttgaaatgtttctgtatgatatttcattaataataatatatgacataaacccgtgtatggtgccacattcatattagttaggtctaagttcaagggctataagcctaaaattctctacaaccccatattagattccgttatgttcaaattatacgtgtggaccacttggtcacttgcatttcgaccatggtgttgtttaacatgtggtttttaccaaggacatgctcttagtatggtctagatataaactcgatattgagattaatgaatgacatctagaaatgactatattagaagaaatcaagcaagctaacctcgtgattgtctatatgtttatgcatgttattataaaagtttgtttcgggtcaccataaatatacttctagcacaaatttactaaaaaaacaaacac

SEQ ID NO: 15033 - DNA, 703 bp, Arabidopsis thaliana landsberg
agctttgctccttctcatgctccacatgtgtgaatcaacatcaagcatgtactctacgttctctttcctaaaggaggctctgctcgagataaccgtgctgcgacaatgctcattgcttggtatcttagactgtctaattggttcacagtgaatggatggagataatgcatctttgaaagcagaggatggccataaagatagatcatgtgagccaaggatagacaagtgaatctcgcagctaattggacttctcccattttctttaacccttttgtttgcagaacaagaagagggtaggagtgagtgtagattctatcagcctctagagtcgacaaccggatccttaccttcccgattctcgaatccactttggctccactgttcgatttctcacttccgccaaggtgacagttatcgaaaactcccagtgtgataactgtacaaggatcatacacttcccatgtgtattgctcattccatttagggctagagctgtcaatgatggttcttgttctcacccatttttgaccgtacttggcaacacaatacggatctgttgtcgctttaccgtcttttgttttcataggcgatagcccttgagcactcaagattcctacttcaaggatgccaataggagacttccatagttgccttacagtagaaatcacgtccctgatgtacagagttgactcgtccttacatg

SEQ ID NO: 15034 - DNA, 591 bp, Arabidopsis thaliana landsberg
  unsure (1)..(591): unsure at all n locations
cacctacaaacgtgaagcaaagtaacttcactgagacaagagaagtgtaaagaaactcatcttgatgacttctttcgccattgggttctcccacgattgatctcctgaccattttctgacaacctcaggatatgcaagaattggctctcattgtgttctcgtttgcttgacgtggtagatccgttggtcccagtaagctttgagaccgcctcattgggggtttcagaggtggtgagtgaatctacaatgtcatcttgctggcattctcttctgtaatctagagttataactttaagctcgtgtgtgtctatgatttcttgcggtatgctctgccattaccaagctcaaattattagttagctcattaataaatgacgtaaggttttgtggaatatacttagtaactcacctcgagtacccatccaatgtaggtaacattattcacatgttggttcatgtctagatcagctcgtctaggcttaagcccaagcatagaatactgagcacgatcttccagtttcgggattntctttaagctgctatcggtctcctctggaaacgctagcctacanaaaacacagacaagaaacg

SEQ ID NO: 15035 - DNA, 748 bp, Arabidopsis thaliana landsberg
ttcacgtaccattccaaaacagaagtaaccaaatgaagtttaacatcttcccgttgttattcttttatttgaaagtaaaaaacaaaaagcaataagactatccatgataattcaaacgagagagtaagagagacatgagattttcaaatgcgacttgaatccctcccgaagatgaatcgtctcatccagtctgagaccaccaggactctcgttcgccagctcacttgcttactgtattattaaaaacaaaaacttgtaaccaaaaagttacaaaaaaatacaaaaatcatatgaatacatttcgtatttcattagtcatttaacgttacctagcgtaaacggagtaccacagccattgactgctgtgtcctatcgaaacccagtctcctggaagttgcgccgcggtttgttcgcctcctaatggagcaaattgtcccaaatgtctatacctgtataacatatatattcattgtctcatgtctccttactataaagtatataatcagtattgagaaattcacaaaacatgcaatctcaaaagtgactaaagcctcctaagatgcagatactaggaaccaacctgaagggacggaagcggtgacgaccttctcctctaatcctaatgggaccttcaggattcttctcgcatacttccatacgatcaaagcattttgcaaggtaagtcccttgttgagcagcgaccttataaagccaccagacaaaggatgagaaagcaaacaaagtgtgt

SEQ ID NO: 15036 - DNA, 1107 bp, Arabidopsis thaliana landsberg
caacatacagtgtctataccagagaaaataacatataccagataaaaggtcagagttttatttccagcttagaaacaacaatgaatgtaatcatcaatctggaggaacccatttttacaaaccaattattgtgtattcctaagatagagtttcatttacattgattgaataatctatttataattgcattaaataaggtgcataatcgtaacttccgattctgtgcaatttttttaactatatccaagcactttccctctttaataatgttaatataataaatgttgtttgtttactacaaatctatatctttgaccaaactaaatcatcataaaagataagcaaatcatttgcttggtcaaaatttaaatcatttaaaagaaaaaagatctagtgataagagcactgcaaatttataagatcaacattagcaaattgagtatttaaagcaaaggaaaaattattggattaatttcttttcaaagatcaactcatttgtttcaagatagcaaacattgttacagattcttcactatctgtatacaaattattacacacacacaaaaaaaaaaaaacaagatcactcgctatgtaaccgtgacggctatgtctgttaactgtaatccatcgactatatagtgaaattagcagtagaactttggtctacgtgcatcatgaagcaacaacctcacatcctttgaatcaatatctaagtctttctcaactcctccactgaagaatccttcataaacttgcttgataactttcaaaacattcgccaaagatccatcgtttcgactctcgtctctcttctcctctgcataagatttcgtgtacttcacatcgtgtcttgtcttgtcactaaaataattgtatttggtgatctctagcaaattcctcttgtgatcaggccaaacatgaggagtatcatccacaatcacaacaccacactcatcagctaaaacaagatcaagcgtcttaatataaggactctcgtttctagttatcactcgatctccaaagtatactttttccggatcaatcaggttcaatacattcattgcgtaatcacgatctcccatcgtgtaaacatacatggaaaacatt

SEQ ID NO: 15037 - DNA, 739 bp, Arabidopsis thaliana landsberg
actactcttggtatagtacactcaagattacattaactgatccccaaatccctgaaaccaattcacatctaccaacttctgtcctaaaagagaaaccccacaaacccttatccccttccatcctttgctgttgcgtagcttcgactttccctcacatctgttgctgctacatcccagctcccacttcttcttccccagctttcatgtcttgcttctgtccttatcgagcctgctctctcatggtctatgtccaatgtgtgatgaggctgattgttgttggcatcttctgcattacaacgccgtgagagattcattagatcgtctccaatgtctagatcgtcttccactttctgtcgccgggtcacattttcgtcttctgcttcccctgattccctggtggtgctaggcagagtaataactcttgggggttcttcttcgatgaaggctctaaagttgttcctcgagggcttcacctttgagcaaaaaacttccaggaaattgtttggacagccacggttatagacaatgctcctgctgtgtgatgacctgtaccggagtttctcataggttgtctgaaaaacttgcacggtgttgctatcagttgacttacaatttgcatacaatattaatatgtatatacgggaaggtaataacagggataacaagtagaaaacagaattttaaaacaatagagaccaactgacctggtttgtacttatgaggtacaagtgaaacgctg

SEQ ID NO: 15038 - DNA, 846 bp, Arabidopsis thaliana landsberg
tgaagcataagagcagcgtaaccgaaactaccatcgtctaaatgtactctaagagcctctatgacaacaacaccacaaggcaaaacattgtcttgatcttgacagtgattcagaaaatgatcctcacttgcgccattcaagctccatttatcttcataattaaatttggaagagaaaatggttgaggcattggaggaaaccggagaagcaggaaaacaagtggaagtggtactcgttgatcctcttgaaagtgtacaatacacagaagaaatgcatctcatgatatcttcagagagtttattcgggtttatgaagttgttatgatcaactatatgagatgatcctaaaagctctccaagactgtgagtaccagaaactactctagtcccttcctgcaaaagagaaaacacataaacaagtcacttaaatgttttgtttacaagaaagacttgattatagttaaagtttacccttgaagataaggcttttaaactagtgttgaaactccgaggatatgagattggtttttggtaagcttgataatgagttagtgatgttggtgaagtagtcacagaacgaggtaaggtagtagtaacagagagattagagaaggaattaggaagttgttgctcaaatgattttctgtaaagagataagagatatcgttccatgtgtagaatctctatctcaattgatgcaatctccttcttcaattcttctgaagactgaaataaaaatcaagattcaagacatagtaaaacaagaaagctgttataatattaaagatttgattacttagttataaacgaacctttgggatcaagcagagactggaattctgatgtc

SEQ ID NO: 15039 - DNA, 866 bp, Arabidopsis thaliana landsberg
aacccagaataaactactattatgaataacttttttgattattttttcagttctgtttgattgaatccaaacctgttggggtatgtatttttgtttttatgaataccaaaaagttttggcttagagcccgaatatcctcggcccgaaaccattatgtaatattacttactagattttcattaactttaaaaagattcatcataatatatagctaaaccccttttgttttaaattggaagacgcatcataagttacgtcattaactcatcatgatcactttcccaattaaatatgttaacctaaactaattcagtcttatcattactttgagatctctaatttgtctcagccacaaagtcattaattacgatatatatcattccacaacttctttgaagattctcttaacctcgtatcatttattctaacccattttcccattatcatttgtcatcaaactagaagtcaagaacagaaacatccagaacaatggctaaagtagaacagagcagatggattcttcaaggcatgaccgctcttgtcaccggcggaacgaaagacattgggtttgtcttccatcatcactttccaagtcatctttcttgcgttccaagcaaccaaagaaaataaacccaactttgcttacacatttatattcttgatgaatctctcacctatgcaactaaaattcaggaaacctacattgctctcaaacaatgaacatgtctcgatctcatgtagttgggcctaacccttaatcgaggcccatttgtttgattaacctaacaaatacatgaaaaggcctttcttacactgtcattatcattcattcattatggatttttctctaccagacattcagatct

SEQ ID NO: 15040 - DNA, 838 bp, Arabidopsis thaliana landsberg
taagcaagacaagaccagtgacacactgtcgaaatggctatttataaaagtgtgtattaatctaatgaaaatctgtgattcaggggatcccaaagaaatttgtggatatgcatatgccaactgagacaacgatgttcaagattcatcatccgagaggaaagaagtcatgggatgttacatatgtggtcactgatgtacaatcaagattctctggtggatggagtcgtttggccaaggagttaggtttagtggtcggagatgtttgtacgttcaagctcatcaaaccgacagagatgcgtgtgaaagtctccaaagaatagacaccatgacgatgatgatattttaggtgtagttgcagaattagtgaagaacttcggaacaagattatggtctgtgattcaatgttaggactgattttataattttgtttttctacttactgcttaggtttgatttgtatcccaatgatgaatctgaactccgtttgagtaaaacagatttattcattttattaaagattattgttgtagtgtttacatgatgaatgtgtatagagctcgctccggtctcttctctttattgtttgacaaagaaaacttaagttacaaataactccagcttcttcctttggcacattgcctccatcttcatctacaattgcttgcaaaggtgatccgttgaatacaacaatatcataagcctcttctggtcactgagatttctgagctaagtttgagatgtttatccaagaatcaagcgtcttgatagctttcccagacgattgtacttcacgtgccacggttactccttcagctagcgtttgaactcggttgctaac

SEQ ID NO: 15041 - DNA, 364 bp, Arabidopsis thaliana landsberg
  unsure (1)..(364): unsure at all n locations
tggctgatttccgatctaatgcagaggaagaagaatgagtaagacccattttcatttattatgtctatgttctcttgacattcggataatctaattactggatgcagatgcttatgaaagcggtgatggcatcggtgacagactaggatgtgcaaagtcaacagaaaaaagaacctcctgagacgagaattcatggcggctctgcttttttaaatgcagttcaatgcatttcatccagggaagaatcaacttcaactcgagnnnnnnnnnnnnnnnnnnnnnnnnnnnnnnnnnnnnnnnnnnntagccaggatcaactaccggcatctattgagtcctatcctcctagggagacctctagttc

SEQ ID NO: 15042 - DNA, 601 bp, Arabidopsis thaliana landsberg
ctgagccatatatgccattgcaacatacactgagggtcagaccgttgatgcaaacttcttatcgcctgtggcaacgagcatcccggtacacctggaggacaaatttggggttcaaatctttccaacgatccgtattatgaagagtatatccattaacttcaaaccaagggtcattgatgcctaagtcatgaggaactgcaccaagaaccttcctctgaacccattgtccctcactaagagttttcactttagtaggatcgtgtagcatcactgcagcagcaaagtctctttggatactaagttccagttttggaaacagcatcaccagtgcaaaagatgcatagaaatgaacatcataagtgttccacattcgatattcaatcccttctaagtaaaggaagtgtccaatgttctcttctccttcttcaagtaattttgtgccaaatgcagagtttgatgttgttgatgcatgaagttcctcaagcgtagaagccattttttcaagtacagagatagctgtatcattctgatacggtacatcgatttcgttctttagaccaagttgggatttatcaagtgagaacttcttttctctgactcc

SEQ ID NO: 15043 - DNA, 842 bp, Arabidopsis thaliana landsberg
acatcatgatcatcaaattcctttgattgagggcactaattcggggaacatgcgaccatttcgttatgctaatcatcaaaaaaatgagattgataagattgtcaaagatatgttagagagcgttatcatccagcctagttcaagttcatttgcctcccctgtggttttagtgaagaagaaaaacggctcttgaagattgtgtgtggactaccgaaaggtgaatggaattacagtgaagaattgtttccctattcctcttattgaagatcttatggatgagttgggtggggcagtgatcttctcgaagtttgatctaagagcgggttatcatcaagtgagaatggtggagaaggatattcccaaggctgctttcaagactcatagtggtcatttcgagtatttggtgatgccctttggattgaccaatgcactagctacttttcaagggttgatgaattcagtgtttcaaaagtttctaaggaagtttctcttggtgttttttgatgatatccttatctatagcaaatcaaagaaggagcatttgcagcacttaaaactggtattggaagtaatgagggagcataaattatttgccaaacggagtaactgtgcgtttgcaacatcaagagtcgagtacttgggtcattttattgacagagacggactgtctaccgatccatcaaaagttttagctgtgaaggaatggcctgcacctactaatttgaagcaattacggcgttttctgggcttggctaattattaccgccgttttgttaagaattttggagctattgccagaccattaaccttgctaacgaagaaagatgcatttttgtggtctc

SEQ ID NO: 15044 - DNA, 431 bp, Arabidopsis thaliana landsberg
gaacttgttggagttggttaaaacactttttagaggcctttttattcccatctccgaccattccaccaaaaccgggaccagttttgtttcgcaaaatcattctaccatggctacctcatcctcggtggtcagcagtgtacctcagcagcaccaagtgttcctcaatttccgtggggacgaacttcgtaataatttcgtcagccatctggataaggccttaagagggaaacagatcaatgtcttcatagatgaggctgtggaaaaaggtgaaaatctagataaccttttcaaggagatcgaaaaatctagaatcgcgctggctatcatttcccaaaagtacacagagtcaaaatggtgcttgaacgagctggttaaaatgaaagaactcgagggcaaactcgtgacgattcccatcttctacaatgtggaac

SEQ ID NO: 15045 - DNA, 257 bp, Arabidopsis thaliana landsberg
agttttattgcttgtaaaaatacaacattgttatgttgatattttaccgattccacattatatgttattaggttacaatcatgaagttctataatagttgcttctttttcttttcagaatctcctaacccgagaaagtctatatactttgcgggtatattggcctttgcatcttctggtttggatggtaatgatggtgatgatgatgatggttgagagttggagacaggcggtgtggacattgccaagaaaccttta

SEQ ID NO: 15046 - DNA, 768 bp, Arabidopsis thaliana landsberg
ctatctaccaccagataaatataataaccaaacaccaatcatggagtctgagtacttcaacatgccctcttctcctacttcttgttcctccttctaccacctcaatggtctgatcaacaacaacaactactcttcatcatccaatggtcaggatctaatgacgagcaacaactcaacttcagacgaagatcaccaacaaagtatggtcatcgatgagaggaaacaaaggagaatgatctctaacagggaatctgctcgtaggtcaagaatgagaaagcagagacatctcgatgagctttggtctcaagtgataagacttcgcactgataaccactgtcttatggataagctgaaccgcgtatctgaaagccatgagcttgctttaaaggagaacgctaagcttaaagaggaaacttctgatctcagacagctgatctctgagataaagtcacacaacgaagacgacaacagttttttaagagagctcgaagattcgatatcaaactctagatcggattcgaaccaaagcggcagagattttgagttgtgttaatgatcttgatcattgttctgcttatgtcaagactgtagatttcctaaggatcatgctatattatatgatataatatcattaataatgttattctctatcgagaaaaaaatattgtcttctatatcctttttcttttaaccaacttgagttagttaagaatattagtgatgatcatggaccgtccaataaatagtatattggtctaaatttaaagc

SEQ ID NO: 15047 - DNA, 467 bp, Arabidopsis thaliana landsberg
ataatcaagtttaattgaaaaaatttcaaacttagtaaaggataacatgattaaggtaaaacagattaaggaaaagaaaataagtgagaccgacagtcctaaatcataaaaaggaaacatatcacaaacggacagactcatgtttccttttgtttgtatcaattttcttttattttctacgagtaaagaacccaacttctataaataaccttgaaccctctcattagtcacaattattacttgatcaagctctcagtaactcgtagaagaatagataagtctaccattttccgaccaatcatcaaatctctcttgaagatgtcgattattatgttaacacaccgttacctcgtcagagaggttcatgccgttccgtttcttacaaaacacggaattggcttggacttcttgtctcgcaatttatcgatatgtggggaggcccaggtgcatctctttgtcttgaaaca

SEQ ID NO: 15048 - DNA, 625 bp, Arabidopsis thaliana landsberg
gttagattttgtaacttacattgtaacagcggaacataatctgtagtagaaaaaactagaaaagctttattaaattgaaaaatcatcttaatgacggttaactttccgaaatggtgaaatcattccaccattatgcatgagaactaccaattagactctaagttagttacggcattaattatattctcattccaccattatgcatgagaactaccaattagactctaagttagttacgacattatattcttgttgacatgaacttgattttactgttacagatcatcgagtgtaggagggtcttgaaatggacctatgcatatggatactacatacttagtcaagagcgcaacaagcgagtatttgcaaggtcagtttttggtacggaaacacttaatttgtgtgtaatcttaatttttccattaattgtagcagaactttttcgttgtcttgttgttcaggtgaggcagaaaatggtttggagagacttcatcattgtgcagaggaggagttgaaacagtttatcgggaaaattgaagacccatcaaaaaatttcggtgagctccgagcgaaattaattgatttgactaaagcaactaaaacctacttcgaaaatctggtgaaa

SEQ ID NO: 15049 - DNA, 461 bp, Arabidopsis thaliana landsberg
gcattttggatgtaccgatatcggcactagcttaaaccataagcaagtattatatagcttcttagattgcgtgtacgtaagcctgaagaaatataatgacaaccataattgtgatttgaaccgtttggaacttcccctctaagaagcgttttgacgagatctctttatttctttggctacttgcattatatctggaacttccccccctaagaccaatgcatctttctgagaggttaaggaaaacttccattaggcaattgcaagacacggcccaatgatttatattacaggcctgttaaatatgggcccaacttcgtaaacaatcaaaatattattcatatgtacgcaaaacaacaatagaaaaggataaaattggtattctattatatctctctaggacaaaaaaaagtaaagtcaaaagatcctctctcatcgatctctctctaacatctccgtcttct

SEQ ID NO: 15050 - DNA, 658 bp, Arabidopsis thaliana landsberg
ccatatcatatggggtcttttacatttttcgacatgggattcgttgttgtaaacatgtacgtctgatttcacttgaggcaagagaactttcttgtgctggtcattctgtccctgttgtgaactagttttccctctaccttttgtgcccaattcgcctttacgttcttgaatatcttttctcgcgcttttagatagaagattgattgcccttagtgatttagtttactttttgtgctttatcttgttcatgaagtggtatctcttagtaagatttctttattattgataggtgggtgggttggttttttctcgtacgacactgttcgttacgtcgagaagaggaaattgccattttcaaaggcccctgaggatgataggaacttgccagacatgcatcttggtctgtacgacgatgtagttgtatttgatcacgtggaaaaggtaatccttttgtcatcatccatgttttatgattaactgagacatgcatcttagtttcctttttatgctttatcttgttcttgaagtggtgactagagaatccttgtaaaattttacagaaagcatatgtcattcactggattagactagatgggagccttccttacgaaaaggaaaacagtaatggaatgcaacatttggagaacttggtggccaa

SEQ ID NO: 15051 - DNA, 682 bp, Arabidopsis thaliana landsberg
gccctgcgggaaagaaagaaaacatagttctaatctgttatacctttactaaaaatgttccctttgacatgagcgtgtttttaatattgaagtgtatttcacctgtgctggaatatatgtgctacaaaagcaagattaagatttggagaaccctcaacaatatctttcgccgtcaagtatctcctgcatcccattttgtctgcatgttcgagaacaagttttgctctctcaaatgagcttttaactgctaaatgtgatggattcttgtgctctggtgccaggacatttaatagattagtgtaagcttccgcatcctacaaaaaaccatgtcataagccacataaaaagagtctatcactagaaacatttggtcaaaccaaccactagagaactcataacttgatatcagagacttttggataccttaacatcagaagagaagtttgtgacggttttcttgtattcagtttttcttaactgaaaattcatccatctcaataagatcttctcaggtggtaaactcattagctcttccacatcctgttaatcccaaaagttataacaaagttaaatctttaattaaaaaatctgtccttttaatgttgcacttaaccaacaggaatctagacaatgagtgagtagtatgtaccttgctatcaccgaccaactccaccagctgggg

SEQ ID NO: 15052 - DNA, 742 bp, Arabidopsis thaliana landsberg
  unsure (1)..(742): unsure at all n locations
aataagagagataagaatagaaccatatgagtaaataaaatgattcatacaaatagaaccataagtcaacaggttgccaatcaaaatctctctctcttgatgtgcccatatttctagctgtcaacaattcacagccttctctttttcattcaatcacccatcaacaaaaaaataaaaccttttaaatattaaatacttccacccaaaactccttcaaacaaaaatcacttccctccctccatctctctctattcactctcccaatttacaccaatgtcttctcgaagccaccgatcaagaacatatcaactcacgagaacaattcctattcttgttcttcttcttgtccttttgagttgctgcaatggagcaagaaccacgaacgtcttcaacacaagctcgccacccaaacaaaaggacgtcgtttcgccacctcatgatcatgtccatcatcaagtacaagatcacaaaagtgtacagttcttggggtccctgccacgtcagtttccggttccaacttctggtccttccagaaaacataacgaaatcggtttaagtagtactaagacttaatcttctccttgtagttcaaaggtttgattaatgaatcatcctttttacttctgtaagttttttttgttttagtttttgccccttttgaatttggttcaactgatgtnatagattcagtttgtttatttatgggaatgctgtggatacgacagatttttaggttatattg

SEQ ID NO: 15053 - DNA, 761 bp, Arabidopsis thaliana landsberg
taagatcgatcgattgacataggctttggagatacaaatctgtgaaacaactatggtgtcgtcttcatgtgcccccgtcgtaaaaaatttgaggcaagggaaaatgaaaacaagatgcattaacctaggttacctatcgtctttaggtcttgccgtgaggaaaaagcaaaagaaggagagaatagtggtcgtacccgaactctgtgaggaattgttgaccgagattctgagcagattaccggtgaacctctgatgagatttaagtgcgtctcaaagatctggttttccacgatcaaatctcgatacttgaccaaccgtttctttaaatcttgctcatcacgtcgaagtttgtttgcttatttagtggttagggcaaaacagagcaattatgcgttgcttactacatcattgagtcatgatgatcactctgtctctgtaatcgaccaagatctaaccatgccgataatgggaggctacttcttgaacgcttgtcgtggcttggtgtgtttcacaattgggtcaagagtgcaaatttgtaaccttaacacaaggcagcttgtggacttgccgattattctaacacctaaaggaggagaaaattacaagatatggtactatttaggacacgatcctgttcatgacgaatacaaagtgcttagtttcatttggaggcacaacaaggagtggaaagtgagatcagacatcatgtgttggtacttggagctagaacttcatggaaaaagactcaatgccccatttca

SEQ ID NO: 15054 - DNA, 740 bp, Arabidopsis thaliana landsberg
aaaacccacaagaaagccacgacgtcacacacaggttgatgattcaacttttagtagtattgagtcgagagtaatgacggtgacggcggatagtccgagactcaatgcttcggggaagatcgtgtttcatggactcgagagaagctcaagcagtcccggtaacttcactggaggaccaagaatgaagcttcaccatggaatgccgagatctcactcagctaatgtcagaatcactcctgttctcaatgttcctgtctcttctctccgtagcgggcccaaatcaggcctcttttttggccagcttttcgcttcttcttcttcagcttcatcgtcttcgtcgtctggaaacagagcacagttgcagagcaataacatcaagaaccgtaccaatcgaagcagacttgaaccgacaagcgaactctaagtaccgaaccggattctaattgtaccgactttattaggtggtaaatgtttcacttttagttttattggggttgtttcgttagataagattagatttgggtccagaatgtaaataattttgattttcgttgaggttatttcttcgtagagcgggttgttcgataacaagtcagtcattaataataactgtagcgagagtgagaagtgcttcccatgttcagagatcgattccaaagatattaaaccacatgctttgataatataaacaagttttgactcattagcacagtgactttagggagcgatcagctcgttgt

SEQ ID NO: 15055 - DNA, 529 bp, Arabidopsis thaliana landsberg
cttgcataaaacctattaaccaaccaaaattatcggtttatacatttttagtaaaaccaaatcttgtaaaccacatcaaaccgagaaaactcttaaatgtaaatgaattaaccttggccacaagggtttgaacaccagcatacttaacgtcccaaccaaattcggtcatcgaccagcccgtaccacccattgagtcgccattcttgccgaggtaatctagatagtatttatcatttgttgcttggtataaccacgcagcagcccatagtaactcatcctggttatacaaaattgcgctagtaaaatatcaatagctagcaacaaatgttttcgttagttacttaagagagtttgcgttaagtacattgtaaccgctgacggatcggtaatatttttgtgccacggtaatgctgctgtcgtatttgcctctgtatttgtccgcaaattcaaatagctggcaacataagaattgcattaggatcagtagcacaaatcgaaatattatgcatcgagaaggttatttctactc

SEQ ID NO: 15056 - DNA, 648 bp, Arabidopsis thaliana landsberg
acaacgtctccggtacaagcctatactcttcagacacctacaagaaaccgaaaaaacccttaataaaacatcgacaagagtgacaaaagccatcacattttctcaatataactatcattcacctcaataagccaatcaactaagattccacgcatactcgaattcacatctttctgaactctctccatgtaatcaacatcaggtcgcttcttagcctagcatatagatgatacacagattcagaaaacttgcaaacacataaagctaaaaatctcacattctggttaagagttatcacctcagaagcacgaagatgcttataaatgtcacaagcaaacgtagcacaaagctgaggatcaccattggtactatcaatgttaacaatctgattcttatccattttcttcatatcagataacacatctctactacaataattatctgcaataccaagcaaatcaattcaataccaaaacattttatacagcacattcatagagaaccattagtaagaagtagtaccaattgtttctgaattcggcgttatgaaccagatttctcaaagcttttctttcatcgaaacaacagccgaaacgtcgccgttttcgatatacttcacttgaggactcttggaggaatcacttgtag

SEQ ID NO: 15057 - DNA, 547 bp, Arabidopsis thaliana landsberg
caagatcgcagagctgaccggtctttctgttgaagacgctttgttaaagtcgctggttcgcgaattgatatccaaagagtacaaagaaacagttgataggcttctttcttctgctctcaaaggtttatgcaattatttagattttcaatctgtgcatcactctaaaatacaaattctgataatgtgtttcgttttcaattatgcaggggatgaaggcaagaatgtggaggtcaagctgaaaacttttggttccgagctacaaggaaaagcaatgtttgtggttgtcaacgcatgttcaagcaaggactacttaaacaacatcgttggagtctgctttgttggacaagatgtaactggtcataaaattgttatggacaagttcatcaacatacaaggtgattacaaggccatcatccatagcccgaaccctctgatccttccaatctttgcagcggatgagaatacgtgctgccttgagtggaacactgcaatggaaaagctcacaggctggcctcgcagcgaagtgattggaaaattacttgttagg

SEQ ID NO: 15058 - DNA, 602 bp, Arabidopsis thaliana landsberg
gttctgcagatgcagagaaacattaagataaacttctctgactgcatccaaaaccaaagctacaaaaagtatcaatcatgtcataccgaatctagcaagatgttagatgctttgaagtctcggtatataacttgcggttgagcattgtgaagaaaagcaagtcctctagctgcaccaagagccatacgaacccgcgtgttccatgaaagtggctgatagaatgttcctcctattatgagaaaaaagaaagaaagattaaccattgtgtataacaagttcttccatgagcttctttatctttgaagatttgaacttacttctgaataagtgattctcaagactaccacgagtcataaactcgtaaacaagaagcctgtgctcctcttccaagcagtatccaatcagtttcacaaggttaggatgatccagctggcctaaataattgatctcagcctgttgttttcaaaatgaaaaaaaaaacgaaaaaagatgatcactccctgaaaccacaaaaccaggctctgcgacaatcttgaaataacaaaaaaagtagcttgaggagaaaaagtgagaagaaatgtgactaaccagccactctcgat

SEQ ID NO: 15059 - DNA, 549 bp, Arabidopsis thaliana landsberg
acttcaaaagtagtaataaagaaaataaaacaataactctcttttaggattagaaattattctaattacatagaatagatccctttttctatgctcttcccgcaatttccatcaacgaactatagccatacgacgtcgttgagcctccgttggcactttcacatcggtcgctaaaccgataatttcgaaaaaccgaacaatgtaccacgaaatgtctatttgccaccattcaagtccttgtctagccgatgactcgaacgcatgatgattgttgtgccaactctctccaaatgaaaatactgataaccacctttcaaaaaacaaaaaaagatataaataattcaactacattattgagtttttggaaacatgaccttatatgagctgtctccaattcatgtgtacttttgtattttgggaaagtgtcataaaagatattataccattcaaagtacagaaaccaaaaatgttaagagataatattgacataccaaacattacgagaagtgtcattggtcttccaagttcgagtgccccaaatatggcaga

SEQ ID NO: 15060 - DNA, 654 bp, Arabidopsis thaliana landsberg
agaaacaaaactgagatgagagacatgtttttcacaagttgggcgttttttatatacattaatgggcttataggcccatacttagggaggcttctaatatatctgcaagtttgaaagttgaaacttaaagagacagaaaatcagcttcttgtcttgctgctgaaggttagtcttcaaatttctcatggatcatcgattatattcttgtctaataagctaaatcaagcaaatccatatcggctagtgatgttcttatacattcctaaactgtacatggcttctatacactagcaagcaccctgactattcatttaccatcgatgttctcatgaagctccacaatctgtgctctcctctcagcagctttcctccttatgaagaatccccatctcatagcagctctcaccttcagccatccaacaaccgcttttcctgatcgcccacggccctcctcatcatatccctgcatcattggtgtattctgcataaacgatgggaaagtaaaaccatcttctcctttgccacctcccatgctgaagagcaactgttgcatgtcctcattcgctaacaagtcatggcttgtttgccggatctcttcctccgagaaaaagtcattctcacttaggcttgtccagtcttcgaaaggattaagat

SEQ ID NO: 15061 - DNA, 784 bp, Arabidopsis thaliana landsberg
cgggttctgcatgaatatcgtttagaaggcaaatattctattgaaaatcttccccaggcagctaaggtaataacatttatagattttgtgtgtttctgtcttttgttttttttggggacttgaaattaattcttttgtttggttgtttgtgaatgtagaacgaatgggttatatgtcgtgttttccaaaaacgtgccgatggtacaaaggttccaatgtcaatgcttgatccacacattaaccgaatggaaccagccggtttaccttcgttaatggattgttctcaacgagactccttcaccggttcgtcgtctcacgtgacctgcttctccgaccaagaaaccgaagacaaaagacttgtccacgagtccaaagacggttttggttctctgttttactcggatcctctgtttttacaagacaattattcgctaatgaagctgttgcttgacggtcaagaaactcaattctccggcaaacctttcgacggtcgtgattcgtccggtacagaagaattggattgcgtttggaatttctgagttgtataagttatgttgtagacttgtagtagtcatgtgttcgtgtgtgtgaatgaatattcttgttacatttttttgtaaaaaaggagaaaaaaatatgctagaaagtcaattgcttttgttatgtagcattagtgttttttatgtactcaatagacttcctaattaaataatatcttaatttatttgccatgtacaatgctaaagccaagttaacacatttaaatagaatgttatttttaaaa

SEQ ID NO: 15062 - DNA, 1085 bp, Arabidopsis thaliana landsberg
ggcaagtttgatgacgtggaagaccatcggcatttgtagttgagtcactccaccgcccatatcacccggcccgcctgcacagccgttcactagtcctatgatcttaccgttgaacataacgctggtccaatactggcatgatacaaacgtggcgagacagaatccgatcatgaaccggacgcctaagtatccgctagggccacccacaaacgacattgagaagacggttggggcggttagcatgagggagaaggcagtcccatatcgtgcaccgaggagatcacaaaccgctcccatggctaaccttgagaaaatggcaccagagacggatgcgactccggcgtttccaatgtcggttttagtgaggtcgaggttgtcgcggatgatggggactaatggtgctgccgcgaaggtggagatgaagcatgtgaagaatgagagccatcgtaagtggaaggctctcatgtgaggtttagcaaaagagagtgggttgaacactttggctcgatgttcggaatcacccggaagggcgaatttagctgttggatcgtctgattggactgtttgagacgaagcatcgacggagaaagagaagacttgttctcgtgctgtaactccatgcaaggaggttccaatggagccttcttcattagaatggttgtgagtcatttaaggcgagagtgagatgaaagactctgagtgggagagaaggctaatggtctttgttgtgttttgttggtgtaagttggagattagagaaatgcaaagtttatatagaggccagaggggataccaatatcatatggtgggtagggttaggtgggtccaataatgagatttgaataagataagtaaaagttaataaggactttaccaatttgtgaaaattttattattgttagctgataatagcatttagtatagatatgagttgtaattttgattagtaatgatagaaggaaagaattatttgaatgtgagaactaaacatattattcttttgtagcatataagtacgtttcatacgtacgtgtaccatatatgggttatgagttttgtctcacacatttatgaattgattcttg

SEQ ID NO: 15063 - DNA, 538 bp, Arabidopsis thaliana landsberg
  unsure (1)..(538): unsure at all n locations
gaccccgaccttttgcaagcatgtgctttttaattccttaatggaggaaacgcatactgtggccggcggaaacaacacttagagtaaacattcatccaaccagaaatgagatcctgttgttcacaatccaagatctttaccatttcttgtagagagttgattcccacgatacgcataaacctgcatcataattcataagtccagtaaacatcaactgcagtaatcattgtttaaactttgattctgctgtctcgattctaataagagaaaaacttacattcgtggataggaccatccatgtaaccttcaacgagcaacgtgtgaaaaggacttccatcgagtccttcacggtacataacacggcaatcttcaagatcatgtttcaactgtaaaacaaacacttttttgctacatcgttacaatccaagatcattggtcgaaacaataagaacaaaaatggatatgtctctgaagttcaaaacanaaaaaacatactttncaatcaccatcgttggttaatttagaaacttgatgatca

SEQ ID NO: 15064 - DNA, 571 bp, Arabidopsis thaliana landsberg
aagaaagaagacgctgttcatgatctctgtgtgatatgcctagagcaggagtacaacgctgtgtttgtcccgtaagcatacttcctccacttttggctgattctgcatttgcaacttgctaatatgcttgtggttggtactcaggtgtggtcatatgtgctgctgcaccgcatgctcctcccacttgaccagctgcccactttgtcggagacgaatagatctggctgttaagacatatcgtcactgaacaacaactcaggtctctgaagcattctctacacgagtcttgtctgtaaatacctcaagaccaaaacgttacagtttagcattggatatttactcttgtttgatttcgagaacaaaatatttgaattatatataactaaggtgtttgctcagttcacggaacagtacattgttttactcttaccattttggttcaaaacctttgaaagaaactcttcttgtaaaacgcagcttcaaaccatactcatcaaaaccactaacatagcttccccgaaggttgtccacgaaacaagtaagctgaaacctattagagagtagagactat

SEQ ID NO: 15065 - DNA, 575 bp, Arabidopsis thaliana landsberg
agaccttgaatacctctgctccttcttcttcctcttgctatctcaatttttttaccagtttgacgtacatatcttgtttggtgtggctgtgaggcacaccaggagctggtccaaagtgcttcactgcttcacgtgcgttcttaggacctctaagcagaacctgcaatcgttacggaatgctacatcaatcgctactgcaataataaaaagtgaaaatataacccttgtaaactgagtacaagtggtcctcgagatagatattctctaattttcatcgagatagccttttaaacaaaggcttacaagccactagattttgaaagttaggacagtaacctcaaattccaatcatcatgaaacgagacatagtaactgaactaagctacatacgtcacgaacaagtaaacgattagcacaagttttcacatttcgacaactgaactaagagtgaaacaagaatgggatataccgtgttctgaccaagatggggcacggaagagcgagctgatcaaagtgaggcactcttcaccagcctggtggatcctagctctagctctctcagtgaacctcaatgc

SEQ ID NO: 15066 - DNA, 495 bp, Arabidopsis thaliana landsberg
gcagtgttcgtctcgtccagcgctgtcacaaacccgatcgcaagggtaacgccttttctcaaaaaaatctcatttccgattttggatctgtagattagggttttctgaaattttgatatcatttgtaattgaattggttatcagaattcacgaaagtagctgtgcgtacggcgattggatttgtggtgatgggattcgttggattcttcgtgaagctcgttttcatcccaatcaacaacatcatcgttggatcttcttagtgtagtactttctttacgaggtaattgatctcgcattatatatctacattttggttatgttacttgacatatagtcattgattcaatagttctgttaattcctttaaagatcattttgactagaccacattcttggttcattcctcaataatttgtaatcatattggtggatatagaagtagattggttatagatcagatagtggaagacttaggatgaattcagctagtttttt

SEQ ID NO: 15067 - DNA, 500 bp, Arabidopsis thaliana landsberg
cgctgaatggtcgaaatctatatatctacccaagaaggaaccaatttcatttaagtttgaccattcttgtttgctggcatcttctagaatccatacaaaaagtctatcattactagcatataacaaattcgttacagctatcttttcgccgtagttcgctagaacttcgacggccggcctcggtaactcaacgacactaaacttttcagaccccacaacaaagcacattagcgactgatcatcattgaccctagcgaagtaatagataaccccattgctaaatattccttgagttccaggagtaagataatgattaatcgtacattcgatcattctccatttcttctgtttacatcctagagtgaaaactttatgctccttggacacaatatttcctgatctactatagtactcatccgatattcgcatgcacaagactttgtattcatccttaacatgatcgtatccaaagaagggaaatatttcttgggatattttgg

SEQ ID NO: 15068 - DNA, 710 bp, Arabidopsis thaliana landsberg
agaaatgcagtgtggatcttgttggaacgaaaaggagaaattgtaaagatgtgcggatttagttacctttgaagcagtctctttaacgtggatgcatgtgcctcacttaaccaagtagtctcaatcagaaccgttcatttacatgaccggtgacaatcggacgattcatgacgtgacgatgcaatcgcacagtctgcttgattttttcgtgcacggagcaaaagtcacgtgcggtcaaaatgtcagagcagaagctgagctgttgttaccacgtggaggtggtcggaagcatcggtacttgttccacgtggaggtttcccccaatctattttaccacacaaaggtatttaatacctcgagttacgtttttcacatatttatataatttaatttctcatatcctaaccatcaaaattccattacgtttttttttaatcataagttttgttaagacacctacggaagttgagttctttctaatctggatcggggctgataaattttttattttatttttattttaggttttgaatatgggccataattattttttagtacaattggcgggtctgtatctattatttattaatgttttggtttttttgaaaatgattgacttcttggttataacatgatacacgacatacccatattttatgcagttttattataattgttaaaacaggatttaaagcttgaattaactgatt

SEQ ID NO: 15069 - DNA, 473 bp, Arabidopsis thaliana landsberg
tgaatcgggagcggaggagtttgctaaacgagctgattcatggactaaacgcggcaaaacagcttcagggttcatcttctccatctttgactgcttcttcttcatgtttgacgacggagataaaggagactctcttacataacatagtttcttccttcaaaaaagctattttgatgctcaacggatccaccacacaacacaatccaacgatagagcttgcgcctgatcacctagctcatcctggtaaggtttcagaatctccagcatcgattatcggaagtccgagaagcgaatagtttttcgatgtgggatcgaaagaattcaacttaagttctaaaaagaggtaaaaatttgaaattgaattggccttataagggaattcaacatagatattattcaaaaaaacatattatttttttaaaaaatcgccagattcttggaattaaagatttgaccgtgatttgcaggaaaat

SEQ ID NO: 15070 - DNA, 590 bp, Arabidopsis thaliana landsberg
atctctacaagtctctacgtcttcggtcatcatctccgcaaatgcatacttaccatccttgtttagaccattcctgcaagaggtacagacaggcagagtaaaattgagagcgtagaaaacaaaacaataaaaaaacttaagtggaaaaatattcaggtaaagggatttcaggtaagaagctatgagtcattgataatagtacgaaaagttgaaaaccatttccccgttcttttttccataacattcaagagtctgttctttgagtaaaccatcaccagcctaatcaaacaggacaagccatcatctaggagctttttgggagatgaaagtgcatcacgatacaaacctttcatggaagatttgtgccacaaaggcaagattcaaagttgaagatccttcaacgatctcctctgcagtcaagtatcgcttgcagttcattctctctgcatgactgagaaccaattcagctctttcaagaggatcctttgcatctagtgtagccgggtcacagtgttcaggtgcgagaacattgagcagaaaggcatacgcttgtgcatcctgcatatttaccagcaacacgctttatcata

SEQ ID NO: 15071 - DNA, 695 bp, Arabidopsis thaliana landsberg
  unsure (1)..(695): unsure at all n locations
taatagtttattggagttgatggcctttatttgacatgtaccttcgcatgcaaacgtacactgggcctttttgagttttacattaattaacatagaaaagcatgtagctgatgaatatgaatttcagacaaaaattatggtgtgaatgatcaggcttacttgtttcccataacactgtgtagctgaatgatagtttcttcttcctcgaacgagaatcttcctctcttgatgtccggtcttagataattggtccatcgaagacggcagctttttccacatctatggagtcctttaatttgtacaatacgacttataagtgtgtgactcaataaatagagaacatatatattaatctatgagaacaaaatataaggaacggtgtgtagtttatacgtaccagcatttttggggannnnnnnnnnnnnnnnnnnnnnnnnnnnnnnnnnataatcgatgagtttctgatcctcctcagcagtccatggtcccttcttcactccatttttatcacaacagggtgatcttcccatctttgttttgtttcgcacaactttaaatttcgataatgatttggttctgttatttagatagaaaaaatcgaagagccaagtggagtttcttaattttcaaaaagaggagttggattttagaaatgtcaatggttgggatgtactcataccttctccgttcatttg

SEQ ID NO: 15072 - DNA, 711 bp, Arabidopsis thaliana landsberg
taacgtgcaagacataattcttaaaagtagatagcatttttctaaatgtctaacttttgaccaaataggcatatacgaacaatgaaattttgtaaagaatatcacaatcgagctcctttttatatcatatataataaggtttaaggcatcgagatcgttatatcgttaaaaattgataatctcttctttcggagtatataagacaataattaagcgaatgtttatgccgccgaatgctgacaactatatcttacagtggtatttttgtttttctaaatatttttatgttccctcgtacgttaaatagtggctaaacccagtaattttttttgtaatatggatgagacaaatatatgccaattgaggaaagtgtgacaaaccctttgttttctttttgtaacaaagtgacctaatacgtgcttactcaaatccaatttcaatcatctaaaccacaatttggtgcatacaatatttatatataaaaaataaatatctcgtgagagtttttctataaaaggtacacgtacactcatgtatctacttactcactcctttcagaaacccaaaccctcattccaaaaaatggggtctcgctctcaaaacctctcctttatcgtcctcctcctccttggcttagttgcagtctcctatgcttgcgactgtacccctcctaaaccatcaccagcacctcacaaaccaccaaaacatccg

SEQ ID NO: 15073 - DNA, 800 bp, Arabidopsis thaliana landsberg
  unsure (1)..(800): unsure at all n locations
tttgatttctacatttgtttacatacatgttatctatctagtcttctagttcgtagatgatgctaccaattaccaatttaatttataggagacgatttttttcctcctttaacaaagaaagaaatctaaaccaatatataatttttaattattttttttggttaaatgtgaaatttattgagaaatatttctcctttaattcttacaaagaaagaaatctggaaagaagtagaaaagctacttgtatcttaagatatgctaaaatggggtttcatttgaaagaggcacatgttcgtaaaacaatatttattataagattctcgaattttgtttgtcaaacagattatttaaaataacaattctctatttgtcgactgatgtattttaagttctcttctaacagtgtgcttgcgcaatatctttcatcacattagtgtgcttacgcaatatgtttccacgccattttcttaaagtctctgttggtgcaaaaattaacatatccaacaatacggacttaaataagaagaattgcgaataaactgatatttcaattaaatcgggctgccccaatgcaacctgctaatgggccaaaataaagagatcgtcaacagacctcgtctgaacaacgaggtcgccagacctcaacccatagtagaaacatcgctcaactgatttcttaatttgaaaaaataagatttctttntggatacagaagaatcgcagaaagaacgggaaatagaagattcaaaccccaaaaattagaagtttaacttctcccttaaccgtttaaatatatataa

SEQ ID NO: 15074 - DNA, 806 bp, Arabidopsis thaliana landsberg
catgtttccggtgccgactggacaggtctgtggtctttttcttttaatattttcttaattgatggcgttctggaactaagtcgtctatgtcctacagtcatttgggggactctctatgatgccaattcaggctatgacacagcaggttagattttatttatcatggatatacgcaagatactatgtatttctctgtttttaatttaatccttatttactttgtgtcttcaggcaactagacatgctcgcagagtctatgtcggtgggctttcccctacggcaaatgaacaggttattatccactttcttttttcattttctcccactgaaatatgtttcagcaaataatgatactaacattgatttattatcctgtatttgcagtctgtggctacattttttagtcaagttatggctgctgttggtggaaacactgctggtccaggtacgtaatcctggtgcagatgctagagtgtctattatgatacttggattaatctttttttataaatcttttttcttactcgcaggtgatgcagttgttaatgtctacataaaccacgagaagaagtttgcttttgtggagatgcgatctgttgaagaggcaagtaacgctatgtctttggatgggattatatttgaggtatgttttaatgtttaccgcactaccaaatatttggttgagttttagtactggcatttctttggtatataggttacccaactgaatgcttatctttctttttctttttttcttttccagggagctccggtgaaggtgaggagacctagtgactataacccat

SEQ ID NO: 15075 - DNA, 541 bp, Arabidopsis thaliana landsberg
tacctctcaagtttttaatggagcacatacataccgggagtgtcaatcacattgattatcggaccatcttttattgcagttctatacatcacacattccatggtaacacctcctgcttgtagttccgaagtgaacattttctgacctaggatggtgttccctgttgcgctttttccatttccagtacgccctactagaactatgtttttaactggctctgacagtattgaaaatgagaatgaaaatgttaattagcagtgtatacgaaaggcaaactcaaactcacgagtttccttgatctttgtaagtaaagaaaaagaaaaagaagaattagaataaatgacaaaataattgaccaagtaattagagttttactattagattgcttgctcgggcctaagattatgcgtaggtgtgttagtcattttattttaatgtgaaagatgttgtaagacatttatttggtttcttatttgactttctcatatatctatggctttaacggatcttggagacatagtagactaaacgattagcagac

SEQ ID NO: 15076 - DNA, 462 bp, Arabidopsis thaliana landsberg
  unsure (1)..(462): unsure at all n locations
aaaaactgcatgctctcttcatctgacacctggcttttatctcaataatccttatggttggtgaggacgaacatgtaagttttacttacatctcttttctcatttgaaccaaagctctttgtaagactttagttgcgatcaaatccggtaattagtcaaaagacttgggattgtaaattttctcaatatttatcaatgattcaatatgcttttagaattctcttaagatcgtgtttctctattcatgttattatcaggtttattggcggaaaaaaaaaacccgagaaaaataagttaaacatcacataagttatatgtatgttgctataatgtacagttaacatatctcttatctctggtttgcaagaaatcttaattttttatgtattaacgnaactagcgataattgttagaggttgagagtagcctcatgaaaaagtaaaccataacttcatgtcattt

SEQ ID NO: 15077 - DNA, 949 bp, Arabidopsis thaliana landsberg
  unsure (1)..(949): unsure at all n locations
caaaaacctatgaaaacaaaagagcataaaactcatagataagagaacttattgttatctagctaactccaataatcgtgtctatgttctccttatcgtactccttctcgttcttctacttctttttctgcgttcttcttctcctgcgtacatatatggcttataagaatagttataagaacgtaaagattcttcgtcgtctgatgtttcgtcgtggtctgattgttcataatcttctaagttcgggtaagtatcttcatagatctttgacttgagtagctttgaatcgatgacgttaatatcttctacatggtctgctaaagcgtagaatctactacaatctttctcaaagacgttgtctacaaagacgcagactctactcctattgcccgacgcttcatggtattctccaaaacctcgaatttcaacacattgaagagtattcatttcagggttatagtagaaaatatagaagggttgcttagatgtataatcagccatcgacaaaacaattcacccgtagcagtcacttcaactaccgaaacataatgagccaaaaatatatcatcccacaacacgtaggcatatttcgaccattcatttttctcctcgtcctctagaacccaaagacgcaacttaatggtatcaccatcgtaatcatcataaaaaaccaaacccaactttcctttgtaatttatcagttcacaatagcttccagggtaaagaaagctgaatgtctcatacctcacatcaaagcaaactaccacaaaagaagtcaaaacctcagacgtatcacccaagtaatacacaaccccattgatgcatataccttcactcataatttcatgtcttaaggtacgtnttaatcttctccaactcatttctccacttccaagtttcagaactttatgatgatcaggactacatgggtaagccatgatcatgaaca

SEQ ID NO: 15078 - DNA, 654 bp, Arabidopsis thaliana landsberg
aatcatagaatcgcttaagcaatcgccaatgaatcttcgattcgagaaccctaaactcacgaaacgacattgttttactgaacttcgatgcctcgtcattgccacagtattggatgactcatcgtcttaagcggttaactaacactgtttcagcatatgttgattttggctattttaatatagtctaggttgataatttgaatttttaatgagtttaggttgatatttattggatattgtagtttaggtatgaaaaaaccgccaacaaataatctaggttgattttgaccattttccctactaatagtgatatattcttttgcaaaaatcttacaaaaacatttctgaaaaagtaaaatgatcgtaacgtcgattagcttaagttaacgatgttagtattgattcgaaaatattatatggtaaaaaccttctgaatgtgattttttcttttatggataactgagagaatctcaaaccaaacttcagcctatgtggaatccaatcattgtacaaaatattagcccattagcctatgtggtgagttttcattaagatagattcatatataaattcgtctagtgagaagaagagaaggattttctccatcttatatgaaattattctaaagaaatcatttgtgcttttcagtgataa

SEQ ID NO: 15079 - DNA, 551 bp, Arabidopsis thaliana landsberg
  unsure (1)..(551): unsure at all n locations
tgatcatttagtgtatttgaaagaataacatatggattttttttacaaaaaacttgaattgttaaggtaggcaatttattagagatatataaatgcattggtagtgtttgatggttgattagttgtgtgcattaacataatatttcaattactgctaatactggttctcattctacacacactacaatcatatctgtagtagcggttcatggaactgaaagatctctgtttctactaaaacacaggttagttgcaaaatgtctaaatgaagaacacataaatacaagtttgctatggtgnnnnnnnnnnnnnnnnnnnnnnnnnnnnncgattaaacatgtagacaaataaaaacgattttatataaaggttcaattgtaggaataagaaacggaaatgagtggcttgttgaatggttacttctttgtttgcttgaattgaatagtgtaaataagcctgtgacattatagattaaaagtcagatattgctaattataaactgtatggtgggtttaacagccataattgacattctatgaagtgaacaaagc

SEQ ID NO: 15080 - DNA, 807 bp, Arabidopsis thaliana landsberg
taattattttcgtctcatttatacatagttcttttcaccacgggccaaagcgagagacgagcaacaacagaatgggaacctagaactaggcaacacaaaggatactcacaggttagtgtcactgtacatacttctttaccgtgtttatcggttcttctttagataattttgacaagtgacaagttgtgtgtaacagatacaagtgcagtggttacaccatttaacttcttttccttctctgttatttccttcagggctaatgaatcattcatcaacatggccgcaggagcaaatgaagaggtgaagaataaattcagttcttgtatttgtaccaacttaagtcgacagtaatgtttactgtctttttgtctccgtctgttcaggctagtcaccgcggtgaatcagacgacaggacttcactgcttcccagatgaaaagtttcttaaatgtaaacaggttctctccaaacttcatgatattacctttaaaaagctcccaaagatgatcatttaggttttagatagattcttaccaaagcaagctctagaagcaaacctaggtttcagaaaagatgaattacttcagtagtacctgaatgaatggagaatcatcagctttcgcttttgttgctgcaggatttttgttcggaagaattattttggccaagaatattctagaaattgggggttttccattcgtatactagcagaggaaacagtgaagcaaacttcatgacaccaactcttacttctctcaagagtcggttttaaagttcgttgaagaacctctcaagtctgaagctgtatt

SEQ ID NO: 15081 - DNA, 627 bp, Arabidopsis thaliana landsberg
  unsure (1)..(627): unsure at all n locations
tgaaattattaaaccaaaaaaacaaagagtttaggttacatgcaaattagtacaagttttactttaaaaacgtttttacaagttttactttaaaaatgtttttataagttttcactatagcaattagcaactagctagtaataagtgtttttagtttacaaagtattttacagggttctatcataaataaaagaaggataatattactaaatagccaaaaatacacaacgtaaaatagcagagagaaaggtttttgttgcaaattagtcatgaactcacattatcaaacgaggtgaaatgacaaaacaatccttcgtttgttgcaagttcaacagtaggcgagacacttgtgtgaggtttgacaaaataacatgtaacatttaaatttcacatgttatatttaactaaaagacatgatatttttaaaaaaatatcgtgttattttaagaaaaatcattgttacatagtagctttttaagaaaaaacattgttatgaaaaaaaaatctgtatgaagtctttttctaaagaattcacatgtgattttaacagaaaccgtgtatattacaaaataagaattttcaaatanaataaaattcatgtgatattactaaaagcgtttttactac

SEQ ID NO: 15082 - DNA, 544 bp, Arabidopsis thaliana landsberg
cgcttaggtcgctgacccttgcgtcaacgatgattgtacctaaaatgagaagagaggagaatttaattgagcgtattgaaactctttggtgaggaatttggaagtactttaaggcttgacggagaagagagagatgagagggaacgccttaactttgctgatttccaacgagctaaatccgtgtgctcctcttggttctctacttcgacgaccgtgacaaaaaatcagatccctttgctgattctcttccccgataaaaaccacgacaactgttgtagattgttcaaccccgaggaaaaagacagactctacaaaacgaaagattttggtgtgggatttgcaaaaagtgtttgtattgcaacctatggaaattggcttcttatgcaagattcaatgtataatctatacattttgcatctattcacccgcgagaggatcaatctgccgtctgtggagtcacaaactggcaaggtaaaggttgaaaagaccatatatgatgagtttcgcattattcaagacgaaagcgagtcggaagatatgagta

SEQ ID NO: 15083 - DNA, 736 bp, Arabidopsis thaliana landsberg
  unsure (1)..(736): unsure at all n locations
attcattcattatcacattccttttctcactctctctctctctctaaaaacagagctcaacaataatgatccactaaaaaacgttctcttttctcttcttctccggtgatttacttacttaacaatcatggcgtcgtcggagggattagcaagcgttgatccttggtcattccgtcaaaacttcaacatcgattcgtggctactctctgattccttctcacacgacagtgatatactcgctaaagctcttcacacatccatctccacttccaccgaatcatctcctctttctccttcatctttcttcgactcttcaaccgccgccgtcgatttttctcctcctcaaactctctccaacgtctctttcggctcagatccagaaatccccgccgctagtgctcttggtctcgggaaacgaaaacgtggtcctggtgtttccggtggtaaacaaacgaaacgccgatctcgagtttctaataagaaatctcaaaccacgtttataacggcggacgctgctaatttccggcagatggttcaacaagtcaccggagctaagttcctcggttcttccaacagcattttcgcaccgattgtgaagccggagccacaccgtctcgctagtagattaccaccgtcgtgcggaaacttggaccgatcttcagctgttccaacgctagatacgtcgtcgttgntgtctaaccatcaccaagagaacattatcacagatttgggagct

SEQ ID NO: 15084 - DNA, 367 bp, Arabidopsis thaliana landsberg
aaactcatacatgtatcgatgctgtgcctaagaatgcgtataagaaaactaaatgggtgctaacaagataaatatggtggagtttaacttgaaagaaccctcagttggaaagatctactgatggaggatgtattattgtggaggaatgatcttggtgattcttaatcatagagggtgtctgtaattacgcgcttgaataatacgatctcttttgttcgatcattattattaggacagaaatattgctacatgaatgaatgtgtggacgtgaagagcctgctgtttgagatgatcacaggaagaattagacatatatcgctcttatcaatatggggaggccgagaaattgagggaatggtggtggagc

SEQ ID NO: 15085 - DNA, 805 bp, Arabidopsis thaliana landsberg
aaaaaacctttcatttaaattattccaacccaagggtaaagcaaatggaaagagggcctagtgtattttattttttatcgacttagttttatttcttctctttttgactctcaatctcctcgtacaaaatgtgactcaaacttggtacataattgtaaataaatggaaaccaccccgatttttttgtagatttttcagagaatctacataaccaccatggcttgtttgtagcataagggatttatgagtaatattaattgtcttctccaatagtgaatatcaagttcccgtcggtctcgaaatctaaattacaacacaaggccactttcttctcctcgttaattaaaagactcgcgaaaacctcagaacaatctccgccaatgggtaaatcctctataaaggatttgctcctcaacaaagcagcttcttcagaaccaactttattggttacaaatatctccatctttgatgtctcaatctcttgtaacactgagagttgttcttctccaacaactgatagagccataaaaccatgatctcgagatggcggaagaccaatatgattaaatctctctgttgtaaaatcaaaactacgtaagaagtcctttttattagaaccaaaccagtaagtgtttccctttaaagacacgacacttactggtgggaagcggtcatcaaggacgtcatcaagaaccttccatgaatcagatctaacgtcatatatttcaaacctgaaacgtgcgccgttcgatgatatgtgatcgttaaaccaaccccaatacctcaagatgttgtcgttacgacg

SEQ ID NO: 15086 - DNA, 589 bp, Arabidopsis thaliana landsberg
ctttgaagaacaacaacaatacatggttgattgatttattgtattgtttttcagatctatcataaaagttttcaatctaaatgatgtttgtattttgattaaccttaaaagtctcttgattttgtatgtgtgtgagtgattcatttttgattttatgaattttgaaggtgaacattccaaagacaaagaacacttactgtaagaacaaggaatgcaaaaagcatactttgcacaaggttacccaatacaagaagggtaaagacagtcttgctgctcaaggaaagcgtcgttatgaccgtaaacaatctggttatggtggtcagactaagcctgtcttccacaaaaaggtaacattgattatcatgcattgattgttttttcagtttgaattaagtctagttagttgaaatgaggtagttttaaggaaccatttatagtagaattttggaagtgagctgtgaggaaacagacattccaatagtctcagttttggactgagatacatcttgtgaatcttgtaacaggctaagaccacgaagaagattgttttgaggcttcagtgtcaaagctgcaagcacttttcgcagcg

SEQ ID NO: 15087 - DNA, 337 bp, Arabidopsis thaliana landsberg
agttgatacatttatatatacgctcataagcaaactattagattatttttttgacacaatacataataaaagcattaatacatttaagtaatggtttataaattccttttgggactggctgatcccgtaaatacaagctgaacaaggagtatctctagaattgctcaaaaaccatggatttttatgttatccttcttcacaagcccagcctgatgattcaaaacatttgtaagatcaggatagatacaatgcttccatcttttcactacaaaaccaactttcaaaaccaataaaccgatagaaacgaaaaaaatggaatgatttaccctgaaacaaa

SEQ ID NO: 15088 - DNA, 731 bp, Arabidopsis thaliana landsberg
ttgacatattggtgttttttatctttcccaagtttctgaccacttaacaggcttggggttagtggttgcaccacttcgagattcacctgtcaatatgatgttaaagcttctcaaaaacacttacctactttcaagatctgtcaatagaatgttgaatcatctccgcaaaagcacccactcttactttcacagatcaaaaaagctagaatgggactataactaatgcacatatttgtggacacattgatttctcattatttaccgtaaaagaatggtacatctaaagcactacaatcaaccacgcaggacataaacagaaactatatatatgtacatacattgtctaccaaatttaatgaccatagtgctcattaattaaaattgagcgtacttctgtttcggaagctttctcttcaaggacacgcatggcttcatcaggttggggcactgtgaaagctggaactccaagctgaaatatgaacaatgaagatgaggcaactatggagaatattgctaagttacaatttaacagagttatagccaccttgaaaattccagccttctcaccagcaatttttccaagtgtatcacctgtgatgcattccacagataagaaaagaaattaataaaaacgaaatgtaactcaaaatatgtctgctcatttaatgcaagcatagacttcatgcgttaaagttctaatatgaacaacaaagagtagaggcatggacaat

SEQ ID NO: 15089 - DNA, 774 bp, Arabidopsis thaliana landsberg
accccaaaaacttgtgtttcatgacaaaagacttttttttccctaacttacgccatgttatctaatgctgataaatgggtttatcttcaagacaacctcggacgttggtatttggggatctaactggcacgcacaaatcaaattagtttaataaaagccaacagagaaataatttatagatgcaaatacatttcaagcatttgaatcattttcacgtttgttagatatttttttttttaaaagttagagtttagtaaaacaaaataaaaaataaagggaataattagtcgatagagtattgttatgagtttttggtagcaaacaagcaaaacaagatatattgatggagattgttttggtggtggtgctataccacctaagagcattttcattggacattacaagaagagtgtctttaacaatattaaaacattaatcaaatgtgcaggttctttaaattggagagacatcttctaaaaaatgtcttttatcaagatatttaagacattgtgtctttattttatagacacctaaagattaaaataatattttcttttttatataagtgtaggaagaccttctctttatatgcacaatgaagctgctctaaagaaaaaggtcaacgaagtgatggagactcgacatattgataaatcttgaatcactaatgaaaaaattaggtatgttcaactagtagattaaatacttgtcgtagcatgcgagtactacaatgcttcactgtgtaagcttagctcacaatccatgtacaccctt

SEQ ID NO: 15090 - DNA, 534 bp, Arabidopsis thaliana landsberg
tatactgcgatctcgtgagtagcataagcaagagtgtaacaaatttgtcttttatttcgtaggagtctttgcttgcactaaacaaggtaagggaagaagtggatacagaaaaaaaccgctcgaagcaagagaaagacatggaaatatgcattcgagcgaagaacaacacatgggtcatcgcgcgtctaaacagaggtaaagagctttacatggctttagagaaagcaagtgaaactcttcttgatgctacagactctgtccaaagattcagcaacaggtaaaactttttagttactactactactaaagtactaacccatgaattagggtttccaaacaaaataaatgaaatgatgttgccaatttcttcaggtactgcagcggggcattctccatggattagattctgcaattgtttgttttgatagaagttgcaaaggaaagtgtttttgaagtgttttgagatatgttttagattttcaattataagatataaaagaaaccgttacaaagaaagagaatttggtgactttt

SEQ ID NO: 15091 - DNA, 816 bp, Arabidopsis thaliana landsberg
ctgggtaaccgtctaggccaagggctttgttttttggcatagagaagagagattgaatgatctccttctcagagggaatagcgaccaactgctgctttaaagcatcatcacagcgaaacggatgaagtccgttaattctatccacagaatagggggtagtgtgatttccatcggagcccaatagatcagaataataataatcaacaatcatacctttcactttatccacattatcaacccgaactccatcctctcctttgagaaacttgataaggtttttggcgtgatgagcaataaccactctgtgaaaaaacctcgtgttagcgtcgccttctttgagccatttaatcctcgacttttgtttatagaaggactctaaagccgcagcaaaaaatttccacttctttcgagcaacatgctcttctctgaaaagagaatctgagggtgtaagcaacagctgagactgaatgtcttccacgaaagccaaactctcactagttctccgttgaatattgctaaacctcttcctattaagctccctgcacgccttcttagctgcttttaagtgttcacccaaggaaacataaaagaaccaaccgctatcttagactcccaagcagctaacatagaagaaagaaactccggatgcgatgaacggaaggaaaaatacttgaagcttttcttttttgatggggaaggctgagagttcatcattaccatacaaggagcatgattggaatccccatgaggataaaaaattgcagaagtattaggaaaaagcgacaaccattattatcaacgatggccctgtcaagc

SEQ ID NO: 15092 - DNA, 203 bp, Arabidopsis thaliana landsberg
tttttttagatggcttctcggcggcgtagttacccggtgggtcgtagttacaagtgatgaaattttcggcaccgttctcacacaccacacgggcgcattctagccttttggggggccgccacaccatctgagtgtagtgaccacacattccacttccgtcacacgagttggtgttgtggttgtatgacctttcttcaacgatt

SEQ ID NO: 15093 - DNA, 428 bp, Arabidopsis thaliana landsberg
gctcttatatgctacttccgggatgcagaatcattgattgctctctcagtctccaatgtagtttggagttgtgtcaagattccaacagggggaagtgttgagtaagtgtgatctccatgctctgcctcctctgtaggataatcattttctaacccagccacttcaacatccgttttctttgtactttcatcctcaacctgatcatctgatttttctgctccttccgcttgtgattcttttggttttgtttctcctaccttctcttctgtttctgcagaaacatgtcgttcctcttgtgtgttagctgcataatcgccttcttgtggagtcactggttcgtcttccccagaagcaagcatggaaactggagcttcaatgaatgattcttttggaacggtttccgtagaaaagatatcttcagcttgtac

SEQ ID NO: 15094 - DNA, 620 bp, Arabidopsis thaliana landsberg
gacacagacttcttcagcgtaagtagtgtacaatatcacatcaacaacattcggttactatacttattttcaatattaaattgcagaaaacatttggagttaggtccatacaagggaacgaagaagaacttatggcagctttgtatcttcaagtgagcatcataagtcaagcacttatctttgtaaccagatcaaggagctggtcatttgttgaacgacctgggtttttgctcctaatagcctttgttatagcacaattggttagtagactctctttgtaccataatactatccattttcattcattaccgtctgatacatgtgtcgtttttatgcaacaaacaaggtggctacattgatcgctgtgtatgcaaactggggattcgcaagaatcgtcggttgtggatggggatgggctggagttatatgggtatacagtatcattacctacattcctcttgatattctcaagttcatcatccgttacgctctcactggcaaggcttgggataacatgatcaaccagaaagtgagcatatttcggaaacaaaactttaccttaaatccatgttagttgtgagcttcatagctctttaatcttttgcagactgcgttacaac

SEQ ID NO: 15095 - DNA, 452 bp, Arabidopsis thaliana landsberg
aaaaacgaaattgtaagggaaaaaatgtcgtttgatacacgaaattacagaaactggttttttgttacgtgaattttgtatattgcagttaatttatgtataattgagtgaccaaacatttatattacgtaaaaatcgttgaccaagttaaaatctatacgatgttatttcaccacaatcgaaatgggaaaaaatgtcgtttgattcttcaactttcaaattgtggatattttatacatcaaattcacatgtgatcattttatacatgaactaaacgttgatcagctgttttaaatataagaatatgtgaccagactaaaaagacatatcgctgtctaggcctagatattcagatttcggtttggattttgttcggatttaatcagattcagataattcatgtaggagagggtattatccatttggattttataattattcagttttgatag

SEQ ID NO: 15096 - DNA, 729 bp, Arabidopsis thaliana landsberg
cttttcagttttcctaaaatctttgtatagcggacttcggtttagtcataagaaaactttttgaaatttgaatatacaaattgtttaggaaaaaacaagagttggaaaaatacatataaacattgtcattcaagttgaagtgtcatctccaaggtcttaaactcaagattgggattgtgatgatgtttctccagtataattttcaacactctgagacaaaagatatttgagcataagttagtgagacaagcggtaaaaaagaagtagtaagatcaaatgaaactgaaaagaaactattgcaaaaatgagagttgtggactgcttataatgccacagctattgcataaccaaccacaagatgcaaatgtaaatacactctattcgggtggttgagagattggaaaccactgacctcatgagaagtagtaatccatggaggtggaggccaaaacaacttggcatattcagggagtttgtttaccagctctgttttcccactcctgaaatcaaacactcccaagtttcgatcatccatcaccaccaaggattcctcatgcgtgtagaagaacacgaagcttccagttcccacgcagcgaggtataatatcagcagttgaagcggaaaaggtggagtcatcaccaaggaaaaacatcttatccccaagatcctcaacctcaacccatctcttctctctttccactaatttaaagaatttgaatctgtaactga

SEQ ID NO: 15097 - DNA, 995 bp, Arabidopsis thaliana landsberg
tacatagtttttggacgacaaaagtcaagttttagcttggtgttgttgttgaaatgttacccaaatttgtttttcttagtcgggggttgactctaattaaacaccttcttctttagttcaatataattcgcaatccaccgttgttattcgattgattaagttaagaaaaatatctttgacttttgacttggggttacaagaaaatcttacactttcaggagttttgtttttgaaaagatttcaaaatcttgggttatttaatatatattatatcatacaaaactcccaaaactttctttttattttttgtgcaaaacaaaactcccaaatctaaacataggaaaaattctatggatgagtgtccgcattccaaacagtgttttatatcttcttttgagtattgcttgtcgtacgtactattcaactatcgttttcgtaagttttttatgacaaacatagtacatatttaaaggaaacgaatcattcccaaaaatttgaagcaaactgaacacaatcaattagggctacaatcaatcatacagagtgaaaaaatcatatcgaatttggtttattcatttattggttttaagttactagtacatgagagttaatgacatttaatatacccctccatttttatctatttgatgttttagacgaaaaattcttttaaaatagatgatgttttccactttcaatgcaaaaagtaaattttttcttggttttgaatatttttataatgcagattgttttactattggttgaattgtgtttaggtagatgataaataatgttttagtttataaataaacaaaaattaaataattttctaatcaatatgcaaaaaactttaaatattaaatcaaatatacacaaatggagggagaccaaagctgaaagagttactcctctttggcagcttggtttatgaatgtgacccaaatttgttacattttagtcaatttttattcaaattatgtgagaacaacatatta

SEQ ID NO: 15098 - DNA, 527 bp, Arabidopsis thaliana landsberg
tcacggagatgataccggaaaagtataagactaggattggaggatagccttcattgcaatttggtgcacacaatggagctatttgtgaagtgatcctaagttttagtgttacatttttggttttactaattatcctaagaggtcctcgaaaactgctcgcgaaaacgttcttgctcgcactcgctaccgtatcggtgtttgtcgtaggttctaaattcactagaccattcatgaatcctgccattgtaagttcatactcgtcctactcaagaattgttaattcatttttattacattttgaaatgaatcttgatatatagtcttgtggtatatattgtgatgcaggcgtttgggtgggcatatatctacaagtctcacaacacatgggaccatttttatgtgtattggatcagctcctacaccggagctattttatctgcgatgctctttagaattatatttccggctccacctctggttcagaaaaaacagaagatagcttgagaaaaaaatggaaaatctaagta

SEQ ID NO: 15099 - DNA, 508 bp, Arabidopsis thaliana landsberg
caaaatgattattcagaccgattaactcaaacgctatgcactatataagaatggtcctgtgaatcctctggggcgcttcattttgtaggggagtgtcaggacagcccttgtgccttacaattcctctttctttgcaatagtcatcaaagctcttgttgcagtattccagaccattgtcagtccttaagacttttaaccttttcccactttgattttcaactaatgctagccactcaacaaatttcgtgtaggcttcatcttttgtcttcaggaaataaatccacacctttcttgagaagtcatctacaaaggagatgtaatattgacacttactcaagcttagagtaacatttggagatccccacagatctgagtgaacatactctagaatctccttagaggtatgttttcctgtcttgtagggagtcttatgagattttccaagaatgcagtactcacagttcttcatttctgataggtctcgtccttgagtaacttacttttgaac

SEQ ID NO: 15100 - DNA, 676 bp, Arabidopsis thaliana landsberg
ctcaagtaaatgtgttgttagtagaaactacctttagggtccataacttaataaattcctttctctgaacttcagggtccggtaaagttgacaaaatcgtgacttcatcagcagagtaaaatctttctgcaaatgctaagatatcatgtttaatcttcctttccttgtcttcaacatcgataccaacctacagtcgttgtaaactgcaactgttcaaatttaaaaacaagaaaccactaattttggaagaaaaactggaggcatttgcttgaatagaagacttaccggaacgtgtacagtcaccccacaggcaattaatgaatctgtgtgagaaatgttgaaatgcaatggtggattattacagttcgtataattctgccaatctacctgtaaaaatttaaacaaaaacaaatgaaattttgcccctaagccgagactaagagttagtctagtataatcccacaaaactgtctcacctcaggcttcccatacatattcttcttgaacatcaaggccttaggatcgactgcattgtttgtctgatctagtaataaaaccaccattacaattaatactatccaaactcgtttaaatctagagtttctataagagaagttcaatctgcaggtaatcaccagatgtaaaaacagtaagcttcacagattcttgatgactg

SEQ ID NO: 15101 - DNA, 1014 bp, Arabidopsis thaliana landsberg
aacatgaggctaatcaatttttctttacacaaatcttggtttactttctcaaataaaagattttacaaaattaagtatgacggatcaaatacgcaaatagttatgtcaataccacataaatcatactagttgtattttaaaaagatttgtaattgtagctataaaaattagtcttaaaatatatatttaagatctatgattattaatttataaatattattgggactataattttatatagggatttttaaaaaattataatcttattatcttatcaattttggttagcttttacattggcctgacttggaaccggtaaaatttattaatttatcgtgtttattaatttatcgagtattaatttatagagttgctactgtccaattttttgcgagacaacttttgtttcacaaaatctttattgaattagtaaagattagacattttaatattggtggtattaaaaataataaaccggtgatttaactttaatttaagcttagattaatgatatttaatttttttattaatattgatttaaactcgtccgtcatataaaccattaagcaatataactcgttacttaatatatatttaaaaagttttttttaaaaattaacttcatgatcgattatccaatttggaggaaaataatttacaaaaatagttttaattattataatataaaatatcgaactaaataatctatcttagtattacataaacgagaaataaggaaatccgtagacatatacagatatgttgtcgcattatgctaccacatataatatgttattgcattatacttaaaacttaattagtaataaaaaatttgtgaataaaatatttgattgtgtgataactaataaaaattcgtataataaacgtaactataataagttataacctcttattaattgtataattaaaccctataattaaaatatataaatatctttaataaacagtctacaataaaatccatacgactaataaacaaaatttaattgagac

SEQ ID NO: 15102 - DNA, 630 bp, Arabidopsis thaliana landsberg
tcaggaaaattctatctggttgattgtggatttgcaaatcgtctcaatttcttagctccatttcgcggagttagatatcatcttcaggaatttgctggtcaaaggcgcgatcctgaaactccacatgagttattcaatcttcgtcatgtttctttgagaaacgtaatagaaaggatatttggaatctttaaatctcggtttgctatttttaaatctgctcctcctttttcttacaagaaacaagctggattagtcttaacatgtgcagcgttgcataactttcttcgtaaagaatgtcgatcagatgaagccgacttccctgatgaagtgggaaatgaaggtgacgtagttaacaatgaaggtaatgcaatgaacaccaatgaaattgataatgaggaacctctcgaggcacaaaaacaagacagagaaaacacaaatatgtggagaaaatctatggctgaagacatgtggaaagatgccacacatttggaaattcattgatagatgattttttttagttttccagttttcatttaataaaaatttggttgcaataacgaaacattgtttcttgttcaatcacacaccatgctctttgcttctacgtcccttttcacacaccatactcat

SEQ ID NO: 15103 - DNA, 692 bp, Arabidopsis thaliana landsberg
ctcagacagttattatgagtcctcatgctctcatattgcttgtctggtgctccgttgtattcattcctttgggttttagttgttctacccacatttgcttgtcgatcgcttcacaatcaccgccatgtccaaaggaatgctcatttagagttcgagcacaagttgccgatccctctatcctagctagatccttattttgcatcagtaagtttatgggacaagagcagtgattgttgttattggaaaggtgtcaagtgcgatgctaagtctggcaaggtgatttcactttaccttaattacgtctttctcaacaactccttgaaaccaaatagtggtctttttaaactccaacatcttcaaaaattaaccatttcttcttgctatctctatggggagattccttcttcattcggaaacctttcccatctcacaaaacttaaccttctcaataataggttagtaggtcaagttccatattcatttggaaacttaacccatcttaggcacctagaccttagtgaaaacaacttaagtgggagaaccagttcaagggacatatagagtttgggaatacaacttcatcgcctaggcttattggtatacaccttggcgataacaaatttgatggctcagtccctgaatctatatctaaattttcgaagctcaaaatgttcagtcttacaaacaacaat

SEQ ID NO: 15104 - DNA, 773 bp, Arabidopsis thaliana landsberg
tacaaccctaatcatttgaaatcttaaaggtatcatggaaaggagatgctgggattatgactttacggaaaacggattttaatttggggcaatgccattggcattcaccttctgagcataccgttaacggaactaggtttgttgttttcatttttaatgagcattttcaactatagacccatattaagtggtatttacacgatatttggcattattacaggtacgacctagagcttcacatggttcacacgagtgcacgaggcagaactgcggttatcggagttctttacaaattaggcgaacctaatgaattcctcaccaaggtatcatatttagattattgttaaacattgtatttatagagtttgttattattgatttgttattttcaaatttataaaaaaaatgcagctactaaatggaataaaagcagtgggaaataaagagataaatctagggatgattgatccacgagagattaggtttcaaacaagaaaattctatagatacattggctctctcactgttcctccttgcactgaaggcgtcatttggactgtcgtcaaaagggtatttatatttttgtttcgtttttatagtaattttcttctttatgcattacatattcatttttttcaatattcaaattgcaaaacacatcagtaattttttttacgtcggtatatgtaggtgaacacaatatcaatggagcaaattacagctcttaggcaagccgttgacgatgtaagtagtcgaaatttgctaatgtagtt

SEQ ID NO: 15105 - DNA, 888 bp, Arabidopsis thaliana landsberg
  unsure (1)..(888): unsure at all n locations
tgggagcatgcatcgttgagagtatagtattagaaacaaacctggttcataacatcttttatcatgtcagttgctatatcaatctgcatcttatctccagatatacggacagtcctctccttcaatccatcaccttctgcatgttgtggtattaactacacaacaaattttaaaatcagttgtcacatagaatgagacaaggtaaacacgtttcctaaaatttaaatactttcagtcagtttctatttttaacatcatacacaagtaaccacctgaatacgtgctcctgaccttgtctgcatattcttgattgtctcgccacctcggccaataatcagaccaacctgtcagttgaagctgaattagatatgattaaattgttgctggaaagaataaactagggaataccttatcatttggaactttaatctctatctgttctgggatccctatcgcatgagtggaaggatggcccctagcaactagggcaggtgaacctcctgcttcagcctaatgtagtacgagaagaaattcttgtaaccaaatatcttacagatacaaagatgccaaaactactgaaaaaaacaactgttaacctctgctatgactgcactgataagcttctcagcactttcaatgcatgcaacacttccaattatctccactggtcttaacgctgannnnnnnnnnnnnnnnnnnnccctcaaaatttggattatggcaccagagttaaactgagataccgtatagtctccccacctttaccaatcaacacacctacctgcaaagcattgtgataagcacgtcagtgaaagtattccgaaagaaaaaaactcacagaacagccaaaaatgaaaaccaaatcatatcaccttttgacttgggaca

SEQ ID NO: 15106 - DNA, 805 bp, Arabidopsis thaliana landsberg
aacctgaccccaagcaatctgccaaatcctatctccttccttcatccttcctttattttctgtataagctaactcgtaccagattgagctagaagaagtgttaccaaacctgtgtagtgtcattcttgacgcctctacgtgtaacggagaaagcttaaggttcttctccagctcatctattagagctcttccaccagcgtggatacagaaatgctcaaaggcaagcttgaaatctggtgtataattccttaactctggcttgaaatacttcttcttgacaaaagtaataaagaaggctagcttctcttttaatggaagtacaagaggacccaaagttgcgatatttatcttaagagtccttgcagccaccataggtagattctttgtcaaggtaactccaattataccatcttcatcctcttcttgtgtcgcacattcgaacgacctatcatctgatccggtatggatccgtacggtgtgaacaagctcgtatttggcgcggttacggtctctagatctgtttgaaagcagaaccgcagcaccaccaacgcggaacaaacagtttgtgactagcattgatttgtttttccccaagtataagttctgagtgatgttctctgtgcttactacaatagcataagtgttcctatgaacttgtagtaatcccttagcgacatcaacagctataactccggcactgcaacccatccctccaagattcaaactcttgatgtcgtctctgagtttgtacatgttcacaatcatgaaggcgagtgatggagttggattaaacgtgctagaattc

SEQ ID NO: 15107 - DNA, 601 bp, Arabidopsis thaliana landsberg
ttgcacacttactgatgtatgttgcattcaaattcttttcctcttctgcttaataatgttaattataagccatacctataatgctgataacaacaaaaagagacagaacaaagtaacatagtattgttattacgtgtttctcctttggatacaagactccagtttacaactcttggctctacagcactcaaaagctctaaaaagaagattccatttgccagattcttgtcctaatagagtaaccatcaaaactgttaggtttaatgaagatggattagggttagtttacatggtttgactcttttctttaccttgaagctcacagcttgagaggttcgaccacttttcttgactttcctatttgcccagtttagaatatctgcctctgtgatatctttaccttggcagtgagacctcaagttgttcaggatttggagcattgtgtatctcatcaactgccacaaaaaagctgcagatagaaacagattgtcatcaaatttgaactgaaactaccacattaaacacactttcttttgcaagaggctcaccgagaagtagcttcttgtttccttgcataatgtcatgaccagctacattgaca

SEQ ID NO: 15108 - DNA, 137 bp, Arabidopsis thaliana landsberg
  unsure (1)..(137): unsure at all n locations
ccactcactccatggacagncatcatcccagtgcaccttattgcgcgactcacaaccataggggggtgcagtgtctgatttgtcagccataacctcatccgtatcaattacctcatactcctcggcatatgggaagg

SEQ ID NO: 15109 - DNA, 733 bp, Arabidopsis thaliana landsberg
  unsure (1)..(733): unsure at all n locations
gacctggagcctccctgcaaatgaaagctgtcttgcagtccaagagctaaatttgaaattaaggccatcaaggagcgagtgatgatcctgcttcctcattttctaagccatcaaaggaacacctaagtacctgacatgcagagaaccctgcttcaaaccaaaccgatcagccagttccatagttctagaagagttgcctccatcaatcaacaaagctgttttctctctatttataccgaaaccagaccctgctttgaaatcgtccagaatagccatgatcccagcaattgaagattcggctccatcaaagaaaaccaacacatcgtcagcgaaactcaaatgcgttataagaggagcaacacaccttggatgaagctggaacaaaccatttactacacccttatcatgcgatttagacataatatccatagccaagacaaagagatgagaagacatcagatcaccttgtcttatgcccttttttccattgaaaaaaccaatgagctctccattaaaagcgacgttgtaagaaggtgtggagatacaaacctttatccaagacacaaagatagaaggcaaatccaaagcaactaggatgtttagtaagaactcccaattaacattatcataagctttcgaaagatcgatttgtaaagaatcccttgaagtttctccttcaataannnattatccaccaattcaaaggccaagaggacattctcgcaaagtaacc

SEQ ID NO: 15110 - DNA, 966 bp, Arabidopsis thaliana landsberg
agtaaatttctgttatctgatgttgcatattacttttttatttatttttgtgacagtgttgcatattactattatctcgcaagtcacacttgaccaaagaaaaaattatctcacaagtcaaaaacggatccgatcggcttataatattggtcgaaacacgaacggaccaagccggacaggttggatcttaaattatcaaaaacgatgcggacaaagcacaatttgtttttatttcaaggctctttagttctcatttgtcgtcacaagatttcaaagaaaaaaaatacatcttgtttaaaaggtgtttcattgaatgtgtgtacatccgaaagtcgctcattggtaaggttggtgcagcttgatgaatgattcggactttgaccaagaaagagttggctccatgtatgagtatctatttgtcgattgttgttcagtgttgacgggccgtatgtttttgttaatgaactgtcgcattatgttgttatcttttacttgatgggctttatacttttgaatgaacatattcatatggtctgaacacaaataattacttttctaccctagatatagttactgatttattcatctttttcattttgataacatcacggcaattttttcctcagtttctctatttttattttggggaaatttatgttagagtgtagagatattactttttcatttttgggatatttaaaagggagaatttttttttactgtaagttaagattttttttttctgtgtggcctaatcaaatgacaacatggaaatgcttcacattcaaagattcaatgtatgaccttctttaggaaaatacaaatttcaggactcccattgaccaaaggtttgtgcacacttccaatagtcaaacatgacaagacagtcatgcaaaaaatatggtaatacttggccaaaaatgttacttttagatatattctccatttgttgtttgacaatcaaag

SEQ ID NO: 15111 - DNA, 659 bp, Arabidopsis thaliana landsberg
cttttcttataccatcatgtgacttgtgttatttgatggaatttgcttttatgaggggggctcacattcacatatacgggtcaggcaatttacttattcttctagtcatttcagcagtgtttgtcttatatcatttattacacatcgatgcagatatttcagttttttggtcaagttctttgtgaaaaattgtttcctggatttaccattcatcatgatatggactctaacattgtttgaaaagtgcatcacttggtggattataacccatagattatatgtggataactatataccaaagaagaaagatttaaattttgcaaccgacattacaagtcacacatgctaaaacaatatactatttttcaattacatgaacaggagttactatagatgcacgactcagaagtgcaacgtgaagaagagagtggagagatcttaccaagacccaacggtcgtcatcacaacctacgagagtcaacacaaccatccgatcccgaccaatcgtcggacagcaatgttctctggaaccaccgcatcggattataacccatcatcgtctccaatattctccgacctcatcatcaatactccaagaagcttctcaaatgatgatctcttccgtgtgccatacgctagtgtgaacgtgaaccctagtt

SEQ ID NO: 15112 - DNA, 955 bp, Arabidopsis thaliana landsberg
  unsure (1)..(955): unsure at all n locations
ccgaaccatattgcttctcgcggaaccattactcttgaaatcatcatcttcgatctcttttattacattcttagaccttgaagatgtaaacacgtcgtgagatgtcctaacaatagtctcgagagcaccgttacaaaccgaaacaagaacgtccttgacactatcctgatgtttcggattcgtcaagccttcaaagatttgatcataagtattgatatccatcgtcttgtcaagatacacaccaattgcagtgctggtgaatctctcactacagatcagctaaaagctctctacacttgtcatcaccaagcaaagtcacccatctaggtgtctcagaagaatcagaaccctgacatttcacaccactctctaccttaccagagtaaaatccaagaacaagattcttagcaaagctaccaacaacaactgaaacaaaaccagttccagcctctgagaaaaccttatcaatcactctatcaacaacactcgagtctgatgatttctcaattcctgaatcaccaatagacgattcggatttgtacccacgaaagggcaccaatagtcacagcctgagaaaccctagaaagcgaatccgtaaactcattcgaagttgtgatcttcgcgatctgcttcaagctgttagggatttcatctgaatctgaattgagaaaatccttcacgtctcgtgataccatacttaaggtctcagctgaatcagagatcaattcagctacagagacaatggctccgaaaagcttaaaaagacgcttcctttttctggcaacagatggcaaatgataaaccttgtaagctccatagccagaaactccagagatcgccatanaaatcagccatttccttcttctctgagataaaatataccctttttctaatcgaagaagtccatcaaccacacaataattgatcgaatttacaaaccccaatgcaaaataca

SEQ ID NO: 15113 - DNA, 201 bp, Arabidopsis thaliana landsberg
attagaaatcccgagtggtgttaacttacatgcggtgtctagaagaggcggggctcaggaacaaacttcacaaccccaattctcgagaactggattaccggaaggtgtatcttctcgtaacactcaacatggaagtgatgctcaacctgtagtaaatagggtccagtctgagcttgctacctcaattgctgcttcggctgc

SEQ ID NO: 15114 - DNA, 643 bp, Arabidopsis thaliana landsberg
cccctccaagctggtgcgtggagatcaagaatgcccagcttgctgcgaaatagctcatatgcttgtcgtcctaacggtttcgtaaaaatgtcggctagctgttgagttgtggaaacatgatgtggagacatggttcctttttgtatttcacacgaacaacatgacagtcattctcgatgtgcttggtacgttcatgaaagactggattagtacttatgtagatcgctgctttgctatcacagaaaatgttcatcggttgatcatgacgaacacccattgatagaagtaccttctttatccataatagttcatctcgaagatgagatattgctctgtattcagcctccgcggattacttgctcaccgtgtcttgtttcttcgtcttccatgatattggagattgtcccaactgaacaaaataccccgtcactgaacgacgagtaataggacagctcgaccagtcggaatcacaccacccattaaccttaaaatcattggcagaactcaagaggattccttgaccagcggtacctttaatgtagcgaacaacatgcatagctgtgtgccaatgatcttcaacgcgctgttgcataaactgcgccagagtatgaacacaaaaagctaaatcaggtcgagtggttgc

SEQ ID NO: 15115 - DNA, 495 bp, Arabidopsis thaliana landsberg
  unsure (1)..(495): unsure at all n locations
cgacaacgttagcagctgagttgatgacgggcaaagtgaatgtgattctctctggtggcggtttatgagagtcggttaggaatgtgacccaatcgtccttcacctcaagtgctgggtggttcgggaagagtgaggctacatgtccatctgagcccatcccaagcaagatcagatcaaacctgggactgtcactgttgtctgacgcagccacggttcgtgatctcaccatctgtctgatggcgaattcatactctgttgcagcttcctccgctgaaactgtgtcgttaatggaacatatatgtctcggaaacacatttacctgaaaataacaaataaaaatcaaagtccacattataacaagacaaaatacacagctgtattgaccaacaccatgattggataagtttccagatcgttcatttgttntcttcacaaacaagcaaagattgtggcaaaaaaagtcaatagattgcacaatcaagaaaacaagacaac

SEQ ID NO: 15116 - DNA, 776 bp, Arabidopsis thaliana landsberg
acagcgaaaattgagaactcgaatgagttaaagggtagtaccatcttcagcttcaggtgatcacttgagcgaagcagcataagcaacagaagcagccatgaggagagaagtaacagatgaaacaagggtccaaaagctcttcttcttgtgtgcatcttccacagaatgcttcattttcgccagttccttcttcatttcctcgaccatgctttctttgtttttgaacgctttcttgatcgcttctagctgcacagagtaggaatccattccttttccacgcttcttctcgtcttttttgttttctattccacatactagagaggacacactcttcagcattgttagactttgttttgcattggttcccgcagattctagctctgttttcaaaacacccgtagctcttttcagctctacgatatccttttgaaggatagccttttcgtttctcaatgactcagattgattctccagttctttcttctctttaatcaatctccctcgctcacccttaatcttctcaagctctttaccagtagcttcattcgttttctctaatgctacaactttttccttaagagccaccatgtttctcttctccccatcaagagcctttccagcattgtctctctcgacctccaccagcgccagagcatccttaagctggctaacattgcagttaagcttctcaccagtcttgatttgatcattataatcctttcgcagctgcgccacagcatgcttttgctcacccgccagtttactcagctcaacta

SEQ ID NO: 15117 - DNA, 514 bp, Arabidopsis thaliana landsberg
ttacttgaaaacgtgtagccacttcagattctccttgtcttccttgttcatttgatgggtgtattctccagccgtgtgcggagctggatatattcaattgatttattaaaataacctttactcatagctacaaatttatgatgttactaaaatcatatatttcttagttgaagtgcttacggtaaaaggaatggtatcttatgataaactgtccagccgacggcaaggtacttccgttttctttagccacctgaaaaaaaatattaattaacatcaactttatcctttacaaaactcaagattgattaaacttttctgaaaaaacattactctaaactgtaaaaataatcaagtaattaccaggtacatgtagtcgtcatggccccaagacatcatgacattgtttaatccacacccttcagagtaaatcccatttttagtgttgtaggtttcgttgagaaatctgggtttttcacacagtactgtggataagagaaacgatatgttagttaat

SEQ ID NO: 15118 - DNA, 369 bp, Arabidopsis thaliana landsberg
aaaaacagagtatataattggtcataatgttttattcactttattttttattattgcattatattttcatgagcacgtgtttctttaactaaaaatatacacatatttcttattgtagatgaagtgaaaagaacaatatttgggttcacatctatgggtgaatccttttaatcaccccctaaaataaaaaaggtgtcatatttctatttttagagaaagatatagagcaccattggagtggttttgctccaaatatagagtttagagaaatatataatacaccattggagatgctctaaaatgaatttatttatttatttagatggaagattctaattggttagaaaaagagcctgtccctctaggata

SEQ ID NO: 15119 - DNA, 605 bp, Arabidopsis thaliana landsberg
aatccctcaatcgtcacactactcacattaagcgatgcagccaatacttttcggttaagcatccgcaaagccgagtcctgggcgggtgaagaactgcggctcgttattcttagctgaagtagtaaacccaacgaacactaacgagtcattgttgaaagacatttgagccattggatgtaaccgtggaactgcgaaaatatctccttcctctactttaaacctcacgttcttacactctgatgatgtgtttgatgatatcgaagacctaagaaccctaaccattcctgctcctttcaatacaatcgaaatctcgcaagcccatggattccagtgcggtcccatcatcgatccttgagtgagattcaccatggaaactccaaccattgagccttttaaaactttcagatccttcctgttaatcgttatagtacgaccgtaggggctctcgaaatccggatcatattcgaaaacattgaatgtcttcgctttcttcaccttgtccatcatctctttcttcttcttgagatccaccaagtctgcacttccagcagagagctttagtaatcgcgtgtggagcagccaagtgttggccacacctggagtgc

SEQ ID NO: 15120 - DNA, 692 bp, Arabidopsis thaliana landsberg
tgttgttgctccacctgcagcttttcaagtctctgaggtatctcattctcctatcacttctcctgagataatgtatgttcagagtggaccaaacaaaggtcgacctatgtgttcattttgcaacagagttggtcatatagctgaaagatgctataagaagcatggttttccaccaggtttcactcctaaagggaagtcctctgataaacctccaaaacctcatgcagtggcagctcatgttactctttctccggataagatgacaggacaacttgagactcttgctggtaacttctcccctgatcagatacagaatttgattgccttgttcagttctcagttgcagccacagattgtttctcttcagactgcttcttctcagcatgaagcaagttcttctcagtctgctgctccttctggtatcttattctctccttgcacatattgctttattggcatcttggccgtttcacataactctttgtccagtgacactcgggttattgactctggggctacacatcatgtgtaccatgacagaaaattgcttcagactttagatacttctatcgagagcttagagaatcttccaacaggtccacatgtcacaatcagtggagcgggaacagttctgataaacaaagacattattctctagaatgtctagtttattcctgaattcagatggaact

SEQ ID NO: 15121 - DNA, 585 bp, Arabidopsis thaliana landsberg
tgagaaaaaagatgaagttttgtctcttttcttctcttgataactataacgatagcatctgcatccatccaggagtccagccaagatgcaaaccagcaccaacaagactcatccccaatgctaaaccaaccgcgtactttgctccattcggtttaccccttttgcttcttctctttctcccctcttttcttgctttgccattgctccaacaagggatggaaacccctggatcgtcgttgttcttattgtcaatctccttgttcttgatttggaggtaaagtgcttctagctgaagcagttgtaaccattgcttatacccaaaaagctctgcggcttgcttcaacaatatcttcaccaagtgctctttctctgcataagcttctttagccatattctccgcttccctagcccgcgtttgcgaacgcctcagtgcttctagaagctcggatttgcttaaatcagactcagatgaagcctcgggtctgttcttgcagctgcttcctttgcttgtacctttgatggtttggtcagagacagagtggtctctcaatccattagaatcaaaaccacgtggactaccataat

SEQ ID NO: 15122 - DNA, 749 bp, Arabidopsis thaliana landsberg
agagagagagagagagagagagagctagctgtaatggagatttgtttggattttgtgaggtgaaagatgatgtacggatgcaacaaacgcctgaactccaagttttgttttaatttagaattaatagtggaaaggcaaaacaattatttgtgagagaaggaagtgccttaatccataacagcacctccattgcacatgaatgagagggtcttcccccacatttaaaatataatgtatgtaaagaatacagatcaattatatcaaaaccacaattttgtttacagtatggtaaaagtaggcattttctctagggtttatataaatgagtactttctatctttgtaaaagactaattggcattttcttcttccttctttaagaacttgtttaaaatgacggtgtgatgattgagctcctgcgaggacaacgattttgacgacggtgagaagcaacaacggtgactcatgaatcatgtctcgtgatgaaaaagacgacacaatctcgacttccgattagtgttggcgacgatggtgagtttcagcgatgatggtgagttgagcgacagtgagaagcgagggtggtagcttgggttctcgagatcctctgttattagttggtgacaatgatgatgaactccgttgaccaatacggatcaaatttggattagatttagtgatgaactagagattaattcattcgaaccgcgtttcagattagaaaccaacgcttctatcgatcgcattccctta

SEQ ID NO: 15123 - DNA, 767 bp, Arabidopsis thaliana landsberg
  unsure (1)..(767): unsure at all n locations
aggaagaagaataacagcttcatcgtctccattttttctatccaaacaatggttagttgcttactgcaagggtacaaaagtagcttacaaaaacacttttgaactcaattggacaattccttctataccatttatgctaagcgttggcttctatactccattgtccaatggataatctaccaaacgagttacaaatcttccatcgatttcgtcattaagcgtcagcgaaaaactatccaacttatggttgcaacttctcagcctcaacacttgagcaacaaatctcactaaatgctcttcctcctgatcatcactaaaagaaacattcagcctttaaagattcacatctcaattgtccatcatccttttataaaaagaagagacacaataatcgatgtcaaaaagataaagatgagtttgatttttttgctttccatttaattttctgaagtgcaaatgttaaaacggatcacttggcacggaatatttatatccaaccgcaccatattgtctatataatcaatatttttcagcattgactcatttgagttaatttaataatgtcggaaaaaaactatataaaaaaaaaatttagaatatccaaaataaaacaatattgttctagtggagatcggttaagattttacggcttcgaacaaatacatattaagatttatactaataattatattacctactaaaattacataatttgcaataacgcatcanatattagtcaatgaagacaaaagagacagtacaataca

SEQ ID NO: 15124 - DNA, 904 bp, Arabidopsis thaliana landsberg
ccttccttcgactgccgcttttttggcaatgcctcacctggaactggaagagttgtagttctgatcttcttttttcgaccaattttctcaacgcttatatcctctttgtcttggtcagaaacaacctgataccatttagaaataagagtaagagagaaacaaaataaaagaaaaaaacatcagcacaacgtgaactctgaaaatacaaacaaatgagacgttatgggaatccagaattgtcacattctcaaaaagacagctttgcaaaatcatacaacgaataaagtcaacaatcccttaatcctgtaccaatgatgaacaatatggtactagttccttgcagataagtacctcaatagtatcattagttggcgaagagcgaaaactgacttcatgcatccaactagtatcatcgtctgaaaaaatacagcaatcagcatttgtatgtggacactacaaatgaagttcatcatgtatactctgatatatatgcacaataatttggttttggggtaagcatacctaaatttgtctcaggtattctagtattcttatagtatgcctcactggtttcggcttccaatccaaaccgaggctcccttaaaccagcaagcacggattcattcttcttcgaagtttcaggtcgaggactatcttcaaactccgaatccagagatattatccgtttgcctagtgagattccaaaagaaacatagagatattgtttagcctgatgattctgcctaagatccccagaaatcacaaaattttcgctagtagaacaagctttccggtatcaatttcctgtagaaaatgctaaagctaaacctaaacactgagaatcgagaaaattccgaggacgaacattaactaaccggagaatttgtcttcgcggttagaagct

SEQ ID NO: 15125 - DNA, 506 bp, Arabidopsis thaliana landsberg
caaatagtcgattcatggcctagcttcgttccacaccgaatcacggagaagctcatggccgttttttaggaacacctcgctgccgccaccgtccgggtcgaaaccggcgcgaccggctacgaggccatcctcaccccggaagcactggcctttctgggccggctgcatcgcctggccgagccgcgccggcagcagttgctggccgcacgccggcagcgccaggcccgttatgacgccagcgagctgccggacttccgcgctgataccgcggcgatccgcgagggcgactggacggtggcgccgattccggccgcactgcaggaccgtcgcgtcgagatcaccggcccggtcgagcgcaagatgatcatcaacgcgctcaattccggcgccaaggtgttcatggccgacttcgaggattccttgacgccgagcttcgccaaccagctcgacggccagatcaacctgcgcgacgcggtgaatggccgcatcgaaatcacttcgccgga

SEQ ID NO: 15126 - DNA, 556 bp, Arabidopsis thaliana landsberg
ggacaacatcgcaaactgatgcaaaaagaagagctcgaagtcacagattttcaggtaatgtgttataattagctgagttaagaacatattctgggtacttgctactcagaatactcttgttgtttaaatcttataggcgtatcttgtgagatgaagctgttgaattccagtcaacaaatacaagagcctttgaaaactcaaaattttgctgcaccctccttacaatacatacagatggaggataaacctgatggagaagaacagtgggagcctaaatttgcaggtcaccagagtttacaggaacgagaagactctttcttggttcaagagcagaaaatccattgtggctttgtcaaagctcctgaaggattgccaagcactggatttgacctgacagaagatgatgctaactatatcagtaaatgtcacattgctgtgatatcctgtatctttggaaactctgatcgcttgaggcatcctgctaataaaatggtatgataatgtaagcccttgatgtatcttcatgttgtagttttcttcttatttccacctctaa

SEQ ID NO: 15127 - DNA, 1077 bp, Arabidopsis thaliana landsberg
aagaaattatttacatctttatttgttctcaatcgaaacaatttattatctacctttacatcagtcaacctataataactcaaactacatatataatacaaatattgatagaacatgaaaacaaaaaaaaaaataattttggattgaaaatgtaaaacatcactttggataaaataattttttttgcctaaaatatcatttattatgaaacgaaaggaatatggagcacaaattattaagctcaataaaatagtcttaagtatgattttcatggaaaaagttataaaagccatcatctcgagaaaagtattttaaatacaaaggttgtattttattatgtgctattaaatcagtcgaacacattcttttttacaactagaacactatttacatcttttttggttcaaataaaaatgcgtaaaaatcgagccccgaattttaaataattcgtttaacacatcaataagttgcacttgcacacaacctttaaactattagatacaatactattgtataaaatcttatatatgaaataaaaagagatctaaataagtgtttggttgattacctcttcttttgtttgctctagactgtaagatcttccttgtggtctcaactctttctcacattcctcaaaggcattcaatataaatttaaacacgactttcaaatagtcagggtgtgtatccatggcatcatccggagcccaccggtatgtgatcatatttatatcatcatcatgaccatcgactctttttttgaaatttttcaacaagtcgtatacctttgcaaactattgatgaggctttcgacctcagaaaaagtagcatatctgtcacatgtgtcatcaaccagcaattcagccataaacaacttagtctgcaaaatcctcgcatgtgagaactgtggctcgaagaacgttgctgttgaaaagaagtgcatttcggtgaccaccggtctgtagtaaggcggcactttagagtgtatgtcctgatccttataccaccttacattaaaaacatatatagatgatgagactatatttattcaaagggttgtataatggagatttttaca

SEQ ID NO: 15128 - DNA, 564 bp, Arabidopsis thaliana landsberg
aattgtgactggtggtgactgaggaagcttttatctcaagaacaactttgtctgtgcaactaatgacaacttttcaagagaaagatccaaaggaaaacctctaagtgaacatacgcatacgtacctggagttgttattcctgagagatttagcgttgcctaaagcttcatgaactggatttgactgtataccaacaataaaaccaaaatagctaatgatgctagcattacaagcctctctataaacatatcaatgcagtaactaaaagtatctgtgtaaaggcttagactcttgtccatgacaagcttcaaagccaagataaaagatacatatttttttgaagcctcacctccagaacttgctgttccactgtccttccttcaacgccggatcgaccaccaaggtaagcatggtagcgcatagcatgtttgttgtctcagtcttaccagcaccactttccccacttaccagaattgagttgctcttgccctcatttatcattgccctacccagagaagcagaagagaattgactagcatgagcaatgtatgaataaagagtgac

SEQ ID NO: 15129 - DNA, 508 bp, Arabidopsis thaliana landsberg
acacatacattctaacatcaattttggtttgtattggtaacacttggactatgttttgaccatttgattggtgcaaaaaaaagaaggagactaaccaattggagaaggttcgaatatatcgtaacagccacttcatcaatgacgtcacaaatttcatgaacatatttaaagaccaaagatttcgttttccttgtattttatttgaaagacacttttgcctatttcattcatattttgcttttaaaacgagaattataattcttcgactccgtgcgataagttttctaaaaaatcgaagaaagatcgatggctctagatatctgcgtgaaggttgccgtcggtgctcctgatgttctcggcgactgtatgttctctctctctatcctttctccaatcatcgatctccgttttgtttgtccacatcaagctttgatttcttaaattagggtttttgatctgtgatctattaaatgcgtgtgctttattctatgaaatctcgatttctttt

SEQ ID NO: 15130 - DNA, 504 bp, Arabidopsis thaliana landsberg
cgtggaatttgagaacgagaagagctgcttgtaacgaaccacctggtgatgattccaccaggatcatcgagtcttcttcttctctacggagacatgaacttggcgttaagagaggtggtagcgaagatggaggagattcgcagcagaataagaatgagaaagtgaaattctctgtttctttgttgagagaagaaatcgaacaagatttctctgccttaattggtaaaagacctccgagacgaccgaagaagagaccgagattggttcagaagcaaatgaatgtaacttcttcttcttctctccatctctctcgctcacacacaattgatctcttttttgactctgaattttcatttattgcagactctatttccaggattgtggttagcagaagaagtaacagcagactcttacgatgttcctgaggctgtggaaacatgaaatttggggtcagcttctctttttctatccaagaaaaatgtatcaactctgtttttcttctac

SEQ ID NO: 15131 - DNA, 380 bp, Arabidopsis thaliana landsberg
aaatctaacaagaagctcatagacaacttgaagatgaggccaagccggcttttatgcaggttcctcatcatccacatcaagcgtttcgagaatcttactctcgtgattcgcagaaggaaacgtcctgaaaagattaacaacagccactttcgcaatctcttgcattgcagcatcactcaactttgtagaaaccgttgcaatataatcaacaagctcaagcaaagtctgactctttatctctttctctctcagaatcttcgacggatcattgaagtcgaacacaacgcaacacatactcaacttgttgataaacagattaggctcctacaaggtaggaacacctctaaagctaggcaatgcttcataaactccattgactt

SEQ ID NO: 15132 - DNA, 973 bp, Arabidopsis thaliana landsberg
  unsure (1)..(973): unsure at all n locations
aataaagtaaaccaaacaaagaaggagaaatactacatagtaggatgctatacaaaactgaactccttaacacaaacagataaggatctctagcacatgactagaatatttccaccccaacaattactttagatgcatgcattctttcaacatcggatactaaggcaaagagaaatctctgccttgcaacattaagatgaaaataagtatgttaacatcaagaaatttgcacttgtacaaagtataaagaaactcagtttgaaattagccacatccaagttttactcactgggaaaccaaacagtgaaaagacctaccataatcatcatcgtcatcgatatcccagtaagagggggatgtggatggagtcccgttctccacttgaccagaagagcgcccctctgagagtgcttctcctgcttgactgtgaagtccatttgaactctcctctagagatcgtccaaccccagaatcttcatcaacagcctctgccattccccagtatgaaattgtttcgtcaaagctctctctctccttcaactatcagcaattaacgattggagcaaataaattagattttgaattctgtaatccccacaattatgtatacccagaaaacaatatgccaagtcatgatttgaaatggacaaagatattcaacgatctggctctctcaaactataccaatccgcaatcatttctagactttatccgtgagtataacgaattcatggctaaaaaatcgaaaccctttaaaacccacatcagataatcgatgggcaataaaccctaatttccaattttcaaaattagattggtaaaattacaaacaaacaaaaaaaaatcagccgaaaaattagagggcggcgaagcaatatatcatttcaatcagctaanatatgcagagaaacctcataatttcatcaaagacatcggagaacagaacanagcccagatgaaatcaacgatcggg

SEQ ID NO: 15133 - DNA, 343 bp, Arabidopsis thaliana landsberg
aaatgacaaaaagataaggagatagtgagcagccttggcgaagacccctttcactacagaataatcccgcgagttccccattcacttggactgagaaagacgccgtagttatgcaaagctcaatccatttgatgaaacgcggtggtaggtttagggccgtgagggtggaaatgagaaacgaccactgaacagaatcgaaagctttcgatatgcctatcttgatagcacttctcggagagatcgcgtctttatggtaatctttaacaatttccgatgcaagcaggacattctccatcaataacctatcctttacaaatgcagactgatttggagaaataaaatc

SEQ ID NO: 15134 - DNA, 806 bp, Arabidopsis thaliana landsberg
agtaaacgcagagctaccaacaaaaaaaaaaaaaaaatgataattttgcatttattccgtctgactttaaatattttttgtgcgatattgttatttcatattataaattttcgtctttgcacaaaacataacgatataatgttcgtcataattaacacagtggatgaatttgtcactgctttgaattgatgtattcatcatcaccatcaatattatttggattacacgagcaacttgaaagaagagtatttactttcagcttagagaaagttgaaataattcttatttttagaggaatggtgatatatatgatttgaagtcatcatccatatctttggacgtgactcgcagagtcattctttgcttttggttttgcataaagttttatagtagtgcaaacagccaaatgatcatctgcaattacaaatataattacaaataacaatacaatttacatgtattatattattatcgtaaataattttaatattattttattataatttcttaagtttccctatagcaaattactacggatttgcaaggatgtatattattattttgtgtcaaatcaaattatttaaaagagttattgcaaatccatagcaatacttgccaatgatttactagacatattttgtgaaggatctattacgaaaatctttcttcccaaaatttacatgatatttacgaagtattcgaatttgcaaaaaccgaattacgagagaatgtcttttaacgtaattatctggcaacttgcaaatagtatgttttcttgagtgtctgcccatgaagaagaaccgcag

SEQ ID NO: 15135 - DNA, 770 bp, Arabidopsis thaliana landsberg
tggaatcactggttttttaggaaaagtaactcctgtctctttagtctcccattatttgcttttgcttgggctagggtcactttatctacatcctctacgcctcccttaaatttgtgccactttctcatggtcaaagtcactttataaggtgagtaatctatacaagctattatgctcatattcaaacatcaaaaagaactaatttgaccaatgcacagaaagactataaacagcctaaaagtatcctctggacagttcttacctctatactttcggatgttgttaactttgaccatattttctccctatctatagcccgctgcagttgcttctgtataagatcaacccagaaaataacttcatctgtatcaatgtcaccattaactctgcacactgctgcgcgaggaccaaaatgagtaagaaattctctttgtaggcctatgcttttgattgaatgatacgcttgagggagtggaacgaagtctacaagtttttccatcaatcttccagttgtatctggaatcatagagaagaagggtgggcaggaaaattttgctgggccaactttcgtgattgctgcaatgcaattgagtacaagcatgagaagtgacacttcaatctcattacttgcagctgcggactttccttttgcatagctggaggaaccataaagaatcattactttttcaaaacctcacaatcaaactcgtggtttacagtatttactaataaggtgagactaagcattcaaccaaaaagatggagttttg

SEQ ID NO: 15136 - DNA, 931 bp, Arabidopsis thaliana landsberg
  unsure (1)..(931): unsure at all n locations
cgctttgagcatctttgagtgtaagctctacaacattacattgacgtctcaagcaaggggttattcgacgtcatactaatgccattaaactaactttgaaggaaaaaaatataaagaggagactctaattttgtttctctatgttggacaaatactttatctcatgaaccaaaatttatatgtacaatattgtgcatatcgatgaaaaatggttttatatgacgaataaaacggagaaatactatctacttctggccaaagaagagccatatcgtgcttgtcaaagtaaaaattttattgctaaagtaatgtttttggctgcgatggctcgaccaagatttgatgaggaaggtaatgaggtattttctggaaaaataggagtgtttcattttgtttctttggaactagctattagacaaagtaaacatagagatgctggaactctagagtggaaaacatcaactttggttaaaagagaggatataagagcttgcttgatannnnnnnnnnnnnnnnnnnntcatgaaacgtggccaaaggaaaatcggggaaagaccatattcattcaacaagataacgcaaagacacatgttgaatgtgatgataaagagtttgaagaagctgcgtcaaaaaatggctttgacatccgattgatgtgccaaccaccaaattcaccggacctcaatattttggatcttgggtttttcaatgccattcaagcgttgcaacataagacatgtcccaaaactattgaagatcttgttcatgcagtggaaaactcatatgctgaatatcttacaacaaaagtaatcacattttcttttactcttcaataatgcatgaaagacatgatgaacattggaggatcgaacacgtacaaaatactgcatatgcaaaagagaacactcaaaagagaatgttgtcttcctgt

SEQ ID NO: 15137 - DNA, 508 bp, Arabidopsis thaliana landsberg
aagcataagaattgttgttgtacatttatgtagtgccaagaaacctaatctgccggtagcatatcttttttgttcaaagaatggaatttcattaaaattcggttaacaatacgcatgaacaatggcttgttcattctaaaacggcgttgaaatatatgaggaggtactgccgcattttctttgaaataatcgtttcataactggatgtgtcctagttcacgatctcttttaatatatgctcgtttcgttgttgacttggttggtttacgatcaacatatctctgtaatgtttcatcaaaaaattgatcaaacttatcatcaagtatttcgtcaagattgtatgatgaggaagattctttttttttggaagtagtacaagacctttttcgtgaaaagaggaatgatttgaagaaaataagaaagaattaagattgtgttgtatctttattgaaggacataaagaggattgattggtgaaagaggaatgatttcagaagattgatttggt

SEQ ID NO: 15138 - DNA, 713 bp, Arabidopsis thaliana landsberg
cgtgaagttaacgaacatcatcgcctgaaatttcagaaacagaacaaatgcttttacaattatctagagaactatgatgctattacccaaattcaatcactactttatgatatcacagcttttgtcatagttaacactaccaccggcaaagaaaagcttttaaccttcaagcacatactaaattactaaactaccatcttcagaaatctaaaatacttgtccagtaaaaatgcaaggcataactgaaaacgtccattaatgtattgcactgcagtgagatccaaaataactttactgagaattaccttagtggcagggctttcaaagaatttggcaacataagggtggttgtttggatcactgtcaaagacggtgacaagtgggatacttgattctttgacaaatttctctagagcttccccattgaagtcctgaatccatgattcgaaaatcaaataaataatttgaaacattattgcataaaacttgacttctaattgatgtaatgtacaaaatgaaaaggttcccctttaccttggagtcaacaaacaattcatcaaaaggcttgaacagcctcactgcaggtccttccacagactctccacgaggaagaaacttagcatccaaagtgtgtgcgaaatcatagtcagcacgcaatttctcaccaagggccatgaaagaatcaaactcatgcccggatgattaggggacac

SEQ ID NO: 15139 - DNA, 802 bp, Arabidopsis thaliana landsberg
aaattaaaacccataaaacttaattttagattttctttaaaattgacaaaactatcaaaatctaggtttcctatttttagaaaacacactttttcacaatcttggttcggtataaagtagatttttagaaaaactaaaaccaaaaacaacatcaaaatctacaaccattcaaagtatcatgtatcaatttacctactttgggtctggggtcatactcataccatatgtcttttatcatctgtcctttatttatattttcttccatcagtcagtttaaatcaatcattttcttcaactatttaagtcaatccaatcaatcatttaggaaaaatacgtatacgtttttaataccacctacaaaagaaccgtgtccaaacttttgtttcgtccaggaaagaagccgacatggaagcaaaaggggcagcacagtggagctctatcctagttccatccgttcaagagatggttaaggagaagacgatcacgaccgttcctcctaggtacgtccggtctgatcaagacaaaactgaagtcgatgatgattttgatgtgaaaattgagatcccaatcatcgatatgaagcgtttgtgttcttcaaccaccatggattctgaggttgagaaactcgacttcgcttgcaaagagtggggatttttccaggtaaattctccaactacaaatataactcttctataaagcagcccatcgcgtctttctttattaacataatatacgtcacatggagcttatattagtttttactatttttgattgaggaaaataggcagataaaatcgtttct

SEQ ID NO: 15140 - DNA, 182 bp, Arabidopsis thaliana landsberg
tgatgcggtttagtacgaatttttcgttccaaattatccgcttttaaagttgcatagtgagagattaaagataaagagaaaatcgagaattcttctttgtcgctttgtaattcttccaaatacactgagaaggtccgccattcggtcgaggaagacactatcctcaccagatccaaaaaaac

SEQ ID NO: 15141 - DNA, 568 bp, Arabidopsis thaliana landsberg
ctagctcgagtgttctttagagacagggcagacaaagaccgtttagaagctatactcttcagagagttccacaggtacaagaagttgctccattgtttgccactcttttcttttctccggtagcacgttcaaatacttcaaaaacgtcggtaaaacttgtgaacctgctgcaactgttacacttacaggactctctggtgattcaccgagtaggatgcagtattgtcgggttagttccttggcagcgttggtccacaatacaggtgagaggaactctgagtatggggatttattgaggtttctgttccataagagagagcacatgagtttctgtatctcagggaaacagcagctatctgctgaatacgtagcaaagtgttttctcgcgtagttgatagcttcttcggaggttttgtctttagctatctccaaaaagtgaaggctgtgaagtttcaactcaagatctgactttgattcctttagcttgtcagagtttgaagctacccattgcaaagctgagccgagatcccgttctttcatggctctaagtatcatactcattgacatg

SEQ ID NO: 15142 - DNA, 866 bp, Arabidopsis thaliana landsberg
agtgcctgcggtggtgtgtgctatgccgaaaagcatcaaagtcatttctctgtaagtcagcgcatgtagcacctgtggtaaaggctattttttggcatcttccaagtttttgggtggttcttccatttatgtctccaagacattagtacatacatcgtgatgtagaagatgtcaacagatggtgtaagtctagatatttacttatataatcagtaatttagctatttatgttagacattcatcaagtgcctgctctacttaacgcataacatctgagatttatcatgtatgttttgattgatctaacattcttaggtccaaaaaagttgaaggatacattgaacagttctaaataaaaaccaagaacctgagtagaaagcagaattgtggaataacatataagattttgtagagtaagtatatttcaaaagttatgaaattatatacaataaaagggaggttttattatatcttagatagaaaacatatatattccaaacatgaactaattggatccttttgttcagatttttgcgtctcagttctaggccttcttgacatgtcatttgatcttatagtagaaccttagattatacatgaaagtgggcgatgccagtcttggttggtaagagcttcatttctattgaaagctatggagaggagttgtttacaatgtattctcaatgtgaaatggattgtcactgtaactcataatatatggagagaagcaggttagtcgtttctttcatgttctaagattatttcatcccttttggatttgtatcgaaacttaatatcacagttcttagaattgtgatgaaaactttacaaagaaaaattggacttttcaaacctaagtgatggca

SEQ ID NO: 15143 - DNA, 568 bp, Arabidopsis thaliana landsberg
caactgtttcttggacaacctgtgatggttaagccttctgaagctgaaaagaatctggcccaatctaacagcactacggtggggggtacaggccctgcagataggaaactctatgtgggtaacctgcatttcaacatgtcggaactgcagcttagacaggtgatattcagttttctaggtcaattgtttaattacatatggacactccagcaactgtttttttttctttcagtatccttcatattctcacagttgtttccttttctttatcagatttttgaggcatttggtcccgttgagcttgttcagctaccacttgatcctgaaactgggcagtgcaaaggatttggatttattcaggttagtggaacgtgttttttactttgttggtactctttttcttagttattcctcactgagttttattttctcttgcatagtttgttcaacttgaacattcaaaggcagcacaaattgccttaaatggaaagctggagattgctggtaggacaatcaaggtgagaaatgaattccttgtggaaaaatgatgagttcttttgaattgcat

SEQ ID NO: 15144 - DNA, 470 bp, Arabidopsis thaliana landsberg
cggacaatcccttccgatccttattagatccacgacagacgataccttttctccttttttatgcacttgatggacatctgtcaatatcttctctgcatagaatcctcgcgaacagctataattgtacaaaaaaattaaagaaatttaatttagtaatcatgttaattatataataaaatctcctcattaatatattcttcacagttgtttcagatcgaacccgtcaccaagaactcagaatctctttctctcacaatcgtcctgttgatcccgccctcatctcccaactcccacttgtataaatccaatttccaaaactcctccgacgagtattttgattttcccagtgacctgagaaatcgactaactaattccctatcggtaaaaaatttcggttgacctaaccctaactagagagatggattcgattatattcacagcacttgatgaaatctgttctaaaggaacac

SEQ ID NO: 15145 - DNA, 515 bp, Arabidopsis thaliana landsberg
catggccatgtctctctcctaattgtatattttcaccggcttctcgtatgcgtgtcggttctacaacaagagcattcaatcagattattaacagacttaagagagagggattcttagtaagcgagagagagtttcctacctgatttgcagcataagcccttttaggagcattatcaatgtgctccaacccaagatactgctcccacgcaccgtatacatctcttctctgtagccatttttagattccaaagacaaaagagttaaatcctatttctttttgagtagatctaaggataacagccttacctgaaagcgattataaacaacatctgtgtccagcaagtaatcaggacgtcccattgaaaacgatgcaaacttccactgcataacataagacacaaaagaaagaacaaaaaactcattaacattgatccgccaccgataatgacaattaaaaacacctactaacatttttttttgtagctgttgttatcaaatcagacaaaaagccatgc

SEQ ID NO: 15146 - DNA, 937 bp, Arabidopsis thaliana landsberg
gtaactgatcgataacatggcagcggagtacgcatggttaccgttgattccgccaaatttacagccattcaacggtaacggccaatttacctatggggtaaactttgcttcaggtggcgccggagctttggtcggaaccttttctggattggtattcattagtaactactttacattggttttatttatttattttcttttgttgactccattggaattgtttgtcttgtctactttttttttctttttcaaaaaacaattttcaccactgcagggtgataaattaaagaacacaattaaacaacttcaaaaaggttgaaaaaatgttaaggtctaagttaggagatgctgaggggaagagggttatctcaagaagctgtttatctgtttcatatcggactcaatgactatcaatatccattcacttcaaactcttccttatttcaatctatttccaaagagaaatacgtcgattatgttgtcggtaacatgacagatgttttcaaggtaatttttaatagagtttgtattgtgaacaacttttggtctgaaaaatgagagatgatgttgtgttcttagcaagtgtataatcttggaggaaggaagtttggaatcttgaacacgggaccgtacgattgtgcaccagcctcattggttatagaccaaacaaaaataagatcttgttttcagccggtcactgaactgatcaatatgcacaacgagaagcttctgaatggtttgagacggctaaatcatgaactatccggattcaaatacgcccttcacgactatcacacttccctatcggaaaggatgaacgatccttcaaaatatggtaacaaaacttggttacaccattgcaatatatataacagagtctttactaaaaacaaattgatcgttttgaagggttcaaggaggggaagaaagcgtgttg

SEQ ID NO: 15147 - DNA, 920 bp, Arabidopsis thaliana landsberg
  unsure (1)..(920): unsure at all n locations
agtctagccaagtggggatactgaatgtgtacatgtatgtacatgaaattatatgtctacaagtgattgtaacacaaacctggtgctgtaagtactgaaggagaagattnnnnnnnnnnnnnnnnnnatagcctccaacacgaattgtgttcaagaaatttaggtggccttccaaaattctgcctgcataattcttttgaaacatttgggcgaaaggtttgttttctggactttgaagttttggatctccaaacctgttaaagaatattctataaacctttcaagcgtactttcttgttaaaaaaatattaatgtcaaagacataccgactatagagcctgtttaaaatgtgcactgtccacttcttgaccttccaccagccccaagattttctaagttccggatccataggctgaccttcaactggaacaggacgttccgaaacactcaagaacagaaccatccaggcattaaagacgtttagatcaaataattgccttggaagctccagctgcccacagagaacagtaaaaagacattaaacagcttaactggtttgaattgtgttttaaggatatgcatattatgttaagaaagataaaatgtgaaattccgcagaggcatatgtaactgatctctctagcaacttacatatatggatgaccaaaatattttgcatatcaacttcataagttctgctatctccagagacggatttggtatctggataagcccattaaaaatagtcaaaagttgaggaaatgtttcctccacaatgcgggaaaccggtgtcctctcctcatctgacttgaacctagaaaataaaatcatgaaacatcatcaacgggatatactacttaggtgtcatcatataaagagcaacttgcatttctagctggaagtcgtcacatacttgacag

SEQ ID NO: 15148 - DNA, 1312 bp, Arabidopsis thaliana landsberg
  unsure (1)..(1312): unsure at all n locations
ctacttacaattacaattttcaattgtataaagtattatataaaaaatctgaatctggtacccattgtttttgcatttaattacggaattatggagaaatatgaccccaaattcctatatggatcgtatcccatgaacatgaaatatataattccttatacaagaaaacattaaattacccacgtggggccacctcaccttgtcaaattaaattcagtgctttcttctatttgcattttcctgtctcctatattttgacttcttaaacagttgaagttgatatctacaatatcacaaacctcacgggttaattttatataatctataaactatgttctctttttgtaatatcattttattaagtggaacatgcatgcaggagcatacgtaacagtacgtatcgtagaaagctagggttcttctcctcatgctcaacaggaaacccaatagatgattgttggcgatgcgataaaaaatggcatcgccgaagaaagcgattagcggattgcgcgatcggtttcggacgtaacgcagtcggaggccgtgatggacgttactacattgttactgatccatctgatcatgatccggttacaccaaaacccggtacactccggtacgctgttatacaagacgaaccgctatggatcgtctttaaacgtgacatggtcattactttaagccaagaactaatcatgaatagcttcaaaactatcgatggtcgtggtgtcaacgtgcatatagctggtggtgcatgtctcacggttcagtacgttacgaatattatcatccatgggataaatattcatgattgtaagcgaactggtaacgctatggttaggagttcggagagtcattatggttggagaacgatggcggatggtgatggtatttcgatttttggatcgagtcatatttggattgatcataattctctttcgagttgtgctgatggattgatagacgcaattatgggatctactgctattaccatctctaataattatctcactcaccacaacgaggttagatattttttcattgattcttctattctagtaatttatgtttaccaaatttggtaacgcgttaggtcatatatcaaaagatattagtagtatcggtgcagaagttggtgatgatttaggagtgcacatttactatgtttagaagtaggacgggaaatagagggtaaaagtcagaaaccgataattcggttgtaagaatttattagccgaaatataaccaataataaaataaaagggaacatgtaattcaggtatattgagaantagagaccggttaacttcag

SEQ ID NO: 15149 - DNA, 718 bp, Arabidopsis thaliana landsberg
  unsure (1)..(718): unsure at all n locations
gtttaaatttctttaaatatgattaaacgagagactaggacgctctaagttttactacatttttaaataaatacgactttttgccgaaagaaaacatagtacttaagataagagcattttgtgttctaatgaaaattaaacgtttctgcattctctattcttttgactgtcttatacttttattgaaataagctttttttaacttttgtaaatcagctttaacgaaaaaagaatgtagtgactagtggagcacggaggcaaagttgctagctttgtacacctttttttatttttgtcttttgggttgtaacttagataagaagaggtcccagtccgtaaaaagtttaaacggtatcgattaaaattgtttaagctaaaagaggtagtagtcgaagttattaaatgcattatattatatagttgacaaaagtaattaaaaaataaatgtaatggtttaaaactgacggatcccaaattatatcaaccaggtatttgaacgccgggatattcgctaccggcaacgaagatgacgacaggtcaaacacgcttccccggccggctactagagcagcgatgctcatccgtgtaaacaccctcctccaaggctactctggtatacgctttgagatcctcgaagccatcacaacactcctcaactgcaaaattacaccgctccttcctctccgaggcaccattaccgncttcgggatctcgttcc

SEQ ID NO: 15150 - DNA, 457 bp, Arabidopsis thaliana landsberg
tataaacttgttgtttaataacttgaaacctgaccccattctgaccattgtttgttcagaggaggatttttttggccacagagatccattccacatcttaaattcaagaaacaggacataaattattacaaaacaatgaaacatgacagagcagaacgatacagatggacaaaaccatgtcaaactctctgcccccacgcttttagaccacaaaacaaaacaccattgtcatatcatcaataaccagcaatcaaataactcatatatgcttcaaaccaagactttcagattcaaatggctttggttagaggtatttatgcttcaaagaagactcttgaccactctatagcagctgcagctgagcagcaacattgagcaaaagacatttgggtgaacaaagaacgttgactaaaaacatgccaaaaaaaaagatattccggaatatatagttcggggg

SEQ ID NO: 15151 - DNA, 586 bp, Arabidopsis thaliana landsberg
  unsure (1)..(586): unsure at all n locations
catattgatatagtcaccgggaggattctctgtaaattgggatttcctcaagtaagagtatccctttatgagcgttggccttatctcatcgtcaacatcagccgctaacatgacttggagaacgaaggctgtatcccatatttggctaccaaaagtctgcaaattatcgtaaaaaattaatgctattgaggttcatagtgtcgtcgtcaaaaaaaaaaaaagagactgacctggattttcaagccgtcctccgcaatccatatgaaatgagagactcgcgcaagatgttttttaaaataatcactcnnnnnnnnnnnnnnnnnnnnnnnnngcatatgaaacacctaatatagttatataaacaatgtttcatcactgttttttggtcttctttcgttttcctctatttgatgtttatatcttttgacgaggacatgtagcttagtggtttgtgttaggatcgttgttatgttactatttggatacaaactcttaataaattgtgttaacacaaaaaaatgctaatattacctttggcactgctccacctgtaatgtaccgggtggcttcgtcatggtagtgaatg

SEQ ID NO: 15152 - DNA, 493 bp, Arabidopsis thaliana landsberg
atcacttcccgtggtcagcaccgattcgtgctcctcattggtcgggctgctttatatcagtttctgagtagctccacaggactctctttggcgtatctctggtgcctaccgcgcttcatctccatttatctctggcgcaatactgcagacagcccaagaaactaatcaggagaaactaaagcaagcaagaaagaaactttgattgtggttgacgaacatggaactagaaagagagagagtataggtagctaactcactgtatccttgcgttagggtagttaacaaatcccttcattggattcacgaccgggttccactcacaagtggaacctgaatcaacagatagttactgcgcattactgtcgcatgcttcgagcatactgcaaaggcttggactcagatcaaccacaacgcttaacctccgactcccggggttatccagaaactccccattgactccaaaccgcattttcagataagaacagcacagctg

SEQ ID NO: 15153 - DNA, 620 bp, Arabidopsis thaliana landsberg
catccggaggtttcataaacagtctcaagtctttacaaaacggtaaagctcgtacctaaaattacagcatgtacttaaaactctacccccttgtttattactgcagcatgtcggaagtttcgctataatccagttcaaacacacaatgcaatctttaatcgataagtcctttgtacactgcaccattccgtacaacttcatcgtcctgagacttttctctcctgtcgcatacaacatcttcattccgagcctttttcccccaatctcgggtaagtcctgcttgccgttattgttttctttacttgtggctttctctttcagcctatagaggagagccctcgtattcttgttgaacaaatttgtatcgccgttcacatctttctcgttgtacatatagaaattatactcgtaatcaatcttgcctaaagaattaattggagatatctctagaagacaattatcgtaccatattattctccccttgtttttcggacatcttccacgaagctgtcataatatatatacaccaaaatcaagagaaatatggaattaaccaattactatgtaaatagtttttgtttgtagaagtcctaacatgtcaaccaatgtaaatatgtcac

SEQ ID NO: 15154 - DNA, 1278 bp, Arabidopsis thaliana landsberg
tatgtgcaaaccctacatcagaaaaacggccaaacatgtcacaagttgttatcgatctgaaagaatgtcttgctactgaaaattcaacgagaagtgagaaagacatgagttctcatagttctgatcttgatcgtagcatgaacttttacaccgacatggttcctagagctaggtagcatgtgcaaagaagactcagtcactttgatgtatctatgcttgtttttattgtttttgccaatatttcaaagccataggctttatactctgtaacagccaaaaagtttcattattttctaatgataataacagtttagcaaagaaaaaaatgtatctatgtttgtgtgcatggacttggtcttgttttagtttcgatttttttatttttaggaactttgcacgttgtggtaatctcgcgtacaactattgagtatcaaaacatattttcagagttctattctaccgatacaaaagattttgtttgagcaaaaaataacacttaacctcggtttcaagcttgttaatgttttcattcatgtcaccgagttttgctttgttcattttgcgactacgaccaatttatccaacgactaatcgagcaaaaaatttcattcatttatttttcagcgatcaatcaattttttttactatatttgtagggagagtgaaaaagagtggtaaacgtaaaactttgagctttttgattgatcaagtttatatatatactatcgtcttaaaaagcccattctgggctaaatttaggccgggctacaagcccagaaaagaaacgagtcttttatacaaaactggttcagatttggtcactctctgacgcgagaactagtctcaccagacaacaacaacaacaaaacttaagggaaagataatcgtttgtctgtgcagagagagagagagagagaaaatgaggttgttcgatccatggccagtgttcttcaagagagaatggaaacgttgttggccattcctcaccggtttcgccgtcaccggcgttctcatcaccaagctaaccgccggactcactggtaaactcgccgtcggatctcaccgattttaaacatctaacttctcccatttcagctgtatttatttgattcagatcggatgtttatttctgtaatcatttctcaattttgattttgattttggaaaacctaatttccgtaaaatggtgattgatatacagaggaagatgcgaagaactccaagttcgtccagcaacacagaaggtacaccaatcttaaaaattctcacttgaaattg

SEQ ID NO: 15155 - DNA, 633 bp, Arabidopsis thaliana landsberg
aaagcacaaggcgaatagaaacgtgtttcaccacaggtgaatagatttccaaggaaatatattccctccttttgtgagttgcctttggctacaagtcttgccttaaaccttggctattctactcctgcaatgaaggcttttcttttgaatacccatttacacccaattggcttttgtgatttactcctctccaccaatatccatgtcttgttcttgataagtgattctatttcctcatcagcagcttctaaccacttatcactatcaggatcttgaagtgcttcctgataatccacatgctcagggttccctccatcttctgtaataagataagcataacctgctatctcatctaatacttcctcatccattttataatcgtttaatctcgacggtagaacaacttatcttcttggtcgatctcttgttatctgacgagttctctgattcccttctagttctgtgtttgcatgacctgtaacagaagactctggagattcctctaaagctttctctgtagctccaccttgagctgaattatcaccatctttactaggacctgcacattcaaacctagaaactttgttagtaactaaaggaaattcaagactcatacttgaaactaagtggtta

SEQ ID NO: 15156 - DNA, 551 bp, Arabidopsis thaliana landsberg
catgacttgcacgtatcgcttctttgtctgcacctgcaaaaaacccaacaaacacttgtgacatataagcccaaatatgacgtgacacataagataacaaacacattaatatcataaaactcatatcatacataacattaatacaatatcatacttgtgacacattaagacaaggaattaagaacttgaccttctttaagagaaggacttgtgacacattaagacaatatcatacataaactcaaaaaccaatatcatacataaactcaaataaccaatatcttacataaacatgaagtacatgtcacagctgtgacttaaaagcaatatcaaacatactagaagtacttagacagaaatttaaaagcaatatcaaacatactagaagtaattagacaaaaatttaaaagttagaacatatgttacaaacaagaaggaacaagaacttatgaaaataaatcctcaattagcttcttcttaagagtcaagtcgcagtcttaagaggctcggtcctttgaagaagactttaaagcttaaattttgccttcctt

SEQ ID NO: 15157 - DNA, 369 bp, Arabidopsis thaliana landsberg
ctaaaaccagcgcctgtaatggcttcattttcttcaaaaggtccaagcatagtggctcctcagattatgaagcctgacataactgctcatggtgtgagtgtgatcgctgcctacactggagcagtctctccaacaaacgaacagtttgatcctcgacgacttctgttcaatgctatttcaggaacctctatgtcttgtcctcatatctctggcattgcgggtcttctcaaaactcgttatccttcttggagccccgcagctatccgctctgccatcatgactaccggtagagaatgtattttgattctagagcttacacattgttgacaaaattgaagtttaattctattttaccacttaattcacttt

SEQ ID NO: 15158 - DNA, 716 bp, Arabidopsis thaliana landsberg
gatattttttaaataatcgatttcaacaaaattgtatgaattttaatacatattttttttatcatgggggtgaatggtatatttaatagaaagtttcgattatgcatttaatttcatacaattgacttttcgactgttcattttttttaattttattttacaacgacttttagacacttcttagcacgaaagaactaaacgcaacatgtgctttgtaattaaacgtcgaatgaatatgaattatatttgacctaggattacgaatgatgtcgatctggagtaataatttagaaccgaacgacgacttcgaaatattacaattgacttatagaatagatctcgacgtagattggtcttaaaataataattaagcaccaaagaactggagatggctttatgtgctctgtgttttaaagcggattaataaggacttttaattcgattggggaagatagaagaaagcagaagtgataaatggaggaccatttgttgactcagagtgagcacatggttgatggtgttacaatccatggagattcttcctcaaatgaagagcacgtggtggacgttacaaacaatggcaatccttcatcagatgatgagaaaagacggcatgagggtgtccaatggagtgatacacacaccgttaccactgtttgtattttggtagaataagaaaaggctttagtccagattgtcgccgccattgttgttct

SEQ ID NO: 15159 - DNA, 494 bp, Arabidopsis thaliana landsberg
ccagtttagcttattagagctttgggttgtttctgtgtatagatcacaaccaaataaagttaacttatttacattaaaatttaattgttggtatacaactacaaaaaaggtgagaggcactaaccgaagagatgagaatcaaggcttccattctccaagtattcataaatcaatatcttctcatccgcgtagatgcaacaactaagaagccggacaaggttgatgtgttgaagccttgcgattagcctcacctcgttcttgaactcattggttccttgagatgacatctctgataatcttttcactgcaatcttttacccgtcaagtaaccttccctgctaccatttttttagagttatgaaacgtatgccccagtgataaaaaaattcaacgctagtcatcatttttaccttgtatacaataccgaaaccacctcgtccaagtatgttggaatcagagaaattttcggtggccatgacaacagtttcaaactc

SEQ ID NO: 15160 - DNA, 748 bp, Arabidopsis thaliana landsberg
  unsure (1)..(748): unsure at all n locations
tgattcaaatggacaccataccgttgcaatactctgcagtcttcgacctgtatcctgtattctttcagtggacgaagcccatgttgaggaatctcgataccggtaatccgtagtttccgtagtccgggttgctctttgataagtgctcgtataaacatcggccactggaaaccataaaggatcccgaaatcgactatatgaagaaccgaagcatccttggcagcatcaagaatcatcttgttggagaagaaatagatcaaagtcataaacggagacgcagacaagaacacactataggatttaagaatctgtgcagctgttcgtttcttggaggaaatggaatcgtaataactctggatcatagttcctgtgctaccttcaagacgcgcctcaagtgcattggcgaagaaatgagctagtctctgtgatgcatcaccaacaggtgaacattgcttccttatctgcctcagcaaatcatcagccgtaatcttatcccctgcagaaacagattgtgcgcatagtgtgagaagtgtgcggaaatcaaccgctcgactcttctttttcgcgcggcctttcttaaccagagccttgcttgaaccattttcgccatcttcgataatctgcggatcgcattcaccatcaagaagcanaaccttatcaaacatttctgttaatttcccatcttcctcattcactgcgaatgggctactcctcctcctagctttctctagatcatcttcttcttctt

SEQ ID NO: 15161 - DNA, 751 bp, Arabidopsis thaliana landsberg
ttttaatcactctctttatctttttaatcactctttaatgattaagaatggaggataattgaaatatgattggtgtttacttgcagtaacatttattacataaacgatcatctggacaagagaacatggacttacatatttggcgcgtgttgtgcaaccactgtctttataccgtcgtttcacaattaccgaatttggtcattccttggccttggaatgaccacttacaccgcttggtacttagccattgcctccatcatccacggccaggtaatattttaatatatttcaccaaaaatatatttcaccaaaaatatatttcatcacattataaagatcactacactgtcgttttcatatttatatgctttgcattgaggtgacagtatatgccttaattaaaaagaagaataaaaaaaattcgtattttctctttaagatcagggattattctttgcatcttaacccaaatttgtattaaaaagtgtatgtataatataacttagacaaaattagcactgtttaatattctcctaatcaaattttttttttgttgtttattttaggcggaaggtgtgaaacattcaggtccaacaaagctagtgctttattttacgggagccacaaatattttgtacacctttggaggtcacgcggttactgtgtaagttactcttcttttgatttcttaatgattattaattttgtatctaataaaagatcaataaattttgtcagacatagttgaatt

SEQ ID NO: 15162 - DNA, 562 bp, Arabidopsis thaliana landsberg
aacagtaaacaccaataagagagaatgctgattatgtaatcattatgctatagaaaaattgcattatagtgtctcaacaactggaattgccggttcttcatatttgtttcgcagaaaaaaaaccccgctgatactactaataatgagccaactacgtcaactattggacttctaatgtcccccttacttagcagagactctatctacataatactttctgcaaaatcgtgttctctagaaaccataatttcagtaatgcagctatgatatttcaattttgtccacatcaccagaatgtttgtgcagcataacaatgttcctctttctcagtaccatacaacactataacacgtaagaagaattatttgcttgcaagagcttattgatagaatgaaggacttacagcgagtttcctcagtagaatgccagtagtacaaaacagcagcctagtcttgtcactcctgaacaaagatacaaatatgccaagttaagtatgcttaatctacaactccaaggaacattattaaaggggaagccagaaaatcataaggccatcatcata

SEQ ID NO: 15163 - DNA, 607 bp, Arabidopsis thaliana landsberg
ggaaagcttatttagctgctcgagaagatagtgaccgaagtgctcagaaagctattgttgataaaacttcctctgcactgctagatagggtaacaacaatttttgtatagtattcttcagtcacaaactctctagtctttttaatctctaacttcattatcttctatcgttaggtggagacaatgctccagaaacttgaaaaggaaattgatgatgtcgataacaagattggcaaccgctggcgactcctggacaggtctgtgtgaacatccgttagactgttttctcgccttagaataatgatttggcaatcaatcaattcaattttgtctgtacagagattatgatggtaaggtaagtccagatgaggttgcattggctgcgatgtacctgaaggacacattgggcaaagagggtatccaagagcttatccaaaatctctctaaagataaaggtcacacactctatattctttcttccattgcatgaacttcccaaactttgatttttcggttttctgatggaagttttcttggaaattagatgacaaaatactggtggaagatttagtgaagttagcaagcgagattgaagatgctgaagctga

SEQ ID NO: 15164 - DNA, 2102 bp, Arabidopsis thaliana landsberg
actttagaaaagttgttatataagctttaaaactcttatataagagctctttcttacaaatcttagcttaagattttggctaagataccgccaataataatgccctaacgaaacttaggaaaatttgttcttcaatattattgggccataatgggcctcgaattgtatttacttagcccatacgttattgttgtacaagttgattagtttaaacactatgagcctttcacaactatactatacgtttcttgaaaaacatattctagatccttctatagttccagtttccaacattgatttttgaaactaaagagcattgtgagatcttattcttagtgtttcttttgcagaatatttatgacactacaccatatatatcttaataatattattcaaatcattgctcacaactgaaacaaccaaaccaatctcgaaaaaaagaaagaaaaatgaccaacgaagattataaaaaggagaagccttctccttcaatcatgaagagcaggaggcgacttgtgtggcaatttacggccaagcacaaagctggtgaacaaatgtaaagctcgtgaaggctgcgagtacggcaccatatgagccgctcctctcaccgttgcgaatgtcagtagattcccatactctactacccatccgccaacctacgtaaacgtcaataagagggttaagtacaaaacctaacaaactataaaaaaaaaaaaattgcaaccgaaccaaacatttaaaaatgaaaacaacggtagtaattttcttacacctataacgaagttaaaatcaaaacaaatttagtctattaaaagattcattataaactaaactattaaccaaaaaatacattttattacacataaaatatataacttagtttagattatttttccactttttatactaaaaaaaaaaaaaaaaccaaacctactttcacaaaaccaaatcgaaaccgaaaccaagcgaaaccgaatggtcaaaccaagtccagagcatacttaaggttttctgtggaacaaacctgtcctttgtcgaaccaagccccataaggaactgtggtattgaagttgagatcatctgcaagttcttttaccaaagttcttgaaccaagaagtggaattacagaatcttcatctccactgcagtaataaaaaaaagttttgtaaggttatggtaaatacacctaatttgtatgatatctgagtaaaattccacaaatgctaaaaacatatgagtaattaaaaaaagatgtatgatattctaaaaataaacatacttttctatgctatttgagtaattaattcttatttttatgttactttattcttaaaacaagattttgcaaaactattttataataaaatttatatatgacaaactgttatattatttatataattatcatgttaaacttggcaaagcttgatatcgctgcctttgatgtttctggaaacaattctataacttgggcattagatgcaaaaatgtatctaaaagtgaatgggcttcttaaaaccctcgatctgtgtgaaacgacgttagaagaggaaaaggcaaaagccatgatgtgtttgcatcaccagctccacgatagtttcaaagatgaatatatcacgagagaaaatcccgcagatctcttggtctctctcaatgataggtttgatcaccaacaatacgtgatcttaccaaaagccaaacatgaatggctaaatctgcggtttcaggattacttaagtgtaagtgaaaataattctgctttgttcgaaattacttccaggatgattttatgtggagagaatgttttcgattatgatatgatcgagaaaacttttcaacatttcatcctacaaatgtaatcatgcaacaaactatcgaggtagaggctatacttgatattctgacttgatggaggtccttcttgttgctgaacaaaacaatgaactcatgatgatgaatcatcttccaactggatcagctccactttcagaagtaaatgttgcttccagagccgtgcgagcgctatcgcgtatcagaagcaaataaaaataaaatgcccatataaaaaaaatcgtctacaaaacataaacatcattgtcatg

SEQ ID NO: 15165 - DNA, 3123 bp, Arabidopsis thaliana landsberg
agactacccgaatgtgaatcatgggtcaaaccgcggatcacatttctcaattgaccactacacgcccgatgcattccaaatgcatggcgagtcttggcaatcttgaccgactaatggaggagcttaccggaccaatcactactctatggatcactctgccgccttcgttcagaaccggctgcaagataaccgctcgatttgcccattccaccactgcgtaccatctcttggagatcaacgcgtgggaggacctcactcttctcatccttatggagttgcccgacatgaagatctcagatatgaccaaggatacttgcaagaggtgatgagtgtagatgtttatccgaacaactatgcttaccaaactaatgagccctaccagaccgccgaggcggaagatagactgattggtctcatccgagacttcgtcttgatgaggatcaactcaaggatgatggagatatataagagccgaatttggagagaagtttgatgacctcactattcgactcgagatcatggaggaggcgcttgttgagattaacaacactctccttaaccaccaagatgatatccaagaacaaaacactagaatcgtcaatgtggggttcaccgtcgatattgttgagagccatctagattggaagattgaggagctagagaagaagctcacttactcaaatgagatttcggaatggagaagcattcaatcttgccaagaagaagataagtctcttaaggaccaagcccgttatgaggaggaaacaaaaaaggaaatcgaattcctagtggaaaacggaaaaaacctagtttccttttccgaaaaaggaaatcccgaccctataagacccttagggattcttatccccactatttctcctcaagaccaaatcgagcaagaagaggacttagaagaagaagaagccgtctctttagacgaagattcgatggccgatacctactctaatggtgagagctacaaaactcaagaagggcatgaacagtccgatgaccttgaggatcggactgatgattgttcaagaagtgatgatgggctcaccgattcttcgagagaagaagccaattacgcaagattcaaggacacctactactgcatgactatcatgattcccgatgaaaaacgctctcgaagaccatggtttcggacaacctgaaaccctaaaagaaactattattagaggaaacgatgatgttgccccgcctaatgcttccccgcccttgggaagaggaaagagcacgggcaataaaagccaaggaggccaggacccgttcagcttgaactgatccgttcaaccctttcgccacctgatttcgtctctacaagatcactctcacgtaccatggagacaaaagagtcagacttgaaagccaatacttggactaagaagcgctagacacaaggactctccacttcaagatggataaggttgatggcattctctcaagtaagatcgatgagctttccttgagctttagaagaatggaggtcaagctcacgaaagaagttgtcgccttgacaaagacggtacaaactctagaaaagagcagaggaaaggatctagagtataaccaaggaagtgcccaaaccatcggagaattggccatccggatagccgaggaagagtaggatcacagactcgaccgttagagagctccttgacaagaatgcggtcttgaaagaaagactccgaaaacttgaagagagagctaacaagaacgaagagaaactccatgaggaaatctttctccttcgtgagctagccgactgccaaagagaagccgaaaagaatcacatgtttgattttaaggttctctttagtaacaatatgagttcggcggctcagatgaagaagtacgaggacgaagctaaggcgaccatggtcaagattcataatctagaagatagctataaaattctagccgagacaatctgtttcgaattcgataagtccctcgacctgttgcatgggataaagtccaatcttggatatagggaaacgacgtttaacgaaacaatcgagagattggataagaagtacaactctttactccttcgtgctgccatctgcgagaaatgtatagaagaggactcaagaagagagtccaagaagggtcgagacgaagctaaaccacaagaccatgggcaagacccgaagccaattctcccttgtaaaactgcagtgtcgtggcctagcggatacttacaaaagggaggagagtatacctcgaaatcaaaagaagaagatcgcaacaccccgagttccgagaacgagcaagcttatcctgattcagaagaagaagcgatggaagctttggagatcaaagagatgatccgcaccactcagaaaacggtatgcgatgcacctttagagacttcgtaacagccatccgacttgatacttcgttcgaagaagcatgggagaagtttccggttaagagactcttcatggaaagctatatttctaagggacgagtttgagaggtgttcgaaaaaacgagaaggtcaatcttcaagaaaaagagagacaatccaaagaaacctccggaggaatccatacccaagaggacttgcctagggcaaaacaacccgtcttactacgcctagtaagacccaaccgtcaagccaacgacgttaaacaagcgcgctaagtgggagacaacccactaggtagctactttgtccttagaatttttattttgcttttacctttgacctttttagtatttgttttagttgattataaaaagaaaaaaaaattagaaaaatagaaaacagaaaaacgaaaaaagaagagaaggaaggagggtcacctaaacccgtcattaggcgccgtgacaaccggcccggctactcgcctgagtaaccggtgccgcctagaagagtcggcccagccacgccaaaccttggcctgagcccgccgagttgcgccatcacttggccaacgtccaccggaccttgccaacactggccgtagtttgcccgactgtgccaagcattgactagagtctgcacagccgcgccaaatattgggcgaactccgcccgataataaacaaaccaaggccgaagcccgcctatgtgtgacgaccattgccagagcca

SEQ ID NO: 15166 - DNA, 3111 bp, Arabidopsis thaliana landsberg
ctcgccgtgattgtgatcggcggaggtatcgggaacataaacttctccaaatcaaaagaaccgagtttgtttttcgattccaattggagtctctgtaggaacacgaagaaatgagagagaagaagaaaaaaaataaaacgcgtgtttttttttgagtcaaaacttttacccaataaagtgaagctacgtatgggtttctattgggtcgcgaaaaatccaattttaggaacgatcctaaatggattgttttgtttttttttatgttgggcccattttacttagaaatctaacataaaaacccactaaaaaccattgctggacttggtctaagttctaaatccagttacttggaattctattagttaggcatgactatggttacggttattacggttacagtttattaaccaccggttacggttataattttctttaatcgtaattttaaccgttatatatatacaattaaaacagttacgattaaatacatttacagataactgtaatagagttaatatataagataaaacattatattttcttaacctttataataaaataaataaattatgatgctttccgctatgataagcgtttgtttcacaaggacggatttaaagaaagggctctcgcaagctggaatgatactacagactctatccctctcgcaaggaggattcggaattgtcgcaagtcaatggctgcttggaaacgaagaaacaggacaaattcagcagaacagattgaacttctcaaaaggcggttagactatgctctatcaaatactggttttacaactcaagacatccattgtatccgacaagagttgagtcaagcttatcaggatgaggatatgtattggagattgaagagtagaaccaactggaagaattttagtgatagaaataccaaatatttttaatgcttcaaccaaatcacgtctagcaaggaacagaatcctatcaattgaagacaactacggaaactttcatcatggtgattcagatattggtaaaatagcagagggatatttccaagagctgtttactacaacacgagacgatcatgttaactaccagtctgtttttgagggatttcaaccacgggttactagtgagatcaacgatgatttggttagagcagtttcagatgaggaaattcagacaacaattttcgccattggagaggataaagcaccggggcctgatgggttaactggagccttttatcagcaattttggccagatatcaaaggagcagtcactcaggagatacgggattttttcaatacaggagaaatgggtgaggaaacaaatcacgccaacatttgtctaatcccaaaaccggagatacctacctcaatgagtgactttaagtccattgcattatgcaatgtaagctataagatcatgatctcaaaaatattagtaagccgtctcaagcatcatctctcaggcatcgttacagagaaccaaacagcatttattccggggtgtaatatcatggacaaagtgatcatggctcatgagatgctacactcgttgaaatcaagaaagagatgggctagatcctacatggctgtaaaaacagatatctcaaaagcttatgattgtttggagtggagttttttacaagacacaatggttcatatgggtttcaatatcaaatggatcaactggattatgaagtgtgtcagctctgttactttttctgttttggtgaatgggtcaactcacagattcattaaaccaagccggggaatacgacaaggcgacccgctttcaccgtatttgttcatcttatgctctgaagtactatcacatctccttacaaatgtaacttcggtcaacaaactcaagggaatgaagatcagcaacacgggaccaacaatcaatcatctactatttgcggacgatgctttatttttctgccatgctcatcccaagtcatgctcaacaatcatggagattttaacaaggtatgaaacggtgtcaggacaagctgttaatcttcataaatcggctataacgtttggatcaagagttaagcagcaagtgaagacgcaacttagacgaatactaaacattcacaatgatgggggaggaggtaaatacttgggtctgccagagcagataggtggaaagaagaaggagattttcagttatattgtcaaccgtgtgcaacagaaaaccaaaggctggtcaaatcgtttcttgtcagatgctgggaaagaaatactaatcaagacagttgcattatcattaccagtgtacaccatgcactgcttcaagttaccaaaaggaatttgtgatgatatcaatagtcttcttgcacgatattggtggagtaagagtccatataagaagtcaatgcattggttagcatggaagagactgacaataccaaaaaatgaaggcggtttagggttccgagacattacaagtttcaacaaagctatgttagctaagcaagcatggaggatacttcaatctccaacatcgcttctctcccgtcttcttcggggaaaatactttgaaacaactaacattttaaatgcaggtacaggacgaaaaccttccttcatttggcgatccattctggaagggcgagacttacttaaacaagggatccgaatcctaattggagatggcaaccaaacaaacatatggacagatccttggctcccaacacacccatcaagaccacctcaaaaacgagacgatgctatcacaaatctcactcgagttcaacaactaatacaagacggcacaaacatgtggaataaagaaatcattgaagatacttttgttgaagaagatgcaagactaattcaacgactgaggttacgctcacggccatctcctgatcttttgggatggaactatacgaaacatggcgagtacacagttaaatcgggttactggttatgtacacacctaccagatcaagtacaagattttgttccgccaccgggtttaattgagttcaaaaaagcaatctggaaactgaatacggcgccaaagctccgacattttttgtggcgcatcatcacgcattctttggcaaccgacgaaaatttggaaagaaggcatatcacttcagattctcaat

SEQ ID NO: 15167 - DNA, 1678 bp, Arabidopsis thaliana landsberg
caacttaaaattttaaaaattatcccgcggtacactgcggatcatagtcctatgttattaatatataaaaaaacacgtaataacgcacaataaaataaacacgtatacattagttaagaaaactaatttattatactacttatttttaacaaaaatactatacaacaaacacgtaataacgcaccataaaaataaacaccctatataatgatgcgtataataaacagattttcttaattaaacaagatcaaaccaacaaatacaaatataatatcaaaaataaatagaaaaaaagaaagatgataaattcaaaatataacttgattatataaaaatagatgatatagagttgaaaataatgtaattaatcaacccgcggtgtaccgcatgttaatatctagtatagaatacataaataattcatattagtctcacaactattatcatactattatattgttataagtgaccaatcgcaattagtcgtagcactaattaatacttttgacatcacgttaataaatatttttaaattataatattatatatagtaaaatatatatatatatatatatatatatttggcaaacactcttttttcattaatcaatatgaagacattactaagcggagagactctttagcaagcatatcagctgccttgtttgtagctctagagatacaattaaagcaaagtacatcaaaattaacaaatagatgaaggatgtcgtgttgaatcccatggagttcttttgagagaatctccgaatttagcgctttgattagtaaagctgaatctgaagcgatgtgaagatggcggatcccaagctcaactgcatgttgggtcgcagcgaggactgctgaagcctctgccaataacggcgatccaatatttcgaatctgctgaagcctctgccaagaagaacaacagtgattcgaagaagaaattaatatatttcgaatcactgttgttcctttttcaatctggatcccagttgtcaagagatcacaagcctacaaagttcgaggaagaagaaccaatgatctacgacactacaagaatcttgggtattcatagcattagaagatagcaatttatgtagttttgctttagttgatttacccgtaactttttcatagcgtttccaaatttagaatcactgtaatatgtttggtggaaaaaaataaaaaaacgaactgctataatatctttttgaaaatatttactcccacttatctttttatctctagggttttctaaacatatttaatgtctgcgtccaaataaaaattggctccaaaacagtttaacctaaaaatatatctattcatttttgtttccttctctcttgcttagttttttaattacttcgtctccttttttactttttattcttccctcaacataattttttggatctaactagacaagacggaaatttagtcacaaaaattgtatactttaccgtagttggtctcaaatctgtacttatatttgtggctatatactttgtaacaaattggagataaattagtgacaaaattggttaccttcaattcagttacaatataataataaattataatgtttcatgattaaaataaatacgtcacaattttgtatgtaaatagtcataatcttctgataaaatatggtcacaatttctttgtaagaata

SEQ ID NO: 15168 - DNA, 6380 bp, Arabidopsis thaliana landsberg
acgatataattagaaaaaaccataaccgcttctctgatccgctgatcgattaggttatctacaaagaagacttttgaagatcctcaacgtaaagaggattcgattctagggtttttttcctctccttagtgcgagattttcttatctcttaatgatgaagtaagtccgtatttatagattggtgtgagttaattaatttcctttttttataaaacaaaatattaccgttacattacatattctccggtttaccgttgcatacaaccgtttaatataaacgttgctgtgtgaagtgcacgctcttgttcctcttatcatttgtgtgaaaatacatcaaatatcaccttgtttttttgtcaagtgctctcgtttgaatttttttttggttatagagtcatatttcccaatttgcataatgatatacaaatataaaccggatggcccaaaaaggcgaaaaccattagtagtactggcccaaattgcttcttcataaaattaattgttttcggcctcaatactatttcatgttttttgggtcaacaacgtccaagtaccctttatataacataaataaggattgttagaaaagaataattttgatgtgtcacgattattttatcaaccaatcactgatctctaggagaaaaagtgaggacccatagtttaagcgacactctttggttaaagaataaagattagatcggtccaatttatatatttacatgttccgccattatcatcttctaatttgaaaactcttcatcattccctaccaccggattcaatggcggcgaaaattcccggagtgatcgctttgttcgacgtcgacggtactctcacagctccaaggaaggaagctactccagaattgctcgattttatccgagaattgcgaaaggtatctcattgatccatcgttgctaagttccgtttctgttggttgtgtttatgcctacttagtgtttgatataatgtatgtgagagtttcaggtcgtcactattggagtcgtcggtggatctgatctaagtaagatatctgagcagcttggcaaaacaggtacgactgtgatcggatcggaaaaactataacctgctgtagaattttcgatttggtattcaaagaaaggatattttcctacttctattagaatggtctcttttgctcttttctactatatatggatggatcctttaaaagtggagacaaactatatagattttctctgcttcaaatctttgactagatccattagtagcatgcatacagaagatccttgaagtctgtagatttggaatttgggatagctgctgatcattaagttggttgagttcaaattgtggaatgagtttgatttacctaagtcttagttcaagaaggagttttagatctggctctaattttcttgccttgtgagattctcttggcttaaacttttgaatttgtaaattttgcagtcacaaacgactatgattattgtttctctgagaatggtcttgtcgcccataaagatgggaaatccattggaattcaggtgcatatgaacctatagctttacttacttacatccacattgttgttttatcgtttcttaatagtttgtatcttttttctcagagcctgaagctgcaccttggagacgataaactcaaggtaaactcatatcactgtccttcatgtgtcgtagcagcagttgctttagtggttttattgatgttgaagtgtatgcaagtatatatgtatatagatagtttctgatagcgtaaattgatgatgcaggagttgataaatttcacgctgcactacattgcagacctggatattccaattaagaggtataacgtggatccaactgctagtctctaatcatgtttgcaaagtgataagatgatttattttcttgaaatttgtatacataggggaacatttattgaattccgaaatggaatgctcaatgtatcacccattggtcgcaactgcagccaagaagaaagagatgaatttgagagatatgataaggtagaagaaactatatttagtttgttcaatttcttatagaatatattttgagcattgtcattcaacactttttttaaaaggttcaaaacatccgaccaaagatggtagctgaacttcgtgagcggtttgcacatcttaaccttactttctcaattgggggacagataagcttcgatgtgagtagaatcaaaatgtggattataacaatttcttaaatccattttttgagtcactgagtctaatcaaattgttatgacttaggtcttccctaaaggttgggataagacttactgcttgcaatacctcgaggacttcagtgaaatccatttcttcggtgacaagacctatgaggtataagactcatctcaactctgcaaatctattcattagagttgttgtatggtttccgttgagcttgatgggtaaaaatatgacttttacttctgcagggtggaaatgactatgaaatctatgaatcaccaaaaacaattggccattcaggtcagctacttggatatattatcgtttaatctctgtatgtttgtgttgcgaggtattttcatgacaaataggattgtttctgttgttgcagttacgagtccagatgacacagtggcaaaatgcaaggctctgttcatgtcttgaaacactactcatctcaagaacacagtgtcaagagtttgattcttctttggcgaaatctcacaactcttgattacaagaaatggagagaagtgtgtttgaatgctatctataccgtatgttttgaattttgattcatcaaataaaatatcttgttataaccttttgtttcagaacatggtcctcaaagttttaaaactaaaggttaaaaatatcctcttcaaaaaaaattggatgttaaagattttgtttacaacagattctctccaaaaagagctttaaaactttacaagaatttacaagaagaaacaacaacaatttgtatttatatattcattaaacagaaacgcatataaaaacttcaaacttgagaactgataagatcattcctccacgacattttcaagactcaacgaccggctcaggctcctcttctcctgcagcttcaggggcagcgtcatcttcttttgcttcgggaattgaggcggtgtcgtcaggtttgtgatcatcagaaggaggagaagcgccaccagaagaggcggatcgacggtggttagcagcggcttgatggacgtgattgtaactgcctttctcgagaaagagctgattgaagtggactttacagtagaggacgccattaagagaagcgtaagaagagtgagtcaaaggacaaccactgtgtgtgcacctgaagcatgtcttgtggtgactttctgctgccattgatacttgctcaagagggtaaacagttttttcgcaagcggcacacttgtcttgtgttccacagaagatggaagatatcttgctgggagtcctagtctgtaatgtttaaatcagtacacagatcctattagtcgatcataaaagaaagaaaatgaaatattgacacgctaatcatatacaaggacatgtaatgatgaacctaccagctctggcttctcagtttttcctgagaaaagaaagagacttgttatgatcatgatgatttgaaagatagagagattcgatgtcagagattttataatacgaacctggttgaaagtttttgctgtaattgccagattccttgaagagttgctcaaaatgagtcttgcagtacaaaactccgtccatggaggaatagttgctcatctgccatcaacacatagataaattgttgatataatatgatcatagaagatctaacaagaaaatgagtaatgagtgcacctgaagggttcctttgcaatgggtacacctgaagcaagacttgtggtaaggcattccttcaatggacaacatgtccaccacatagactgtcttatcacaaacattgcatttgtcgagagttcctgtgaaagacattttttttgttttatcttttttttttttggtttttttttggttgttgttgtttccttccttctccaagatcctgtatgaaacagattttttaattttttttccaacaaatcaagaggtcatctgaggaattagttaaagaaggaaacctttacctcagacaacggaggaacctgcgaaatttctgtcctcttttatatgaaactttgttgcaattgtgaggttgtaacggaggaaggttttttcctttttttctttctctctctctctctctctctctctctttgatcttttttgcaaaatgaatgagataaaattgggtggcaaagtgattggagttgagcaaaagaagggttgtggtttctgacaatttcaatccaataagggattgttactttaagccaactgtctctgaggtggtgcaacccatgtcagtcagatcctgcaaaagaatataacaacaacctaacattacacaaatatataatatcattctctctcaatcaaaacaatgcttttaatacttatctgtatgcgtatctatcaagatatccagttgtaaattaaagtaattttaatgtatagaagtaaaagaaagtgaagcaccactaagtcgattccttctttttctattatcttttagaactatagtgtagttcaagtctccctttttattaacatattaccacagaatttgaatagaaaaatctgatatgcaaagttaaagtagtcttacaacacaacttgttgacacaagatgagatctgagattgtctttccgtgtcggtcgatcctcctggaacagttgactccaccatctaatatgttccgtacgacaacattcatagcatgaatgccttcaacgtcatatatctctactgacacattttcatccattggttttgcatccaattccagaaacgaagaggttgataacagaactgacatcacatgctttacccattgaggagtaattatgagtttcagacgctggacatctggggaataatgcgggattattgagaagtttatgtcgtttcctttatcgccagcccggctatgtgcaacagagtagagtgggatcttttggccagatggagcaggagagtgatgaaatccagattgatagcctctcattgtaaggttctttggattttccttaggtaactacaaatggaagtaataacaaggtgttaatacaaatgcacatgttagagttctttcacatttttcagctttcaaatagtaaaacatatctatcagtcatcagagttagtttgatgttcgaacacactaggattgattcaccaaggaatttgaattcaggtcatgtttatttccattatctatcagtcatcacaattagtttagtaagaactctcgagctaacctttggcattttctctggagaatgatgttcagaggtctctggctctgaagtgttggtgtgctgaagtccagttttccacattacagattcacggctgacctggataaccaaacatataacatcagaatccgtaaaattgattgatgcaaggctatattagtttaaattttttgatggagacgacctaccaaacgcttttcaagaacaatttccatcttgtgtccggtactgcatataatttacaagcagttttgtcaaaccaaaaagaccatcccgaatctcataacaaataactagtttcaatacattgtccctagtcataagatgtctcaactcaacaggatttggtactactgtaaagctacaattagcattggattgatatatggagcgaacatcaacgtgaagaaattacctaattccaccaccaccagctggtccgtttgtatatagagcagtaaactcttttgttaactggaccgcatgttccttcagtttaaaaagaccatccatacgtaatctaatatctccacatgactgccaagattcagtgccgttgcttgtcgccttcaagctatcaaccccaatcacataagaaagaatacaatggttaacaccaggaatggtttcttccatccaagatcgaacctgaaagaaagaaggaaaaaacacaagtaaaatacgtacatacacttgataagaaatgaactccaatttaaggcaccataaggagtcatttcaagcgacgatggggccaaaaaatgctactacatcatagacatattaatcataggcgcaccagaaactctgaagctttagcacgttgtatagaaccatttcctccataagatatctctccccaccctttccaaccacactcctgcaaagaaaatacgaattatagaaccaaacataggttgctctttagcatcaatcaaataccaccagcattgtctatggataacaacctttggaattaaccgcaagagt

SEQ ID NO: 15169 - DNA, 2749 bp, Arabidopsis thaliana landsberg
aacgaagattccatgaaggagatcgagttctccggaaagttttttaaaataccgccgagccaaacgccaggaagctcgggacgaactgggaagggccatacttaatctctaaggtcatccgacccggagtatatgagctcgccaacttaagcggcaaagccgttccaagatcctggaacgcaatgcacctaaggaaatactacaactaaatccaaggtgactaaacttgaactacgaggtggcttgatccttgaaaagggtacgtaggcagctcatcttcggacgagttcagctaccccccccccccattagtaagggggggagtgggtccgtatatccatactcccatttattattttgtataagtactaacttcggcataaaaaataaatttgattcacaacttttgaacgcttcagctaaatacgatgtgcgacggctcgtagtatcttttacgcctgctcggctacagcgcgctatataaatataagctaaattctttcagattaattttgagaagaaatttctatcttcaaaaacccggtcatacacaaacaccggtaccccagctcgtttctaaacgatggtcaaagggtgaatcggatcgggtcgcaaccgagaagtttcacccaaaatacttaaactgaatcatatcaggcagtaaaacggttcgagttttgtttttagaatccaaccaagtatttcagattgcaaaatggataaagccgtccaggcataggttctacaaatcgttggataaagccatccaggcacaagtacaacaaaccgaacagattaacaaaaaaaaaaaaaaaaaaacgatgacaaaaaacggctctcgcgtcgtctacttagtcgagctcttcagacgggtgaatatcctcggcaggcagaagtgacccagactggtcggtaacccccgcctcgtcggcaagagtctcgaccgacctgtggccacccggacttaaaggagtggggtcgagagtaggagccttgagttcctctttcagctcggcgataaaattggtgaaatcgacctcggcattggcgaagtctttcagccattcctcaacctggtctttctcggtcgccaactctccaccttcctcaagtgccttgatcagttgcgcattagcccgcgccttggataagtatataaactgatcgttgatcccatcgagaagcgacaccttctgctcggcggccttaagtctggcgatgaaaacctcggaggtctcacgctttgccgtttgagaagcccgagccacttcgctatcacgaagccccctcgcctcggccagcatgcgtttgaggcgaacaacctcggagtccgcccttaggttcagctcggccatcttaatggcattcggcttcctcctttgctactttcgctgcagcagcttgggagagcgcctcatctctttctcgctcggcagcttggatccgagcatccgcttcggcctacctgttggccgcctccatgttgttcctcacggccaaatcgtacgagtgcaccattcgattcatcgaagcaacaacctagaaaacataaagaaaattacagatcggagatccagacgcgatgaatgaaaaagttgaataggcacttacccgcaggaagtgggaagccgtttcagcatacttccgcgactctagaagagtatccggaggaggaagcaaaggaccgacgcaccccctgaggaggtttgcagaggctacccggtcctcaaagattgggagttcttttcccgcctcggcactcgaggctttcttcttcttgcttttcttcttggacgatgaatcatccgtccgaacacgtttacccgcggccttgtcgctcgcaggcagcacaacaactgcctcgggcaaaggcgcaacagcagtaggatcgacctcttgagcttcagaaggcgtcgggtcaaccggggccgcaacttcgggagcaacattccggtcttgagtcgcatcgggagaggctacccgcggcaaaatcaatcctgcattcgcgaggcgtttctcttccgccaagcgtctctctttatcttcttttttcttcgcgtacacctccctcaaagtgagcttagttgactgcatatcgacgaagaattgagttcggtggtccaaagattcttaactggtaggacaggaaacgccgtgaataagacggagggctcgttcgactcgatcccgagagaaatgtttcgaccaatcacacttccgagctgataacgcgtgataagccgagaggaaatcgtcaggaatcggctcgagaaacttgagagtgcgttctccaacaaaggaaaactagttagaaaaagaaacaaaatatataaatcgcgtcagacgtaaacatatcgctaactacaaccacccaaagttccccatctcgtcagaaccgtccgagaagatcatcgtgaacaacgtctccgagagccacgtagaagaagtgttcggtatacgaatcgtccttgctcgggaacccgtcaataatcttcttacccttagcaggagatatataataccgatccacttcgaattttggaacccgcctgatctcgagatgagcgagcgtaatttcagtttcggattcataactccgaatcaaaatccccagcaaatgtctcaaggatcacatcgtgatatgggaaaggacaatctgatatgatgtcacatactccagaaccagcctcgggattggcagccacaagaagcaaccataaaagaacccctcatacaaggtatagaaacc

SEQ ID NO: 15170 - DNA, 770 bp, Arabidopsis thaliana landsberg
agacctcttttatagcctgtatcagctcttcaatggataagtaaagaaaaaaatagaaactctaagtttccaaactccatatgaaacctaactataattataatttcttacctgtttagatgaacccatgccttgtccaacattatatgttataatataaatttaaacatttatagataaaatagagatacagattatacaattttccaatcatagtccacaataagcaacaattcagataattccatgtaaatattcaaatcataagcaactttaaaagagtttttcatattagaaatcagtcaatagtacaccaaatcaggcacatacagatgctcataaactaatctcacgataacttaagataattaagcaagtatactaatctcatcacataaacaacaacattaacaagctatatacgaatcagactcaaaggacagaacattgcaatcaactaatttggttgaatgatactaacctgttgtgtgagtacagagaaatgagaagcttcagttccccaacattgcaatcaccagcacttggaaaaaaaaaactcattcagtataagtttacacatgaatcgttacagattgaaacatgaatcgtttatgcaacaaatatgtaaccaaatcagtaccctaacttgtataagtttcacacatgaatcgtttatgaaacaaatcagtcaaaatcacaatctaaatttgagtcgaaactattatcacacatagaggtcaaatcacaatcaaacaggtcgaaatcacaga

SEQ ID NO: 15171 - DNA, 1401 bp, Arabidopsis thaliana landsberg
acatcatgaacattaaaatggtcgaacttttttgatcatttctgaatgtttttcaaccatttatcttaaccaattcttgaccaattatctacttgggttttgaaatattatattattatattcaaaatattgaaatttagatatgattttataattctgaattcataataataactaaatcaaaagtaaatgtcctaaaacatagaaaatctaaattaaaacacatataattaaaaatacactaattatacatcaccataattaactcttgcaagctgcttcgacaaaacgggcacgaccgtgcacgcttgtttcatacaacgattactgtaacttaaaaaggctgatgaatagtgaagaaactgagaatcctacaagccacacaccttgactccttgagcaacagagcaatcaagaatgtaggcaacttttttttttttttttttgaaaattggcagttggaaataacttttaaattcttttattggaatgtttagtaagtttctcacattcttgcaggtttattattttcgatagagtaattaaatagtctttctttaagatttattagctagactaaaatatacattccgaaacgaatatattatttaaatgggaatggttaaatgtggtggaaaattcttgacaaatatgggtttggacgggttttatgtcacgaaatagacatttctactaattaacaaaaaataaaattcgatcactcgttttatctaaaccaaactgaaacctaacttaatactagactcatttgagttcaaaatataaatactatattaaacaaatacgtttacgaacataataccgcacaaatgtgcggtttgaatctagtttattttaaagagaaaacaaacaaacgtaggttttattcaacaaaagaaaaacacacacacatcaaaatgcaccttcaataaccgtattgaagttatatgtttctggaatagttaatcacacaaaaagttcttccttaatacgtggactgatcagaacctcaagaggcgtggctttaggaatggttaagccagggttctcactcatatcaacaggcatatccataacagttttcacgtcaaatgaatgaaggaaacgagcaagacctaaatgaagcacttgcatggccaatgaagagcctgggcatgatcttcttcctgaaccaaatggcatcagctcaaagttttgtcctctcacatcaaactcttttgcttctcctgtaatgaacctctctggtctgaactcgtttggttccatataaactttcggatctctttggattttccatacgttcactatgagtcttgtgccgcacggaacgtagtaaccagcgaccgtgcaatcttccatcgcctctcgagggcctaagagaggaccagctggatacaatct

SEQ ID NO: 15172 - DNA, 611 bp, Arabidopsis thaliana landsberg
tcaattatccatcacacatggagaaactttaacaatggttttacaatatatataaacgtaggattacctttagcatcatttcctataggaacatcatcaattgcgagaatgatgtcatcttttcttaatcttttgtaagcatccgacagagggtttatttcgtttataagaatccctgtcatttcaggacccatcttaaagtgattacggagttgagaattctccataagttgataggaaatgtctaacgtgcagaaaccaccatattgtccattttcttcaaaaccagttaaaaaatgttttattactggagtcgggattatgtatctgcaagtgaagttaaaccacaaaaatatattatttcgaagccaaaacccttttccacgttttcttcctacttcctagaccattatgcttttaatattgcaaatttaagcagatgaattatccaagatttgtggtttaaacgtaacttaccctatattatctgcagatggatctttttgaaaagctacacctgccattttatttcctatgattgctggaccaccactatttccagggtttatagccgcatctgtttgtatagcgagtagtgtagtgcctccgtg

SEQ ID NO: 15173 - DNA, 770 bp, Arabidopsis thaliana landsberg
  unsure (1)..(770): unsure at all n locations
agggttgtaaggctctgcggaggctgatagctttgtccggcttatatcagaagtttttttcccactataggaccccagatccccttcagactctgacgttaagttttccactgactcagcactttcttgtgattcttgtttctcacagtgaagctctgtgccttcgattggcaaatccaacattacagtgtcagacttgctttcttctccagatgacgcacttgaagtcctgtatatctgagtttcagttctctccaaattcagttctaatttttctaacattggcnnnnnnnnnnnnnnnnnnnntgccaaagcaacctctttgtatgagagagactttgaggccaaagtagtactggtcacagcagcagcaccagaagcctttaactgtggtttagttgtatttgtactgacatctatctctgcattctttagagccctacggggtgatgacttagagagggagggtcctttgcttgttttctgcaagggagaatatatattctgttgctgaacatcctgattcctgttgtgatgtttattaagcaacattctctttttcataagatcaggctgcctttgtctggatttccttccagcaccatttccggatctcccctttgagtatgcctcttgccagccctcgtctaaagttgactattccacagtttgccggttcacatttagcgtgtgtgatacaatatcacctgtatcaatattggtattatcctcgcctgtatcaggatcatatacttcgctcctactgttag

SEQ ID NO: 15174 - DNA, 1452 bp, Arabidopsis thaliana landsberg
  unsure (1)..(1452): unsure at all n locations
gtgtaatatatcaaagtacaatacaataaaggcgtaaaagagagtataataactttattacatcatccagacttaagagtcttaaatagtatcataatcaaactacgacagaaataacatgggcaatctcccacaggaagatgaccggagtgtcgctagacttagaactcatcaaaatcctcgccaaagtcttcttcatcaccttctgatcaaaatattagcaagggtgagctcacttatggttggggctcagcaagtggggggaattatgcaaggttaacaaggtaaggctatggtttaatggggatagcattttagttggtcaatattttattatcaacacctgcttactaagtataagtgtatcccatccaaaattaagtatgagcataaataattatatccaaaagcacttaagtgaaaacacttaagcaaaccacattatcctaaaagatcatgatttaataaccatctttgagttcgattatcatgtgaggagtccaggctgctcataaccgtgagcacggttgatatatcagttttacactctgcagaggtggtgcatctttacccatgagtcgcgattcccttctagcccgggttagctagactcgtattcactttcgaggtgaatggctagggtctcactacgaggcttctccctagagtcctcaatacgcaaatgttggaaatggtcaaactgcataaagcacacctaacgtaaccaacttatagccagactgcggggtaaagctttgggaattatgcctgtatccaatcttcctgagccagaactataagagcttgccaggtgcccccgttcctgtcaaccacgaccagcacccaacataagacttccctagttatttagccaagaccagagccatgatagttctcatggtagcactgttttcctggtgtggtcgctccatgttccaattaacataatgatcttatcatgaacagtaataataaatagataataaaagtgtgatcatgaataatgtatcttcatacccaaaaccacataaagcactagcaagtactaccaaaaaagttcagtggtaaacaaggtataaagatagacaaactagggtaacctattgggtcccatcaaaattaacctatgcagatcattatgattaattagaacatgagtgggtaaaaagaagtgatcaagggcacaacttgcctgggacttgagattccaggtaccaacttgctcttcagatgacacgtgacctcactgctagtcgtagtaatacaaacaaacagtatatagacaagattaacattacaccaaacataagtacaaactaaataatnnnnnnnnnnnnnnnnnnnnnnnnnnnnnggaacgagaaccactaagatcggagttacgattattaagttatgattttctgaagttatttaaggcctagaatagagttattcatgtggataatttta

SEQ ID NO: 15175 - DNA, 3412 bp, Arabidopsis thaliana landsberg
tgcttgctgcggaggaaactgcggatgtggatctggctgcaagtgcggcaacggttgtggagggtacactctccttttgtcttgtttgtatttatatttcccggtgaaatcgttgcatgcaagtatgcaacaactgtgaatcgatgatgatatcttgttttgatgaatggtttcttggagatttttcttgtaaaaaagatacaactcttttgaatttacacgatctctgttttcataggatactgatgggttttttctttcgattgttgcagttgcaaaatgtaccctgacttgggattctccggcgagacaaccacaactgagacttttgtcttgggcgttgcaccggcgatgaagaatcagtacgaggcttcaggggagagtaacaacgctgagaacgatgcttgcaagtgtggatctgactgcaagtgtgatccttgcacctgcaagtgaagaagcctttttaaataagcagagataatcgagtctctttaattaattaagttattcaataagtaaaccatatataggatggtgtttttaggtttggtttatgtgtaataatggcttcagcttatcttttagccgatcattgtcttttgtgtttgttttgatcatatcttttagatgtctagcaactctgccatgtgatgagtttgtacttccagtggaatgataataatattatagttttaaatctctttgttcgttgggttttcttcattggtcctccattgtttctaaattttgaagaattaattttttatggatttatttggcttggttaatgagttcgaaaattttatggattaattctagaatttcaaatatgacaaaaattaatgaataatttttaaaaaaaaaagtcaaaaccaagtgatttattccttacgttggtgaatgaatccttcaaatggtagtagcaagagcatgcacgactccattggttgtaaacacaaatgtcaaaccactctgccattccccaaatctttctcttttggcgtttttcaatcgcaattttcgcacactgtacttttgtgaccttcttaccgaacatatgctccaccaatacaactgtcattttcccaccataattcaccaagtttacataaaaaaaaactaggccatttttccaaacttttcaaagttgtccataaactcttttcggagtcataccattggatcattgtacaattacaatctagaacacattctctatcacacaatatttagatcaaataaatcaatgcaaatgatagaaaactaattttactgtaaaaaaacacaaaaaagcaatggtgaaagactaaaaacttgaagaaccggggttttgatggttcgccggttttagccggcttttgaatgtgtattacaaatttaatattaaataacaaattttgtatattacaacttttttttcttcaataacatgcatgcattataccggtttaaaaatgagaggtgacaaaagacccgattacaaaattacgacatgcgacaatggcactagcacaaatcattaggcatatcatagttaatcacataagacttttttagttttgtacaatttttgtgactaactattttataaattattttgcataactttttgtaatacattatcaaatattaaactacatttttatattataactataagttattattgaaaatttatttcattaccataaattatattttttctttagcttacggatctataaacgctaagcacggtgccgcgaagacacaattcattttagtgtatcagagttggagatccatgattcataatattttagaggacattgactatgcgagagtcaacgctcttgattttctccatgtactagtggttttctcgtaggttcacacatgctcacttaacgactttagcagatgactcccctacgctacagcggtcagagactctcagctctagggatacggtttacctacacataaatgtagtgttaatgtatttttttttcttttgcaaataatagttaattcttttattgcacataaaagcaacactaattttaatgtatttgaatacagttcgttcgtttgtatcagcatctagagacatccaataaccaaataatttaaaagctcatgcttttgtgttaaagagtagactcactattcattacacaatatgttctcaacttaaaagtctcgagataaagagaaacatcataaggattcgattcctaaattaataattcatttcataaccagaaaccttctatgatagttagagcacctccaatgggaggttctcttgtgttttttcgcaggttctctgtattttgtatcaaaaaaattaatgtaaactgaaaattaacgaagagaggcgctctctcgagagagttttttttagtttgagagaggaaacacgtgttttgctgcgattaattttctatttttaacaaaacaaaaaaagttgattttttatttcttccttcgctttcaactcactctctctcgacacaaatacgatgtcaccggcgatttgtgatttccagtgagtcgacactccgttaacgtcgaattcatcaattggggacgttgcagcaccaacggtgaacgaagaaaaaaacaattgttaatttggtaatcccatccggagtaaaatcgatcagctccaaaatatttcccaggtttgaattaaagcttcattgactaagaaaaactaattgtggggtgaattcgattatgagtaagtgtgtgttttgagtttgcagatttagctggtaatgattaaggtttataagttttgatgaatatcaatgtctttaggaagaattatttagtgaatatcaatgtcttcaactttaacatctctctatcttttgattaagattgaattgcgttgaaatttgaagaagagaatcatcccatcaaatcttattcactgaattaaagttgtaattttatcataacttttcttatgtgttcttattaatttttgtgaacttggtttagataaaaagtcagtgatgattgaaaagactgcccacattgtttgattcaccactgatatgaattctataaagagctttgtaagaagagaagaagagcttgttcatggtcatgttctctttcaaaatgaaagaagaggtttttgttcttagtgcggccaacaaggattcttatcatgagaaagagagatgaatcaaacatgagcctatggagtacggttcttaattattcgccagtatttatgaagaatcaacgaatgatgaagtagctcaggggaagaaagtttcatgtttctaatcagttttatgagtcatggttgattgttccttcttcgttttgtttggctaccgacctcggattttgcttctaaaaggtgttctggaaacttgaaagcgagatctttccaacgacataaagatcatct

SEQ ID NO: 15176 - DNA, 1485 bp, Arabidopsis thaliana landsberg
tgcgggatcttaagtgatccttgagaagaagaagagctcgccggtcttggtgatcggtggagagagggaaagggttgaaagagatccgtccttagtggactcctcaacggggactaggccttcgagggccgaacctcgataaaacaaatcacccgtgtctcatgtgtttatttgcttgtgatttgtttgttctttccctttctaagttctcttgcgctactctttgctaatattattttgtgttgcttcaagttaaatttacatttagagaagcaaccccttgcaagaaagaacttgtgttattgttcttattatctaagccctcttgcattattctccactaattttctagtagtattgctattgatgaaattctgcactctttgaaaacaatactcattgcaagcaaaggacttagtttttatactccgataattgtgcatcttgttctaaccacaaataaagggatctagtttggatttagaattataattttcaggtttcgcctattcaccccctctaggcgactttcaattggtatcaaagctagtgcttcattaagagcctaactaactcgaagtgatgtctggagatcacgccaagaggtcatgatcgacgaaaaggccgcaagctcggggaggactctctcaaagggagtccaacaacaaacaaaggaggaatcctcttcctccatcaagtcgcatctaagaggtgacaagaagaagaagatgaagaaagtggtctactacgagaccgactcttagtcaccctccacatcaagctccgagtcgtccaatacttctaagcgccatgagtgcaagaagtatagtaagatgcccctacgctatcctcgcatttcaaagcgcgctccattactttccgttcccttaggaaaaccaccatattttgatggtgaggattattctatgtggagtgataaaatgaggcatcacctaacctcactccacgaaagtatttgggatattgttgagtttggagcacaggtaccgaaggtaggggacaaggattacgattcggatgaggtcgaccaaatccaacacttaaactcccaagccactactatactcctcgcctctctaagtcgagaggagtataataaggtgcaagggttgaaaagtgtcaaagagatttgggacgtactcaagaccgcgcatgaaggagatgaggcgaccaagatcaccaagcgggaaacgatcgaggggggggggggggggctcggtcgattcatgctcaaccaaggggaggagccacaagccatgtacaaccggctcaagaccttggtgaatcaagtgcgcaacctcgggagcacaaaatgggatgaccatgaaatggtcaaggttattctaagatcacttgtttttcttaaccctacacaagttcaattaattcatggtgatcctagatataagctaatgtcttttgaggaggctataggaaagcttgtgagctttgaattgatgatca

SEQ ID NO: 15177 - DNA, 671 bp, Arabidopsis thaliana landsberg
atcagccattatgtcctttaactcaggcagaacgacacgataactcagccataacgttagacaaactgagacagaatataacaataacttacatcgtaaatcagccattatctactttaactcagacagaacgacacgataactcagctataacattagacaaattcagacagaatataacaataacttacatcatcacccagccatccatgtttggggtctgcctagttctttctttcggccatgataacaaagtagaaatgcgcctcgtctatcccactttccaaccattttttgctaacaaatagtaaagaaagttaatataaacaaatagtgtaaacatgtcgtatttaacaacttattaaggtataaagggccataccagtcgggacttgacaaataagccttaagattctgcagtttggccggatcaaccggtgccagaggatcatagattgctcgtgaaggcagacaacccttcctcatgcagctcagcccgttgtctccaatgactggaaaactgttagtgctcattagatcgggtttaatcaatgacctcccatccggggctagcttaacagtttttatcctcgcatcttttactctctgcagcctctcggtttcctcgctcatcttcatcagactcagaaaccatttgattatactcagat

SEQ ID NO: 15178 - DNA, 793 bp, Arabidopsis thaliana landsberg
gatgctccatactttaccagccctagcctccgtgtagtttttcacataggcagactccaaatcctgaaatgtgttgacaattacaccataggacgtgtcatcagcatccacctgttcgtccatgatctctttccaatctccactaaagtttgttttcacagtaacttgaagctttgtaaattcaactctatctggaaaactaggaaccaagaaatactctttgtccgactttaaagcatgtaagatattgtggtttcggtgtaaaatatgcatactcaaaagacaaaagcaagacacgccatggaaaacgatctctgggatattgaacctcttagcgattttgcctgtataaggcaaacaaaaatcagaaattaggcagcttggtttaggtttcatctcttccatgagcttcatgaccggattttcaagcatgttaaccgctttaaagaaatgtaccattaactccattgactcaagaaaatcaacattctcttgtccttcttgcaaaccagcttcttgaaaaggaaacttcacatgctcaaccctaatgtgcaagcctgactggatggcccggtttaggacatctttgaacctggctgcgttgtgaggcgtcgtgacaatggtaatagtcaccccgcgctgagccaagatccttgcaatatccaccatggggatcatgtggccttgagccatgaaagggaagagaacaaagtgaagcggaggaagaaattggcgggtcttctcgaaagccatgaggacctatctctaagttcttttttgctttgattccgat

SEQ ID NO: 15179 - DNA, 549 bp, Arabidopsis thaliana landsberg
tgggaaatggttgttacaaagatgttgatttccttgattatcaaaggaaatcaatttctgacttgaagtgttcaattgaggtattaacctgctagcaaattgactattctatgtatgatgattcatatcacctctttacttctaacaaaacgtttttgcaaatgtttagattggaaaggctaggattttgtgtattgtatacgtcattgacagtgattgggcatggtattaccttagttgttagatttgcaataagaaagtaaagcatatccatgctggagtcaatggtgtgaataacaagggcaaaaaaccaaggttttggtgtgacacttgcaatactgtggtcactaatgtcgtcccaaggtaatgagaatcaatcaatgattttaataaaacgttgacattatccattttgaataaatttgtgttacaggtttatgctatacgctattgttatggacaatactggagaggcaaagtttctcttatttgattcaatttgttctgaactcattggcgagtcaacctcatctgttcttgatggatcac

SEQ ID NO: 15180 - DNA, 2070 bp, Arabidopsis thaliana landsberg
actctgcctcaccagacaccatactaataattggagaggtggatcttttaggtatatttacttttataaaagatcagaggctagtcagaactcagggactaaattttattttcagtagtgacatctttaaaagacaacagagatttataaaactacacgtgtacagaagtgaaacagtatgacatgatgcctgatgctaactaactatgtaagataagacatatcttacatagttagttaccatgtaatagtaagtgataacctaaaaatgcaaaaaaaaacatccaactagaacatgtgatatgtcagtatgcgtatgagatcatgtgcacaataatattatcggcatttgtatgtctagatgcctacactatacagctcttactggaaatagatcttgaggaacaagaaatagttgaatgagtcattgctatcttctagattttttttttttctgtcataatatcttctagaattttattacttgggaaagcgatatatgatatattctttttccaaaatttactaattaaaaaaaaaaaaaaactaagcactctgtatttattgccatattgaaaatgctctttccaccaatattccttatttgcctcaaatcattactttcggattctactgccttgaactgtgttcatgtgtgtattccctcatcaatcaccttcaattcatattttcctatttccaaaaataaaaagatacagtatctatgtatttaattatatatcatatcaattatatcataataatcataagatcctttttatcgaaataaaaaaggaaacaaatccaatcatagcaagctttttcttttatttaataaacaaaaataaaaagcttcccgaaatggttaaaatccagaaccactaaagtcaaccaaatttgtcaaattcatccacgtcatcagttccatctataaaacgctcacgccattcgtcaagtcccaaaacaagagtccaccatgaaactcacaaacgctctcttcttcttcttccttatctgtctcctctctttatcgtcagcttcatcgaacaagcctcagctttcaaatggctcgaccatcttattcacgacgatagggagacccactttcgaattcgacatctttactctccccacgagccaccgtccaccgtcacccgccgatgagcaccgtctcaccgatggcaaatctattaacttcaacggctatttcgcttctccttctacggcgttaatctcacttctacccaaaagaactcagattcaaccacaagacgtgcatctcatctacgtcactgagagagccggaactcctagcttaaactacgacgtcgttcacagcgataacgttggatctagaattcaggttccgttattttccggcgaggaacaacagagtggtatgaatgtaaattccatgaaagacacgcctgttttaacaaacggctatcttgtccacgtgtcgacacatgagaatccgggtaagcccatggcgagttgggccgctgtttactcgactgagttacgaactaagtcgactcggcggcttacaccactgggtatcgctgacttttctccggctgtgtctccgtctgggaagtggactgccgtggcttcgtttggagagaaaggctggacttggagcatggtagagaaagagattagttcagacgtctacgttttcctgactcaggatggaactcagcgagtcaaggtggtcgagcaaggcgggtggccgagatgggtcgatgactcgactctgtatttccaccggaaaagcgacgacggttggatcagcgtgtaccgagcgattttacccaaaaccggaccggttaccaccaaatcggttacgattcaaagagtcacaccaccgggtcttcacgctttcacacccgccacgtcaccaaacaataacaacttcatcgcggtggctacaaggaggcctggatcagaaatccgccacgtggagcttttcgatttaaagaagaacgagttcctcgagttgactcgtttagtggggtagaagcctcatcactttaaaccgtttctttcccttgactcgtcccgagtcgg

SEQ ID NO: 15181 - DNA, 116 bp, Arabidopsis thaliana landsberg
tggcgctgggtgtcctctctcccgggatgaactggagttaccagtcctacattatgaggactgcgaccaagaggaaaggatgctcaaccggaagaggattgtaccatgcaagcacg

SEQ ID NO: 15182 - DNA, 3629 bp, Arabidopsis thaliana landsberg
ttgcatagaggattctgtgttctttatgtttcaccttcgaatgggcttgtgcaaggtgtaatagaagttcccaactaaccaacaaccaatttactgaaatccatgattctatattagagctattaactaccagtttggacaaagtaccatcaactaaatccatcttcttattggctcgaagggtattaagcatcgtgtatgcctattcgttgtaattttctccattgagaagcattgatataattatcaaaccaagattttttagaaagaataaaaaaagaaaggcgtcgtggaatcaccactagctacaaccgctaatttacaagcatggagatttggagatttgtatgtgtaacattccggttttaggaatataataatgcatgtagatagatttgaaagaattgatttggccacctatatcatataagttcacttatcttttcgatcaaacatcctgagaaaactctacagttaactgtttcagaacaatattaatggggtcaattgataaactctttgaggaaatctgcttaaggttagcttcaaccctggggagctatctaccaaaagcaatatttcgatagaagaggggatcgaaatccttgaggaggaatgtaacgaggacaagactcctatcttggggactatgggaaggaacccttagcctcaaccaaaacggtggaaatgagtgaatttttctcttatctgctgctatctgaatcgactaagtgtccaggagaagaggaaattatttccaccatctcaactgaagcaaagaaatggactgaacgagcaagactgaccacggaaggaacgacgaccgaacaagggctagaacatggtggagcagcagaggaacttagacggacaaggaggaagagcaaaggaaaggagctttttcttcttcttagccattgtggctttttcgtttgtcattgtgaggccagccgacagcgacaaattagggtttggtgacttaatgccgaaaaagtcgcctttttattgtcgaaaagataaatatacccatttttagttactatcctagctggataaattgctggataacatttaaaaccgtaatagtccgttttgacatactcatgcacttataccacagctgttcacgtttagttcagccaaaccataggtagctacagtaaatgtgattttctttaattggatttagaatgtcttactaaaatttttataaaaaaatgcatgtgtcgggtcggtttaggttgagctgtgcaataatgcagaattctgaacattacgaagtaattcttgattgcttttattaactacggattacaaagtgtgatataatcaattcagactgtctcaaatccattttttattttttttcattcttcattttcctttgacacaaatatgatgattaaatctacctttaacaaaaaacaaacatcaaatttggtgaaaatcatgcaataacgtcttgaacaaatcatatatgaaaaaggacgataaaatatagggcttattgtcaaaacaggtcattttttattaaaatctttgattttgagatcttttgggttgggctttgaaaaagagtactttaggctagcgagaaagactattttacccctatcaactgtatcttcttctttgttctctttttccgaccaccaccacgtttcctccgccaaatttttcagatttgtttctgttatattcgccaccggattcttttgtttcgactacgttcacaaaaactaaaccctaaaggatagtgcacatagggaacccaaggagaaaatcaaacgaattgagagtattcatcttcttcctctctttttttctgtcaaattgtgaagtagataaaccaaacttgtctatctaatcgaaaaaatgatataatatatgctaatttacacaaacccaaacccaaaacaaatgcttgaaatccttttcgctaactttctaatggcttatcagtttccaattgagaagcttaaaatctcttcttctttttttctgcaactttgaaagttggtgtattaaccatgaattgagtttgaagagaggaaggagaaactgaatctgacgacagggaggtgccaacaataacagagcaaacaaaaaatttgtattgaccatatgataagatgtttcaatgtcgaatgaatgagttgatgaagcaagggtacaagcgtcatttcatataagaaaaagtacctgaatttgtaagtcatcatgaaagtacctaatcttgtaagttttaaagttttttaggcattctagataaatatctctaaaatatatgattggtaatattgaaagacaaccaaaaattatgatttaacgaagaagaagagagaagagcataaagtatgaattttctatttgtacaaactatattaataactaaatttataacaacaaataagaagcctttttttgctaattaaagctttttttgctttgattgatccaaactcaaacagttgtaactttcagctgatgaactccattggtttgaatctgcaaactccgtagttgacaaccaccagatctcctcttccaaagattctccgccgctttatctccggcgccaccgtcgtgtgtctttttaaccaccggcaaaggtgggtccaattcagcaacgtcgataacatcaatctttttgttaccaaactcctcctttcttattcttccacgactagtcctggtagtggtggtagtgggagcggagaaagagagattcttgccggagaaaagacgtttaagcttgaagtaacggtgctgagcgacgggggtgatggaggtggaggtggtggtggtggtggggaagccggtgatcttgttgctacgtttgacttgaccaatgcagctgattttgggagataaaggatcggcttgttggtatgagtcatcttgatgtgatttagccgggagggtcacgttcttgatggaaggtcttgtacttaacattggtaagaaagttggtctttggaactgaacactgttttgtctcgtctccattatcttgatcttcttcttgattactcttaagacacaagagagatgaaacttcttgatttcacaaaaggacttagtttcttatttgtgtgagggagagaaagagaaataggagagtttgggtttgtggtagttggcgagttagaaaactttgatggttacttaaaataaggagatatagagaggctttggtcaaagtggctttatcattagagcagacatgtcattatttttgggtttcacactcacaatcactttcagatttctttccagaatattggcttcttcccaatctggtaaattatatggcttctctatttttttttatataaaatattatctcttcaggaatatctgcttttttaataattgagatttcctattggcttgtaggtaggaaatgaaataattgagaatattgccatttttgaaagttataagaaaatattcacgtcaaacacatattcttactcaaatatcattctactcaaagttgcattaacaaatttcttatatgctgtgttaaaaggtttagtatattataaccgatctatttcatttagatattatagttgattaaaaagaatagtaattatattagttttgtatttattattataaca

SEQ ID NO: 15183 - DNA, 1299 bp, Arabidopsis thaliana landsberg
  unsure (1)..(1299): unsure at all n locations
agggcaaaggcttcagggtctgacagttccctcggggtccattcctaaatgatttcgctgccttgctctaagatcatcataacactacactcattcgtcaaattcttggtaaccattgtcttggcatactttcttattgtaggagagagatgaatggcttcaataagaggcatctcaataatcagtttgtcaatcatagccttacacctaatatcatctaaagcttgtctcgccttcttggggtacttaggaaaaagaatcttatgatttgctaactttgcttcagctgaggtttgaacattgtttgaacgagctaggtgtcgatcgacctgaggtgggtgtcgatcgacactatcgtgtataagttcctcctctgtgaaattgtcgatttcactcgacataggcataacagagttatcaatatcaattggtgtcgatcgaccccctagtgtatcgatcaacaccgaagcttttttgtgactgaagaaggtggggcttttgctnnnnnnnnnnnnnnnnnnnnnnnnnnnnnnnnnnnnnnnnnnnnnngtgtgactgcattgacatatgctatggtcgaagactcattgtttttccgaatgtcacgttttctttcaaaaaagatcagttttgatcaatccaaggaattgtgctaacatcgcttctgttgtagtcagagtaacgggcagtggttgggcttggttagaagaagtgacagctaaatcgttatcctccttgctaggtatggaagcctcaactgagattttccgttcgttgtcgataacctttgttgtaagactcgtgacaacattgttgattaggagcaatgctttgctagtggatcatgtcatgaagttacagtagctggcggcgtctaattgatttcataacgacttatctatccatcagaaaaatatattgattagctaggtttcctagaaaccatgttggggacattctcactgataggatttgaactatagccatgctgctttgagggactccactggggcttgagtgaatgaaaagatttgaaaacatagtgcttctgtcacggattcatcgaagaagtgattcatgaatgcgttcttagtgtcaatccaattggctagtgaacctggttcaagttctcatagccatgatgtctctctacccgcaagagagtggaggaagaatttgcaaagaaggtaatcagctggtacaccatcttatttgattgaggacacgaagtcttcgaatacttccaaatgatcgagtggtgatacaccaggagaacctctaaactttcctcgtgaaaca

SEQ ID NO: 15184 - DNA, 667 bp, Arabidopsis thaliana landsberg
ttaaaaaccaccataatttggtctagaacgtcaaaagacttgtaaaagatgatgtactaactgagaattttcgacacctgttattggtcaagtcaataatacaaaacaattatgtattattgtgtagatatagcaaaactccataaaccttaatcaaaggaagtagttcaacaaccaaagcctagaccgtcacaaagaccaccgaccccatatattacaaacggaccagttctctgttcacaacacaacactcatcattttgtccgaatctgaacaaaacaaaccaaaaactgttagaaaagtaggaaagagttggtcacccaaattaagccacctttgcttcctcaattccttatttataccatcaaaagactccacaatatccaaatcaaacataacaaaaaccaacaaaacaaactcaaaaggattcttcttcaaacacaacatcttcaagaaaacatgaaaatggaaatgggtttagtgttccttacagtttttatggctgtgatgtcttctacaatggtctctgctcagtcaagctgcacaaacgcgttgattagcatgtcgccgtgtctcaactacataactggaaactctacctctcctaatcagcaatgctgtaatcagttgagtagagtagtccagtcttctcctgactgtttgtgtc

SEQ ID NO: 15185 - DNA, 1667 bp, Arabidopsis thaliana landsberg
gcagtatggtaacatcaaacaatgcattgtttttatcaactttctttttcaccaacattgttttatgaactttcgttcagagaaaattagtatgtttttcaatcagaatttatattaaaatctaaaacatgtatagatttaattacttgcggaatgatactaaaaataaataaaaataatataacttccgtcttttaggaactgaaaaccaaatagaaaataacaaaatgggcatagaaaaaagacaacaaatcaaaatgtaacgctgtgaatgggaaataatttttttggaagtcttttttccatctatatatttttttgtaaagtttatgaggcaaaaatctctaaagtaaatattatttagtttttagtccctataaaatctcatttactttcctaaagttgtgacatataatctcattgtcttaaatttatattcttaatataattttatttttattgaactatatttatttaatagttaattttctaaactctttttacttatattaaatataaatatataatttttcttttctatttatttgttcttatttctaatttatttgattttatacaaaaatacatgtagttaataaaatattagcatctagcgattttttgaataaaaggtaatacagatgattgaatatgtttcaactcttttttattctatttgtattatttatgtaaacctcatttactttcctaaagttgtgacatataatcaattagaaataatcttttgaattttttgctcataatttttttttgaattgaatgtaatatttattcaaaaccaaaaataaaactgttttacatcatgtgcttgcatatatcaaaacttcaagtttttaatacttaaaacgaaataaaattagtaaaaccttttaaatcaaagcttagtatactttcttttcaccagaagactatgttgaagtccataagcagcagcagcggcgacgatcatcttctttctctgatcgtatcttccaccggaaaactccatctccggcagattcacgccctcttactccgcacttccttaatcagaaactctgacgttttccaccatttcctctctcgtctcgctctctctctgattcctcgagacatcaattactcatgccgagttttctcccagagattgaacccaactctctctcactgcaacaccatgatcagagctttctctctcagccaaactccatgcgaagggtttcgcttgtttcgatctcttcgacgaaacagctctcttcctgctaatccgctctcgtcttcttttgctctcaagtgttgtatcaaatcaggtgacttactcggtggtttgcagattcacggcaagattttcagtgatgggtttctctcggatagtcttcttatgacgactctgatggatctttactccacttgcgaaaacagtactgatgcatgtaaagtgttcgacgaaattcccatgagagatactgtttcttggaatgtgcctgtttcgtgttatctgcggaataaacgtacgagagatgttttagttttgtttgataagatgaagaacgatgtcgatggttgtgtaaaaccagatggtgtaacatgtttgttagctctacaagcttggtgctaacttggggcgttggattttggtaaacaagttcatgactttatcgatgaaa

SEQ ID NO: 15186 - DNA, 1212 bp, Arabidopsis thaliana landsberg
  unsure (1)..(1212): unsure at all n locations
tgctatcataataagtcaattaaactaatttagaaaaattaaactttaagataaagtttcaaataatatatttgatattattaaacagagatatgtaataaaagaagatagacagtaatgttttttttttttttcatccgatagacaataatgtttaattaatataaaatcataagatcacacattggatttaatattatacaagtatttttgtgatcagtagacatttaatactataccaatccaacaaaagaaaaaaaagatgtagtaggcccataaattggcttaggtttaatgggctttaggcccataaattgttgtctaagaaaaggccttggcctgattggtaacaagttgacataaattaattcttcaaaaatctcttctgcaatctcatcgtcacagtcacggaaatggcggaacacgcaaaacgacgcgttttaagagcatattacctacnnnnnnnnnnnnnnnnnnnnnnnnnnnnnnnnnattctctccttccctcatctcatctcctacctagatctctctcttctcttcctctcatttccttctcccttactaaatttccttctctaatctctactttgtccaaaagcatttaactttaaccggaaaaatcttacatttttttcctcctggatctctctctctatatctgcagattcacactacagctgatttagatctatttcgtaagtgggtctttcaaagtcgtctcctttgatctactttgattcagggttaggattaaaaacttctcctttttctatagttgcttcactgtttctattccatggagaaagttgctagctttaatttgccaacttactattcttatgtgtaataatcgtttgcagggtcgttgatttggtgataagtcagtagaaatggataaggagaaatctccagcacctccttgtggaggtcttcctcctccatctccatcaggtcgatgctctgcattctcagaagctggtcccattggtcatggttcagatgctaatcgaatgagtcatgatattagccgtatgcttgataacccacctaagaagattggacatcggcgagctcattctgaaatacttactctccctgatgatttgagctttgatagtgatcttggtgtggttggtaatgctgctgatggagcttctttctctgatgagactgaaaaagatttgctctctatgtatctggatatggata

SEQ ID NO: 15187 - DNA, 4118 bp, Arabidopsis thaliana landsberg
gcgggacttggtccataattttctgtccgggacaatttcctttgaaaagtttcacagtcacaatattttactacatacgctggaatatattcttgatgtgaatactatatatagatgtaaattaatgttagatacattatttgaaaaaaggcatacgcgttgccggtcactgcatacatgtttaatgttttgataaggagagtttatgcataggtcatataatgttatgtggccattttttcttatctctgttttgaagttcatttatctttgtttacgttaatagttatcatgtttcttacttttatctatcaaatctatatatcattttctttgcataaggcatttttttcttaaattgtatccttttaaatagttaggttggtgtgcaacttcttaaaaagaaaagttagttctttgaggattatatcaaaagataattactagttcaaattttacaattttcttttagaaacaaattttttacgaaatagctgacaacattttttaggttaggaatcccaaaatttgagggtagcctgatcaaaaagttagaaatgctaacaacttatttctattcaagagtcaactgcatagccattatacatgcatgtacattaaactgatgataatatagaagttgatgtggcctagtctatttcaaatgaaatgactcaatgatctcacatctatatatcaaatgttagagataccaaatgacatcacacaattcagaaaaactgatacctctttcaaactagttgagaacatattttcgaaaaagaaacgtacgtggctcaatattcaagtaaattacgacatgtattacacgtataaacgatatcaataaatttattgggaaccacaagtaagtaacactagtaatagctagtatcgacccgaaacaacgagttttaaggtttgccacagagcacaaaatctatcgagcaagaaaaaaatcagatagtactatcttgacaagcgatataatcacaattacctatgcatgtcttcataataaatcacgtcaaggctcataattacgccacgtggattttaaccgcgtggacacacgttttcacaaggtataaaagaagcaaccctacctctctttcttctacgtgattcgcacaccactgtaaaagtgtaaaaaaactctttttttgttcttcttcacatttcattcgattcaaaaaatattctgttcttagattgtaatctgtttttttttctgtaatctcccattattgggttttgaatttctcgtcattttacgaaaaaggttgtgaatcggcctaatcgatctcggtcgtcataagtgagtgcttcttcctccgtattagctctcaaaaacatttgtgtttctatttgaaacgtaacaatttacgatatttttcctcacaaattaatgtaattgaaacacaaaaccctatcatgcatgatgcacccatatattaccatctttaattccaaaatcatcattttccttccatgatttgtatctgaaatggtcatgcatctatgttgcgcaggatcttacgtgtgttttactaatcgtgaaacaatatcaacgtcagattcttctctatacacttttctttaagtttacccaatcatcatgtctccaagtatggagccaaagtgtgaccattgtgcaacctcgcaagcattgatttactgcaaatccgatttggctaaactatgcctaaactgcgacgtccatgtacactctgcgaatcctctgtctcacaggcacatacgctctttgatctgcgagaaatgcttctcacagccagccgcaatccgctgtctcgacgagaaggtttcatactgccaaggatgtcattggcacgaaagcaactgttcggagttaggacacagagttcagagcttgaatcctttctctggttgtccttctcctacagattttaacagaatgtggtcttcaattcttgaacctcctgtctccggcttgcttagtccgttcgttggttcttttcccttgaatgatctcaacaataccatgttcgataccgcttattccatggtaccacacaacatcagttacactcagaatttcagtgataaattgtctttcttttccacggaatctaaggtaataattaaaggagtgaaaagtgttccttataagttcttgatgaaaaatacagttcttatttgtgtgtatgttccagggatatcctgatatggttcttaaacttgaagaaggagaagaagatctatgtgaagggcttaacttggatgatgcaccattaaactttgacgtaggagatgatattatcggatgttcatcagaagtacacatagaaccggaccatacggtaccaaattgcctattgattgacaagactaacacatccagctttaccggctccaactttactgtagacaaggctctagaggtctctttcgcttttttgttgtcgttgttgtagtttctagtacctcaagaaagtttctaatataaattgtgttattctgtttccaggcatcgccaccaggtcagcaaatgaacatcaacactggacttcagcttcctctatcacctgtcttgttcggacaaatccatccatctcttaacatcactggtgaaaacaatgcagctgattaccaggattgtgggatgtctccagggtttataatgagtgaagcgccatgggaaacgaattttgaagttagttgtccacaagcaagaaacgaggctaagttgagatacaaggagaagaaattaaagcgctcgtaagtttattactaatcattacaaaacagagtttataccaacttggatcaggtttaatggtgtttttctttttttttaattgtagttttgggaaacagattcgatatgcatctcgcaaagcaagagctgacacgaggaaaagagtgaaaggaagatttgtgaaagctggtgacagtgatgattatgatccatcatcaccgacgacgaacaattgaaatttacaaaaataatgtacagtcttctttgccaaacagacttaaaccatgcttcatgatgatgataaaggttggtaaaaacagtttcttgtcgggaaagtaatgtattgtttgtcttattgtgtatagtttttgtgaatcgaagaaatcaacatgttgaggcatgggaacgttggagaactaaataaagttggtggaaagccaaaatggtgaaaattatttagtaacttcttttatttacagaatctcttttgtttttgattatttttaagttgggtttttccttttataggacaaatcctaatttatctctttataaataaatttcctagctgtttttttttttattaataataaagtagcagtgattacaatctgctccattacagagctcgcgtttaacgtgtttcaagagaacaattctctacttattaagcattgcattatgaagatgtttcacttgcaaaaagtttagttattaccccactggtttagaaccaattggttcttagttttgaatcttaaccttattttaaattaaaatgttgtttttactaagttaagaaaagttaggaggaagtttaactaatttctattttaatggttaagaactattggattcttaaaaaacaacaattcaaaaatgtctatccactcaaaatacaacacatatactcttcttagttttaagaaaacatcttaattaagatgtttatcttagctaaggtttgctatttttattatatttaatcatatatatgaaccaaagttggggttgctctaaccctttttcatttaatggcaaactattttttgtctaatattggatggggcgcggattaaaatcctaaattaacaataaatccgagaaaacacaattaggactagaatcatatccaaatttatattaatcccgattatcaaaccttctcctacataatgaaggttttaagacttaaattaccatatttaagggtttgattaagtgagagcgtatgtattttttgttgggttaaatatatatataaaaaccttaacaggacttgatgaccaattgatcatatatttgataggcattccttctattttttcttaatcccttatggtttatattgatcatttaaaaaacattctattatgga

SEQ ID NO: 15188 - DNA, 524 bp, Arabidopsis thaliana landsberg
tcgaccagtctaatgctggctctccacggatattatctaaacaaaatttgtagcaagatggaactattaaaaacttgcaaaagagcatgaagaaattagcaggttttttggaaactgcattaccttttaagcgtgatgcgacactcccatttggcatgtaagggtagactaaaattctctcctggttgctactacagaaaccgcggagccggaggagattgcgatgaagagccaaacttatagtctctacttctgtctgaaactggacttctccacccgcaatgttacagtccttgagacgtttgacagccaccaaagttccatcgtttaagtgtcctttgtacacaatcccgtatccgcctcttccgagaatgttcttcgagttgaaatgattggtggcagatctaagctctttgaatgtatacctcttcaagtgccctaaactcacttctggatcatattgttctgcaaaatattaatcatcaagatgcaagtgttagttttgctctgcacaaaatgatgtg

SEQ ID NO: 15189 - DNA, 1564 bp, Arabidopsis thaliana landsberg
  unsure (1)..(1564): unsure at all n locations
taatcccaaaatttatcaatagtaactgttaagtcaatgaatgctttcaatcatgagtcactttacagtagttttaatggggtagaagaaatcaaccacatgtactaggagaaaacaatgtacgtgtaaaaatggactaaacacctcttaacagcagctgatcaagctcagtttctagcttcgtcaactcaacctgattttcatttttgcattgcggcaactgcctccttagatcttggaccggctcgttaagtttctgaatttactgccacaaatagatattcatatcatcattagataatactatgaagcatatactttggcaatcaaatggtttagtaaagttaactaaaagtgttgaatttcagatcactatgcttgatatgctttttctttctgtgaatgcattactcaagaggactcgagtttgagatcaactcagagggatgggatgaagtaacatcaactagacttagtttgaaaaaaaaaggtggactatgtttgaacgtctaaataaacgaaaaaaaaaaaaactgatacaaaatgtgtcacaggaaagacactaaacaaataaagtattattaagtatccatctccttcctttagttaatatacaccaaagagttaaagacatgaaaatgaatagaaaacaaaaccttttcatgcacagagtctttgcaatgtggtatatgtggttgctctttatctgaaagaaacagaggacgactagtctcagtttcactctcattttgttcattccactaaaactgacaagtcaacacaatgaaaataaagaacaaacataaaattcacatccactggaggaagaagaacaatttagtgctccaaattaaacatgacaaacgagcttagctttactagatttagtaaaattactcggcaacaaagtaaaaacagagtaggacaaccaaaaaatttataccagaacaaagaagagattagcaatgattaaggtttatacatattttagcactcaccagtccaaatctgaaagcgtgaatctagtttttgcgtaaaattagagaagaagacgaaaagcaaataataacatagctagcaacaagtatactattgcacttttttttgagtttttaagccaatcagaaggctctatttcgtacccactcgcagaaagagcgcgttgagcgagtgagagcgattctgtgggtaaacccctttctaattcatgactttttttatcgacgcacatctctccaaattctccaattctccatcgcgtgactcttttattttttttccacaaaaccaaatgaaaccgaaccgaaatcagttttaatttcaaaaccaatgcaaacaaaccgaatcagcaaatagtgtgaagcaacaattctggacagaaattttctcaacatcccaacaacgggaaaaagagaaaacaccacaactcanaatcacaaatcatagaaaatatatccaagataatcacaggagcctttgacccttatattgcaccacagctcagaaatcacagtaaactttcaaattgcagaaatcttagaatcacagccaaagaagattcctg

SEQ ID NO: 15190 - DNA, 2648 bp, Arabidopsis thaliana landsberg
taataataacacttgttacatattcttaaattacttatataaaaaaacttaaggtaaaagcttattatatgtaacttagagacataattttcctactttttctataatttgaagttagaaataaatcaaactatatttatgctaaataattaaacaaaaacatatggaattttatttcaatggctcatctgtttggagtttcaataataacaaattgttggcagttcatttattataattaaaaataagaatatatgttcctagttcacctatattgaaactcatgtgcaatagattcatagaaatatttaataaaaattaagaaattctaacaataatcttaaactattgaaagtaaataaccataatgaaaacaaatctaatttgtataattcaaaatcatgtataaaatatattattatacattctaggtattaattattttaacataccttttaaaggaaaatcctgtaaaaaaacttaacggtgacaaaaaatttctttgctcttaatttgttttacaatatatacaaatcaaatttaaggaaacaactcaataatatgatattttaactttaaactcttaattttactatacattatatgataaaacatcaatttctttttgttgttttaagttcttaaagagaataatttatttacatttacatgtattgttgatcatttaaaaattgggtactgacatgatgtctttcgtctttcaagacaatttacatgcatttcaatttttgcaaaaaaaaaataatgaatattttaagttttttttttaatagtaaaacataccatattcacaaaaaacaaaacaattagtgcattcaaaaattttaattaactaaggtgtcttttttaaagacatcataatttgtaaacatcaaaattaatatttttaattactttcgagttatatattaataattatagataaattttatacataatttgtctttttttgtacatttctcatattgactttttttttttgtcttaactgacttttttcctatgaagaaggttcatctattttttttttccaagacaattgataatacatgcatttgcattttcacaaaaacaaatacttaatattttaagtttttttaatagtaaaacatactgttttcacaaaaaaataaaaaattgtgtgcataacttttaatcaactatgtctttctaaacacatcatactttgtaaacatcaaaattactattattaattattaattattttgagcgatatattaacaaatataaagaagttttatatataatttaatataaatattattctatatttaaaactaaaaccgaatatataaatccacgcatcgcgtggacaacttctactatattaatatgacaaaaagaaaaatatgggaacaaattaaatatctagggcaagggtttttgacgagaaaatcaacgtgccaagtgtttgagggagagacggcaatggattggatggcaaatttggcgtcacattgaacattgtcgacgaagtgaaagagatataccattacggcgatgatggtgaatattgcgccgcaaaaaggtatacagcaaaccgtagtttccttacaagtggctttacgaccatttgttgccggcattgtcactattggacgtgaccaccatctacgacgaggaggcatgtccgaggacggtgtcactggatatccgatcgctacttcagaaacggtgtaagaattggtatgggaagccattcttatttttgttctctttgtgtttgtggatgttagtttggagtggaaataatttttttactttccgtttttttaatataacctacacaattggactggggttttgtttacaaagaaaaccaaaaacaaaggaaaaacgaaaaaaattgtcgggaccggaaaagaggatcttgccctagtgacaccgtgacgcagagaagccgaccattagcaccgacgaatgcgaaaaccacagctttgcagcagatcgaagtatctagtaaacagagaggaagcatctgactcccgctactattccttttcccgcgaccaaccgtttccaccacaaatctctcggcatggtcaaccctccgacatcacggcacgccgttgtcagctcccgtacctagcaagccgacaaactcaaacataacccctctttcccaatccaacgaatctccgatttaccgaacaaaaaaacttcaaccggccaagaggaagcaagtcacggtggtgtttgaggccgatggcttaaacgaaacacctaaacacactgaatccgcgacaaccaacaaaaccaggaggatccaccgttaacctccatggcgaattggcactacccaccttctctcgatcgacttccgccgtagttgcagaggccgacacgacggctgagccacgagaagaaatcgcttcaccaaccggcgtccaagtttcttctcgtggaagaaagtttgagatggatccacgacatttttcgccgtcgaaattgccgccaaaatttatgtgatcattcttctcttggcgattctgtaaagaatgtgtattcggatcccggagaaaatctccggatcggttttctctaatttaaattcaaaaaaaaaaaaaagaatttttattttatttttttgaatatctgaaagttca

SEQ ID NO: 15191 - DNA, 2499 bp, Arabidopsis thaliana landsberg
tagtaactataatttcttagtagatatttataggcgggttttaatcttcttaatcatattattcttttggaagaaacacactattccgagtattactagctagtgcaccatgcatcgtttagtattatactttggttttattcaaaatttaaaattacttaaattgacaaatatcagcaatatatatatcttatcttagcattgtagtgctgaatgaatcaccacaacacttattggtgctatttatcattctttttcttggttgtgcggttattgagccttttgtcatttgcactcaagattttgatattgttgtcaaatatgaagctgattaataattagatttgagcctattaataaggtttttgacttgtccgtattatcagataaaataaaatatgagatcttcgacgatttcggcagtatccatgctcgatattctttttgtttaagaattaaaaattgcgctgcatgtcactggacactattaatcaaaatgaaaaaaaaaatcagaaaaaagaatatgtttgtgaaaaaatacttcttgtatgaaattctttgattctaagtctttgatatatgtatttcgtcaagtcatcgtttttaaaattaattaccttacttctatttgtcatccttgcaaaaaaacaaattaacgagcacaaaaaaacatacacaaacaaattaagagttacaaagtatcaagccgttcgcatagattctttacacagagcctttcataaattagaataattaatttccatttttaccccatgattttatcagttcttatataggcctagatacaaagagaaaaaatttagtagtgagttatatttttagcatgcttttccgacccggcaatccaatgctccggcgtatttggtaagcttagaaacggccataccatttttgggctttatcatctgttgcctagaatgcgaacacttgaaatgaggatttccagattgtctgaaatatgcattgttcatgaaaacatctttctcggatctccagttccagtttttccattcgctttctgaagcataatccctctttgtcacctatatatacacatgttttctattagtactttgatttgatgccatatatatatgtgcacactcaaatcattttgtacctctctgtagtgttgtttgtgaggaggagcgatgaaacggtttccatggctgagaatggtaggaccttggctaccaccgatcgcgtaaagctcccaatgagtgtagtcattgttgacaacgtggacgaaaccccatcggaccctaggcatcctctgcacaagtccttttccgaaatggttgtaagccactgtgacttgcatcttcttgtcatccatgttgttgttttgtgcaccaagcaacatcacctaaagacagaacccaaaaacataacaagttcctttggttaacttgggttgtcattaatagtataacggtcgagttaattacgttgtggaaggctcacatcgttgtggtgggtgaaatgagagttagagatggtgattgcggtggaacccattatagcgtcgataagtccatcttggcatttagacatagaaatgtggtcaagccaaatgtttgttgccccaaagatagagataccatctccatcagcctctcctctatgcccaaagtggttaatcgaatctcttatcaaaccaccactgcttttcacgatgtggtggacgtgaagcccatggatgatgatattgtgcacgtactgcatcgtgataccagcaccatatgcgatgtgcacgttagcgccacgagcatcgattgtcttgtcactagtaatcatcagctcttggcttaaccgaatgctcatatcgtgcttaaaaacgatccatagaggttctttctggatcacagcgtgacgtagtgttccaggtctagggttcaccatatcatcgtctctggggctcgtgactacatagatgcggccgcgtttgccttcggtggtcctgtaaccaaacccacggacacagtgaacgagcttcttgcgacgtctggcccaatcagcgtgcaacgccagcatttatcgataggggttgcttgcggtgcaaggtcccgttagcttgctccattttccttttccttttcccttgcccctaccggttaggctccgccttgtgctgtttgtcggactagaaatcatctcaatgacgtcctcttcctcgaaagcgaccgccttctcttcctcggtcccctcgacgtcagtcgagttgctgaagatatacaccaaaccaaaaccatcataaatccaacatcctttttacaacccaaaaaaaacttctactaataaatatttgtattttaatttgaatgaaatcagaataaactaatctatctaatgattacaatcaagcctggttaatttcaacgagacaaatcggtaggattcaaaaacaatgcatatatagatcgagatactaatatttgacttactcgtaatgacgctcgtggaagtggtcgaccatct

SEQ ID NO: 15192 - DNA, 1079 bp, Arabidopsis thaliana landsberg
gtttcaaataaaaacaagtttgtcttttggccaagtctttttaacacctaatgcatcagcaatgatttgcactttttaaattggtctggcggtctggtgcatctccagccttagaaacgtctatccaaaccttggtagcattgcgacccaatggcacaaaatggacgagttttgttgggtttgtaaaacaaactctgccttctacaactttttctcatgttcctttgcaatctaagatgatgcatttcttctttccacctttgttggtgtcagtgctgttacttacacttacactagtgctctacaataaagaggccaaacaatcatttcagtttcattcactacaacaaagcctcctaaaaatgcaacaattcatcatcacaagtaaaagggaaatggttttgaaatttaccttaggtgatgcgtgttttgaaacagattcctgacgccatggtgcttgaatgaattgtatcttatgtataggccatgcaatgttctcatgtagtgcatcacccatcaaactcatatcagcactaggtctccatagaaaagcctctttgttaactactttactaacagtcacaattgcagcatttggacctaaaggaacattgttgactagatctttttggtccgttgaataccaactaccctcagctattatttcatcctcagaattccaatcataaatcaggatcttatcatctaatgcattggtagcctatatacataaccaaacaaaaattattataggccatccagtcataagcttcaaacaaaaattagtctagttcaaagaaaaggactattaccgatgaaccagctgtcttaattccagttggtgagtccatattgtccagaatgattttattgaatggccatggaattttgcagccaacagcttcgccaagtgaagtcacagatggtgtaagcctccagacaggtgtttctttgtttgatgcagacttcaccataactgctgctgcattaggaacgagtggaatacgtacctatcttgtacattggatcagctgagcagaattctgcttcccgtacaacaaccgcaacttctgaatacc

SEQ ID NO: 15193 - DNA, 1331 bp, Arabidopsis thaliana landsberg
  unsure (1)..(1331): unsure at all n locations
attgcagttgcgagtatgattacttctcggggatgagttataggaattgttattgcgactatggctacacagggaacccataccttcgaggtggctgcgtaggtaagtcataagtgattgttttcttcttttgttttctcattagatcatcaataattatgtttcaaaattgtgtagatactgattcatgcgaaggaaatcacaactgtggggaagatgctcattgtgttaannnnnnnnnnnnnnnnnnnnnnnnnnggcctaaccccaagataaccaaacctaccaaacccccggtgcttcaaggtgagtggcaacttttaactattagactgataaagtagaggataatgtataccttatgtttatttgggttgttgtaggccttcttataggtttgtcaggattagtattttttgttgggctattctggctatttaaactcataaagaagcgaaggaacatcaaccgcagcaagaagtttttcaaacggaacggaggcttgctgttgaaacaacaattaactacaaaggacggaaatgtagaaatgtctaagattttcagttcaaaggagttaagaaaagccactgataacttcagcatagatagagtgcttgggcaaggcggtcaaggcactgtgtacaaaggaatgttggtagatgggagcatcgttgcggttaaaagatccaaagttgtggatgaagacaaaatggaagagtttatcaatgagattgttcttctgtcacaaatcaatcaccgcaacattgtgaaactcttgggatgttgcttggagacagaagttccaatcttggtgtacgaatatattcccaatggagatctgttcaagcggcttcatgatgaatctgatgattacaccatgacttgggaagtgcggcttcgcatagccatagagatagcaggagctcttacatacatgcactcagctgcaagttttccaatattccatagagatattaagactaccaatatcctactggacgagaaataccgagccaaagtgtctgactttggaacttcaagatcagtaaccttagatcaaactcacttgacaacattagttgcaggaacttttggttacatggatccagagtacttcttgtcaagccaatacactcacaagagcgatgtttatagtttcggggtcgtcttggtggagctcataaccggagaaaaaccattgtcccgtgtccggtctgaagaaggtagaggcttggcaactcatttcctcgaggccatgaaagagaacagagtgattgacataattgatattcggatcaaagacgaaagcaagctggagcaagataatggcg

SEQ ID NO: 15194 - DNA, 1510 bp, Arabidopsis thaliana landsberg
ggaaagacattgccttttcaacatcccagaccgtcggagaagaagagaagctaaacgatactatctctgaaactgttacagccaactcaagaacccaacaaaagcgattccgtctaaccctaacaaaaaggctatgaagaaaggttggaaagtctgcttaccggactaacaaaacagagtgagacaaacaaccacagatccgctacaagcaacaggaaacataatgagaccagagccttcgccgacactttataagacagagcatccaatagatccacagaatctcggagtcccaagcaaacaactttcattggagaagctgactgccgaccacgctgcaagcctcgccgagaaaattaatattattttgtttgtggtttgggtttttttaagagttaataaagatttaaaacttgtattatctatagattgacctgcggtgtaccgcgttgatatttttgttagaaaattcgaatttttttattttaattaatattatttatataaataatatatttaagaggtagatctttttttgtcatctagattttattaaaaaccatgaatgatatttggaagattacaaccatatgctagcagaaaacaaagatatctctggagtctaaagccctatgtgagggaagcaaagaaacaatactacaaggctacaaaccgatacaaacatataatgaaagcagaagaaccccactacaagaacagaccaaaacaaaacactcaaccaaatgggaccataaaccaacccaacaaggaaagcatacttcaagagatcctttgatagtacatatcgaagatgcccgtggccaaccatcgataatctaatcctcctctaaagatgccaaactgcctaaaagtaacagaactcctatgctaatcttcataatccgcaaagacagaaccacacatggaacctcacactttctttcggatacggtgacgtcggagacaaggcgacattttacacctagatagaagcaaaaccataggaccagatctcgatcagatctgaaatgcagagacaaggagcgaaaaatccacaccgggtaacaccattctcgaagaatcaagagcagcagaagatcgaaccagagtgaaccaaagaaatctcccaagaatacaaaataacttgtaggccagataatcaccacaacgagcattcgttcattcatcaaaaagcataaaatgggaatcccatcttctatccaaaacaggcagagacaaaacgaaacttaaacaactaaaaccggaaagacattgccttttcaacatcccagaccgtcggagaagaagagaagctaaacgatactatctctgaaactgttacagccaactcaagaacccaacaaaagcgattccgtctaaccctaacaaaaaggctatgaagaaaggttggaaagtctgcttaccggactaacaaaacagagtgagacaaacaaccacagatccgctacaagcaacaggaaacataatgagaccagaaccttcgccgaca

SEQ ID NO: 15195 - DNA, 424 bp, Arabidopsis thaliana landsberg
aaccgcatggaagcattcttgatttggatcttgaggcgtttgatcgaacgatggccgtcaacgttcgcggtgcggctgcgtttataaaacatgcagcgcgttcgatggtggctagtggaactcgtggctccattgtttgtacaacgagtgtgacggctgagattggtggtccgggacctcacagttacacagcgtcgaaacacgcgcttctcgggttggttcgatcagcgtgtggcgggttggggaagtacgggattagagtcaacggtgttgcaccgtatggagtagcaacggggttaactagctacaacgaggaaactgtgaagatggttgaggattactgttcagccacggcgattctcaaaggtgttgtacttaaagctcgacatgtggcagatgcagctttgtttttggcttctgatga

SEQ ID NO: 15196 - DNA, 1418 bp, Arabidopsis thaliana landsberg
  unsure (1)..(1418): unsure at all n locations
atcaaaccaaccaaatatacaataataaaattaaatatacgcaaatcatatactcgaatgacaaaagaacatggtattaaaataaataacgtaaataaatccgcacgatcctcttcttctccatatccatttcaatgccctattggaaactcgcatttcccatactctacaaacacataaccaacaaaaaataattaatttagtttacgtttccgtctatacgtcacaatttaattataaatctgtatacgtaagtgaagcccaaaaaaataacatttgttgttaaaccatcccaactcccataattattatctaaccatcttccaactattaagaacgtgaaaataactatactgtatatgcaaaatacttactaatcaaaataaaattttggagaggaaagatagggtacttactaggaggttgcgagaccacgtacgctgcaccaccaaaattacacgtgccaacaccacgtgcgttcttctgatagtaactgttgaacgcgtaggaagcgtgagcttctaacgattcaggattataacacgtggcacccggttgaatcggacggcaatcagcacctccttcgccacaagcgtagtcgagaccttcctgaagcttctccttcgtcgttttaccattcgccacacaccacgtctgtcccacgagcgaaggtttcaccggaacaaccttctctttgttatcgttgaccggcgttgacttaccgttgagcgaaacgtcatacactttgttctcgtttgggtaaaacaacccgtagtttctctcagaagtcggacccgttttctgattctcgttaaacagagcgaacagataaacgtttagtggctccttcggttttaacggcgttccgtttcccgtcaacactcttttaactaacccgccgttatacgccgccgcgttacctgaaccagcaccaatctcgttctcgtctccggcagaaggccagcctgtctctgtcaccacaannnnnnnnnnnnnnnnnnnnnnnnnnnnnnnnnnnnnnnnnnnnnnnnnnnnctgagcgtctaagagactgttatacttcaaaccgttaccggaatcaacattcccggcgttctctttaaacaacgcgtaatccaacgagatcttatcggcgttagtgcgtaacanagaaaggataagcattcaccataagatgcgacgacgttttgcggaggagatcaagcatcggtttaataaccggttcgattaactccggtttaaaagaaccagccgacggtggatacgaactcgccaacgcgcttaaagcaatcggcgacgagatcttaatggatttgtcgagattgaacttgacgagagagctttgaacattcttcatagctggaacgagatacgtcgtcgtgttntcggacaattatggnaatttctaatcagatata

SEQ ID NO: 15197 - DNA, 235 bp, Arabidopsis thaliana landsberg
tgcagcttcaagtcacctgaaatcaacgcatacatgcgccatgcatgcacaactatcctaaacatgcccagcgatgacacacgttgtgaaatgatatctaacagtgatagatatgctgctgaaatgatgacacttggatggctgaaacatgcaaaagacacacttatgactaggatattcacatgtatcttgctttgccatgtagattactaaatggctagattgactcaaacct

SEQ ID NO: 15198 - DNA, 601 bp, Arabidopsis thaliana landsberg
agccaaatatgcgtaaggtagttcttctcatgtttccgcaattgccttgatgcgtatgcgttaacacttcccttttgcatcagtacgcatcctagtcccactattgatgcgtccgtataaaccgtatagggctcaccttcctccggtaagaccaataccggtgcgttagtcaacatggcctttaactccaggaagcttttctcgcactcatccgaccagttgaatgcggtgtcttttccggtcagtcgagtcaagggttgggccatgctcgcaaaactcattacgaaccttcggtaataccccgctagtccgagaaaactcctaatctcggtggcattccttggtcgtggccactcctttatcgaccgtattttctccggatcaaccagagataacatgaccaagaaaaccaacgctcctttgccaaaatgagcatttacttaacttcgtaaataactcatgttcccttagccgttccagcaccgcccttagatgttcttggtgagcttcccaagatttcgagtaaacaaggatgtcgtcaatgaagatgataacaaactcgtctaagaaatcccggaataccccattcatcatttccatg

SEQ ID NO: 15199 - DNA, 1948 bp, Arabidopsis thaliana landsberg
  unsure (1)..(1948): unsure at all n locations
gattacaccccttagtcaaacattgtcatgtaccgcttgaccgggcatgacctggaccgaacctatgtaagccataatagaacggagtttctcgcaacgtacaacagacggatggactgatcatggttcgcctaacaatagttggccccctattgctatacgtcattacatatgaccataatcatatgctgtctgacagcataacggttactctaacaaacgggcagcataacgattacacaatcgttaagccaaacttcataaccaatcaatcaaccaagtataaatgattatgaaataataccaagtataaactagaaacctcatgcataatttaaaaataataactaaaacccaatccgtgtgttacttcacacggctgggttactcaccccctaaacacacgctttggatcttatcttagatcggagactctatcggaaactaactttatctttgatgccaaactaagctactcggcagagcctcgacattatctgaaagctctttcgggacgattcgctcgctcccgacgctcagattctcactcacggactaactaacattttctctgattttttcttgttttggtctgaaggaaataatgcgcggaaggggcctatttatagggtttggtggtccgtggaacatgtggtggagaatggaccacggaggccagaaaaatgggtggctacgggtgcgacacggcggcgattgatgcaaaactgtcgtaccaacatgtgttcgtcaggacaccaagccatcttcgttcggcgacatgtggtggagaggtgtgagctagttccggtggggcatctccagccacacattcggctaagcaagtgacaaagctgcttcctccacaagcacctcaacgacacgaccagttctaatccatacgtccgaaactgctcgatgatgcaacagcttgggtcctaagctgctcaacaacatggccttttcttgaccacaaatctgacaagtatcttaccctcctgcttgatcggaagctgatcagtgacgtgcccaatcgtcgatcacacacctatcgcgaatcaatcatgcattgcccagggtcgtccatcgctcaccacgggccgatcctgcatcgtccgtgatcgtctgaatatctatgtcatcgccccaaactcgatttctctcgcccaacttccatttttattgttcatcttgcaatttccctcgatcaaaactcttgaaagtatccgaaaatacttcggctcatcgccaacaatcattctctttgatattggccgatggttctttgatagccatccctcggtcaatttgtagtcgtgatgaggggtattacattctcctccccttaataaaattcgtactcaaattttcaggggaaatgttacctagaacttctccaaaatgttgacaacataacctatgccaacttctttagactccttgtcttcttgaacttctctccttgaatctgggtcttgcatgcttcaaattatggctcaccgttcttctcgtcatggtactcctcccctttgactaatcttcaagggcttcgtcttcgttttgtgattctcctcatacccttgtattgacttaatgacttgggaattcggctcctccccttagacttaactttacattatgtaaagtatgtcttttatttttcacactctcttactttagctattttcttctttagctataaccttcttggttcatcgtcttcatcattttcatcatttgtttacctctcttcccttcttcacttcatcactctccacttttcttagaactcttcaactccatttctgtatatgtgatttcctttcacatatcatgtgtgttgctcaaaagcttaacacacaatcttgccttcatccacaccacacgccacatgttatcacatggtttttaggttaaggatggtcngccctaacaactacagtttacttaa

SEQ ID NO: 15200 - DNA, 324 bp, Arabidopsis thaliana landsberg
gggagcccgtgtcgacatatgatattcttccatacaaagcgctgtacttctccagcctggatcttattataagcttcggcttctacccacttagtgaaatagtctgtcattattagcatgaagcgcttgccgttcgaagatggtaatgggccgacaatgtccattgcccagcgcatgaaaggatacggtgccgtagacgttgtaagagcttcagttggagagtgaataatcgaagcatgcctttgatagggttcgcatttggccacgaaacggatacaatctgtgatcattgttggccagtattggccgtgcttctttattttg

SEQ ID NO: 15201 - DNA, 596 bp, Arabidopsis thaliana landsberg
cgaaagttcttgatgctgcatcttttacttcattagagtcaagttggttaattgtaggccttttgatcacttcacagtatttgcttgtttcagtctggtatattcttcaggtacatatacttggaactgattcatgaatgagattttgggttttgttggttacacataaacttaagctaaatttggcagctgtacatgatttcagagtcaggtcatggagatctaccctgaagaaataactgtagtcttcttctacaacttatgtggaatgctaatttcaccaccagtttgcagaaaaagacttgacctcttggcagcttaaaccggatatttcctcgctgcagtcatatactcggttaaagtcaaaccttttataacctgcttcaactactgactcttatctttaagctcagaaactaccactctgtttcagggagtatttgattcatcattgtgctcggttatacacacatggggtctccacctgaatggtccagtgtatgtatccttcttcaagccgttgtttatagcagttgcagtaaacatgggtgctatattccttggcgatgcacttcacctttggatgtcctttctct

SEQ ID NO: 15202 - DNA, 483 bp, Arabidopsis thaliana landsberg
ctttttttgtcgtggaaaaatgattgaactcatattaaaaaaaaaaatactaaagtcttatttaactaaatatttctatataatattgatatatattggtaaatttatatgattaattaatttataatattgttgggaccaatatttatatacgattttttaaaaaaaatattaacttattaatttatctaattttatcaatttttacacttgttccaagtgggaaccggaaaaaattaatttatagaggttattaatttatcgagtatcaatttatacaggttttactgtactaggatgtagagattcttattcgatggtggaaagggtcccataaaatctataccccaacaatcaaaaacttcaacttcgacgataaatttctgacgcatcttattatgcttgcttaactttccccttctttgacaagaatcaaactttaatatgaatttgtgagcatccccaaacattgtaggccaccag

SEQ ID NO: 15203 - DNA, 2568 bp, Arabidopsis thaliana landsberg
tatagtcaaactctactatatagggtaacgcgacttagttgaatttaacctcgatagaaagacgaaatcaagtgaactgaaccacttgactaaaagcacatctctcaaatctaaaaactacttattcgtggtttatctataaaacttgaaatatttttgtcaaaagatcatatttttaataaaacaggaagaatgcaaatagtcatctttacggatattttgttagattgaagtttaaagaacaaatattacaatccatcaaatctgaaaactacttattagttatttgtggttgcctacagctttaccaatacttacattttgcttatagaaaacctttgaatgagttatagaaaacctttgaatgagttggtactattgtcgtcattcttctaatttctaaacttcaaacaccaaaagttgcaaagtagtttttttttgttgttttggtttaatattaaaatagatgatacgacatcggttaggcagttgttaaaacgctgtgtttcaagcctttaaacgacagcgtttcttaaagtgctcgatagccttttactttgtaagaagagtcgtcgtaatctcatttctcttttaactgagacgaaaaagattcacttctccggcgagcaatttcaagtttctcggtaatggcgatgtcttctggaactctcaggatctctgcgaccttagtatctccttatcatcatcaccaccgtaatcgcctctcattaccttcttcttcttccaaggtccgattttcttataattcttactctacgattcaaatgttctcttcgctgcaatttgggatctggagctcgtgaaattcgccaccaaattaggagaacttagattactagcttcgatctttcgtttttatgtctgtgtggtttaggaagaatctgaaatgcgtcttttattggaacaatttcacaatttctctctagctctagatttgcttgttcatcgcgagctcctgaaagtttatcattccagtttctgtgtttttacttaggcacttggaaatgaaggattttagtaacaaaacttaagtatatttgtttttaggaaagccaacgaatccatctccatgaccatcctccttttttgtagttttgatattttctttatcttgtagctcatattaagtctttatagtatggaagtggtgtctttgattactgagagcgagactggaccggtcttctgttagatatatgcggatgtttgtggtgctatgacctgatgtgttgcaattttgttacaaaaccatttcattaagtttaagatgagctttgatgttacagttgcttctttacctatagatgatcaaagagagtgaatatgttcttaagcttgtagctcatattaagtctttttaacaatggtggtggtgccttggattacgtagactagaccggtcttctgttagatatatgcagatgtttgtggtgtttatgacctgatgttttgctactttgttagaaaacatatacgtttaggtcagctttgatgttatagttgctttacctatagatgtacgataacaattactgagttctcaaaatgcaactagtctgaaattacagtccctttttgcgggtgatggatgtaaatttgcaggttgatttcacgggattcataagcaatggcgtaaacagtttggaaactcagaaatgtactcctggactggcgatcagccgcgaaaacacacgaggtcaggtgaaggttcttgcaaggaacaccggagactatgaactatcaccaagcccagcagagcaagagatagagagctttctctataatgccatcaacatgggtttctttgacaggttaaacttggcttggaagataatattcccatctcacgcatcaagaagaagctccaacgcaagaattgcaaagcagcggctcaagatgatcctcttctccgacaggtgtgatgttagtgacgaagctaaaagaaaaatcgtcaacaacattatccatgcactgtcggatttcgtagagatagaatcagaggaaaaagttcagctaaatgtttccacggacggtgaccttgggaccatttactcggtcacggtgcctgttagaagggtgaaaccagagtaccaagacgtggacgaggctggaaccataaccaacgtggaatacaaagatacccgtgatggttctgtcgatgtcaggttcgatttttatgttccagagtgatgaaaaggcacagtcttagatttatttgctggatagtatcttgtctgttatgttgatgttcttcaagtttagtctggagggaacaaagacagtttcttgacactccccatgtatatatatatatgcaacttctcttttcttataagtttttttactgtgtttgacacgagctggtcggctcaacctattttagtttcacattctgtgaagttaatcatattcaattgcaatactttaaccacaaactatataagttaaactcaatcaaaatatggtgcaatggttcccatcacaaaaatagaaatggactattgaatctcttacctgttcgactaaaataaatattttaaaacaaga

SEQ ID NO: 15204 - DNA, 752 bp, Arabidopsis thaliana landsberg
  unsure (1)..(752): unsure at all n locations
ttaagcatggnnnnnnnnnnnnnnnnnnnnnnnnnnnnagcagcaaccttatattgaccattcttcttgaaaactgctttcacaggagcctttcctttacttacttgtaaccaagctacgaggaacacaaaatacatcagattagaattggaacagaatcttaaagagtgtggtgcaaggaacacaaaatcagaattatttttaccagagaaagtgtagagaagtccctttttcaaataaaccttctgtgagacactgtcaaaaggttgtttcctgtctcgagcaacaacaaagttatggtttccaaattttctgaaatcgactttcgcgtttccgaatggtgtccagcctagggtgccatctcgtacgtcagggctgacgatgattcctccattgtactgtggttttaaaggtatctctagacactgcaccaaaacaaacagagtaattattacaacaagaattacaacgaacattctctaaggtcaggtaagtaaacagaacaattgcttgcctctatggttgcagaataatcatacggcacgacttttgattcacaccctgcaaatgttttcagacaaaaacattagatatactcttttttccttgaaaaaaaaagtgagaaaacattagagaaaatgaagaacaacttgatagagaaaggctgcagaggacaacaagcannnnnnnnnnnnnnnnngaagaataaaaagaacaaaccgattgatgatgaaggagatgtaaatgccttt

SEQ ID NO: 15205 - DNA, 2157 bp, Arabidopsis thaliana landsberg
agcaagttgtttataagcttgtttgatttctgggagtgtgactgattcggtgacgccgagaagatcgtagaaggataagtcttccgattgttttactggatcgtcgtgggttaatcgagattggatccgggtggatatgaatcgggttcgggttcgggtcgggtaagagatagttgttgggaaggaagatggttgaagagaggagattggttgttgtttgtagaagaatgggtggtgattggttgagagaattgatgagcttttgtaacatttcattgttttaaattttagggtttgtttattttggggatttgagtattgtggattttaatatgagaattggtaatgtgtaatgtgtagtttgggaatggggagagagggagggaggtagatgaaacagttgagagtaatatgtggattttgaagggtatttatgtcattttagtttaatggaaagttgtcgtcgtttgcgactggaagctttttgacggcgcccatggcttgtagctgctgacgacaatccttatcccttattttgggcttcagctacttccacgagcccattagagttttttttaatacaaaaaatgtcaaagaaaagaagaaagaaaatgttgattgaattttagaaatttggcaaagccaaaaaagacttttgagagtttatcgtaacttttacggtgtgtgactgactctctcacgagtcacgagcgtgccccgttaaagagcgtttgcgcaattgcttagcactcaccacacagctgaggtaaccccacacgctctactttttgtgctgcggtaaccccacaccgcaagtaattgaattatttttagggttaatatttttatgcaagaggagacataattgactttgtggagcgttcatttggaaattcataaatctttgtggaagatgacgcaatttttttacaagagacttgttaagtcaagcttttttttttccacgaaatgtaaaacagtccatgggtctattactagagccatcacttatgaacattgagaacatcattcatttcactttctgaggaaaaaaaaaatcaaagaaaaaaagtatattgcattcttgaagtcagatgaagatgacaatatggagcttgtgtttaatcttgtccctttctaattcagttctcgttttggcttctcatgttaagcacttatgtcgtcaagaccagaagaatgctcttttggagttcaagaacgagttctatgtccaagagttcaattccaatgggattgttggtgttaagaagacagagaagtggaggaacaacactgattgctgttcttgggatggtatctcttgtgatcctaaaacgggtaaggtggtagagttagacctcatgaacagttttcttaatggtcctttgagatatgatagtagcttgtttagactacaacatcttcataatctggatcttggctcgaataatttttcgggtattctaccgggatccataggcagcctcaaatatttgagggttttgagtcttggtgattgtaatctctttggaaagattccttcttcacttggaaatcttacttatctcactaatcttgatctttctgttaatgatttcaccggggagctaccggattcgatgggacatttaaacaagctaacagagttgcatcttggatcggcgaagcttagtgggaactttcctagtatgctactcaatttgagcgagcttacgttgatcgaccttggttctaaccagttcggaggtatgctcccatctaatatgagtagcctctctaaattggtgtattttgggattgatagaaattcattttccggatctattccatcgtctctcttcatgctcccttcattgacctctcttgttttgggaagaaacgacttcaacggtcctcttgactttgggaatatctcttcaccatctaatcttggagttttgtcccttctagaaaacaatttcaatgggccaatcccggagtctatatcgaaactagtcggtctcttttatcttgacctctctttatggaacacaaagagaggcatgggcgatttcaacattttcttgcatctcaagtcacttacgttccttgacctctcttatattaatacaagaagcatggctgacataagtatattctcacctcttttgtcacttg

SEQ ID NO: 15206 - DNA, 2964 bp, Arabidopsis thaliana landsberg
  unsure (1)..(2964): unsure at all n locations
gcgtatactcggccgagctattgtttcgacgggaattattcgtgtgacggttatttcggaagtagacgctaaagaggctagggcgtctgctgccgaattctcagcacgagggactttaatcagctcgaacttttcgaacttnnnnnnnnnnnnnnnnnnnnnnnnnnnnnnnnnnnnnnnnnnnnnnnnnntagcctcgtagtctccggagtactggcttgcaaccagttgcgaatcgcagtgagcttgtaggtcccgtaccccaactccaatagcgaggcgaagaccggctagcagagactcatactctgcttcgttattggaggcgttgaaagcgagccggaaagattgttcgaggacttccccgtaggcgacttgaggcgaactccggctccagaaccttgtttcgatgatgcgccgtcgacatgaaggatccaaggttgactcggaacatcggattcagcagtggctagagggagttcgatcaggaaatcagcgagaacttgagacttcagacttgcccgcgcacgaaattcgaggtcgaattcactcaactcgatggcccatttggctagtcgtcctgactgagacggactgtgaaggatggctcgaagtggcagagacgtcaaaaccacgattgggtgagattggaaatatggccggagcttccgcgctgaagttatgacggccaaagccagcttctccatcatcggatatcttgcttcggcgtcggaaaaagatttactaacgtagaatataggtcgctcgtcgtttcgttcgactcgtactaagacgctgcttaccgcacttcccgagacagagatatagagaaagagtctttccccgaattcgggtttcgcgagaactggaggttcagaaaggtagctctttaactgtctgaaagcgtcttcgcaacgctcgtcccagctgaaacctctattcgccttccgaagtagagtatagaaaggcaagcacttgtcggttgatcgtgagatgaaccggttcagggcagctactcggccggtcaaacgctggacttcccttattgtccgaggtgaagacattgctagaaaagcgtttatctgccttggatttgcttcgatacctcgctcggtcacgatatagccgaggaactcgcctgaaggaacggcgaaagtgcacttcgagggattcaacttcatcccgaacttgttcaaaatatcgaagcattgctggagatggtcaagatgcgaagtggagaaatctgatttcaccaacatgtcatcaatataaacttccattgttttgccgaggagatctttgaacattcggttaaccaggcgttgatacgtcgcgcctgcgttttttagcccgaaaggcataaccttgtaacagtatgttcctcgttccgttataaatgaggttttctcctggtcatccgggttcatcagaatctgattgtatccggagaatgcatccataaaagataacatttcgtgtcccgtggttgattccacgagtcggtcaatatggggaaatggaaaacagtccttcgggcatgctttattgaggtcggtgaaatctacacagacacgccactttccgttctttttcttaaccactacgggatttgcaagccattcgggatacttgaccttgcggattagtcctgcttcgaggagtctaacgacttcggcattcactgcttccgcgcggtccggaccaagtttccgacgcttttgcttgaccggtttaaaagtcgggtcgacgtttaactcgtgcgagatgacttccgtgctgatcccggtcatttcgccaacgctccaggcgaaagttcctttgttttgcttaaggaaaagaacaagtttgcttcggaaactttcgcctagattagctccgataccgacaagctgatctggatgctcctcgcttattatcacccgctctacgaggtcgtctcctacttttttaattggattcggagcggcctcgagctgtggttgctatttgactttgagcttgtgtccagtcatataacacattctagatgtacgctgacttcccaagatttgctttactccggtgggagttggaaacttgacacattgatggtaagtcgaagggactgctttcatctcgtaaagccaaggtgttccaagtattatattgtaagcggcaggtcgatcaaaaacggtgaattcgatcattttcacaatcccttgagcagtgaccggaagtgtaatcgttctgagtaacattgaagtctcgctcgtgaaggaaacgagaggactcaaagctcctttgatatccttcttagaaattcccatacgtacgagggtatccagaaaaattaggtcgacagaactcccagtatcaatgaggactctttgcacctcgcagttccccacgtcgagcgatatcacgagggcatcgtcgtgcggtttatctaagtcggaggtttcttcctccgaaaatgaaatttcagggcagtcaatttgattggtcttaggccttttcgccaccggagcgaccaccttcctttcgtgctgcttaattgcgctgacagaatcccgaaagagtttagatcctcccataattactttgaccatcttcttcgggccttttggagtgacgggagctggctcgttcttttgctttttgttgggaggtgaagatatctcgaaatctaacacgtcgtacgctgtctgagccaaatcgattgttgtgacatcgatatcatgaatttctcccgaagcaaattttgcagccaacaaccttcccaaagccttataatcctttgtcgcatgaccattcattttgtgaatctcacagtatgcgttaggatctcggacccatttgttgctcgggagagctccattcttgccttttggagagaaaggcggtttcgatggtgacgcttttgggggaagttttgagcggctccttctcaacagaaaaagttcctgctgctggctttcggagctc

SEQ ID NO: 15207 - DNA, 431 bp, Arabidopsis thaliana landsberg
ggaaactggtttccaaggctacgaggcctcttttactgtttccatcgcgatgaagtatttgctgaatttgtaaaagatgattgtatcgtgcattttgggcaagagaataagcaaatcccaaaccgtagaaagcatcctggcttcatcgtgcagcatgtttatgatagtgttaagaagaagcttaggaagctcacttttaatggctttgacttgcagcaaaagcgtgaaatagatcattttgtggaaaagacaattttgcgaataggccatcttcgtgacattgtgaaggagcaaaagactttgatctcgaggagtaaaagaactgttcctcaaagctatattataaaagcggtggaaacaagtcgtgaaagcaataatggggttaacttcgatcttgaaattttttgatttgttgaccggtgattcggatc

SEQ ID NO: 15208 - DNA, 1811 bp, Arabidopsis thaliana landsberg
atcctaatcttcttccggtcacctctcacaaattagctgctcgttccacagcttgtgtcttccttggctatcctacaaatcataaaggatatcggtgtctcgatcttatctcacgtaatcatttcccgacacgttatctttgatgaagctaacttcccattctccaaaaatattcaggcttctccttttatatcactcgatgattcccttcctccacctacttctcctctcctcaatacactccattcatcacagccggttattcaaactgaatcggttcaaccctcctcactagacccagtcatcgcaacggctccacaagtggctgctccacaacctccagcagcacccagccataatatgatgactcgtggcaaaagaggtataacaaaacctaaataaattctcttcttacacacagaaattctttctcctttaccttcctctcacctaaaagctctagagaatcctaactggactgccgccatgtatgaggaatatgatgctcaaattaaaaaaggaacgtgggatctagtaccccgacccgaaaacattaacattgtgcgttcaatgtggctttgtaggcataaatttggtgcagatggaaagctatctcgttacaaggcaagactagtcgcaaatggcaaatcacaagaacttggccttgactatgatgagactttcagcctcgtcgtcaaaccagcaacaatacggcttgttcttgacttatctctctcacgcaaatggccgattcgccaacttgatgtcaaaaatgcattcctccatggcacacttgatgaaacggtgtacatgcaccaaccaccgggtttccgcgatcaaaccaaacccaaccatgtttgcttactaaaacaatccatctacggtctcaagcagtctcctagagcttggaaccaacgttttgcacaatacgcaactcaagtgggattcactcaaagcaaagctgacccgtctctcttcgtctaccatcaaggtaaagacatggcgtatctactattatatgttgacgatatcggcctaaccgcgtcatcatcgacactacttcaagctatcatatcatctttaagtgcagcctttgaaatgacggatcttggtgacattcactattttcttggcattgccatcaaacggaactcatccggataattcctcagccaacacatctatgccgcagacattctccatcgcgccaacatgacgaactgcaacacatccaccacaccagccgattcacgagctaaacttgcagctgaagatgggcctcgtattgcagacccaactctctaccgtagtcttgctggagctctccaatatctaacttttacacggccggatatttcatttgctgttcaacaagtgtgcttatatatgcacgatccaagagaagctcattttaacgcactcaaacgcatacttcgctacatcaaagggatacttgatcacggcttacaactatacccgacagactcctccggtttagtagcttacacggacgcggattgggccggctgcccaacaacccgacgatcaacctctggttactgcatattccatggcaacaacttgatctcctggtgctccaaacgtcaacataccgtctctcgatcgagtgctgaatccgagtaccgcggcgttgcaaatgtggtagccgagacaacatggctacgtaatctacttcttgaactacatcgacctctctcgaaagctacattggtctattgtgataacgtaagtgcgtctacatcttcacaaatccggtccagcacaacgaacaaagcacgttgaaatagata

SEQ ID NO: 15209 - DNA, 1481 bp, Arabidopsis thaliana landsberg
tatgggtaatggtggaaaatttgtaggtgaccttagcagaaggaaagtagtaagacggggctggtgcagagttgaaaagatacggttttggatgtggcgtgtacttagggccttgtcttctatattgtagtggaggtagtggtgatgccgagtagtatggggaatactttttaggtgaataagatgattcgtgtttgtggactggagaattgtattgtggtgtttgatgggatgagtaagggtatgctgtcactgtagctgcaatggcacttaagaccacgacataaaccatgcaatgcactcgctccatcactcttggggatctcattgtactcgtcgctgctctttttgtttctttgttttggttatgatttacttgaaaatgaaagtcctttatatagtctttcttctatgtatataaatattatagtattgtcccatcttgggttcgtgtatagcactttcaaatacatttatacgtgctaagttgtttgtttgaaaatagtaatgtgtggggtgtatgaaaaattattagattctctctaccaaccttcaattggtttgagatgttttcgtattattttgtttgattatatttaattagttccaaaaaaaaaataaacctgcttattgaaagattatttagccatatagaagatacagttatatagtttttgtttaaaaacattaatgtgacacacaaaatttattttatgtatcagattttatttaaattttattgtccttgatttataccatatagagttttgggttatgtttctgtttttttttgtgcaaactgggttatgtttgttattgttgaataatgattatacaagaaagagatatagatacataccctaaattgattatgcattctcaaattaccgtatacagtaaaacatgtataacctaatactcgagaaaataataacctctaaaaattaataaattttttcggtctcgagttgggaccagtgtaaaaaatgatacaaatcgataaattaataagataataagttttttgaaaatttcagaaagattattaattttaaagaaaagaacaattacttttagatagaagctttgtaagaaattacaaaatttgtaaaatctttctgtaaattaatacttctcaatataaatattttttttttgatctcgatgttatttacttatagagctttaactgtatttctttaacgaccatctaatctacagtttaagctgattattcagttaattgatcccacatcagccttttatccaccattctttgaaattgaagtccgttctttccctactcagagatattaactcaggctttctaacattttcttaaatagaacacaagccagagacgattatatatcttacttttgtagacttttgattagtactcgtttaatcaacttagactgatcactaaacttgacatgttaaacaattaaattcattctcaacacttagcaaaaagtcaa

SEQ ID NO: 15210 - DNA, 4992 bp, Arabidopsis thaliana landsberg
gcacatgttgtttagccataaatagtcgcgctgttttcgagtgattcaacattcagaacgccaaccttgctttccacgagcgtttctttctgtagcgaagacctactgaatgataatgactcgtcgaacagctttagcttatcggtgataggtatattaactaataactaatatagtatctgataattatcttatacactattagcagttattcaatcctttttactttttaccgtaggtgatgagacactggcccacttttattcggataaagatggctcactcattattgaatttattgattagaacttcaaccattgggttttgtgtgaatatgtgaaagaaggaaacagtttcaagtggtggacttggtgatttgtttcctgtcaagtccaaaagagtttcggcgagatcttaacggacctgaatagatcttgttcccatttcagaacagtttttggatccaaaatcaaaggtaagatcgatcgggaaatcgcgtttaaagttggtgaatagtcacagttttcagagcatagtttttctaaagtatctcaaaaacattgtaatttcaggtaaaggttttcaggatcaatttcccgttgaatcagagagaatcaagtgtggtgtgaggtgtcattgcaataatcataatgtcaagaatccatatccgctgacagagatagaatcgagattatattcaagaagttatgagtgtttctttctgggtaagtaactgcagaagctgtccaaatctgtgctaagtataaatccagaacagtgtgtgactactggttttgtgatgcgtttcccagatgtaccagaaggaattagatcacaataaagatgtctatggaaagatcttgcttcaaggaattcagagtagctaagagcttgtccatcggatttaagctccatccgtatttgaccttggaagtttgcccagaatcatctcaagttgcagaacctaagtatcagttctgatgcatcatcttcagaagaacgtgggaaattaatgtgaagtctgatcgagatgaaacttagtggagttattcatgatactactggctacatattcaacggtgggattacgtttctaacggttagtcagtaacatatgcgtatgttttcgagacagatttatatagagtaaatcgtaaccgagttttattgtttgatggcgcaaatgaactcggcttgagctgaagctttgtaggagctttcatgactcatggattcaggttctaattgaggtagaatcaagttagagcttatgatcatatggttacagtaaagattgtctaaggggaaagagaaggagaattgagtttttttcattttcactaggccaaggtgagggtggtatttgcgaaacatattatcattttcttttgttatgcttcttgacgcatgatatgtaggcttagatctgattgtgtaggataagattacatgatgatatgattttatgattgttgagtatgatgtttgataatgtgatgttatggataatataataagtatgtgtatgttaagtatgattaggagtatgtatgtatgatgaatgtaagactggggagaatcgagctatgggccgtggtctccctagtgatgtggacagtgatggaccgccgggttaacagctggtcaagaacggctgacgagcccggaatgggagtgtctgagccacgagggacagcctccactcattaggttctagttatcacgaggatgactgacctaacgatacacatttatatgctattatggataagatgcttgttatgaatgtgctattagaaattaaagcatgttaggttgattgtttgtgtctaagtttatatgttatgatgatgattgtataactttagaaagtgttctatgtttcattggcagatttgattcccctcactaagtattctttactcacccttttttccctttttcctcaggttagtaagcgtgaggagttatgtgcaatattttgttcgtgtgtgaagtttaaagaaaacattttagcaagatcagatgaataacatgccgttttggcctatatggcgggataggtgttacaaggtgcaatacccggatttggtggcagacaccgtcgtggtcaaaaagaagaatggaaaagacagggtgtggatcgacttcacataccttaataaagcttgcccgaatgacagtttcccgcttccgcatatagattgtctcgtggagtctaccgctgggaacgagttactaactttcatggacgccttctcgagttataatcaaataatgatgaatcgcgaagatcaagagaagacgtcatttatcacagataggggtatctattgttataaggtaatgtcttttggtttaaaaaatgtaggagctacctatcaacgattggtcaacaaaatgttccacgaacatcttgggaagaagatggaagtttacatatatgatatgttggtcaagttgttgaagaaagaagaccacgtcaagcatttagaagaatgctttgagattcttaatcaataccaaatgaagctgaacccggcaaagtgcacgtttagagtcccatccggggaattccttggttatattgtgacaaaaaaaaggaattgaagccaatctgaatcaaattaatggctttctcaacatgccgtctctaagaaactttaaagaagtacagcgattaaccggccgaattgcagtgttgaaccgttttatttcaagatcaacggttaaatccttacccatttatcaaattttagagggaaacaaagggtttctttgggatgagaagtgtgaagaagcattcggacagcttaagacgtacctaaccatgccacccgtattgtctaaacacgaagcaaatgaaaagctctttttgtacgtttcggagtcaaatcatttagttagcggagttttgatccgggaggactgggagaacaaaaaccgatttactacataagcaagtccatgacggatctagagaccaggtatacaatgatggaaaaactcgcactcttagtggtaacatccagtcggaaactgtatccgtatttccagtctcatccaatcgaagtgttaacgaatcagccacttcgaacaattcttcatagtccaaatcaatccggaagactggcgaagtgggttgttgagttaagtgagtatgatatagagtacaagagccaagttgccatgaaggctcaagttttagacgatttcttgactgaattaccagtgcttggcgccctagagcaaccggagaatcaaacttggaatctacatgtagacgagtcttcatcaaaacaagaatccagagtgcgaataaagttggaatccccaacatcataaagtcttgaacaagcattccgattttatttaacgctactaacaacgaggcagaatatgaagctttaatcgcaggacttaggctagcacaaggaattggagccgaagtagtagtcgcttattgtgattcgcaactagttgttaaccagttcaatgttcaatggagattatgaagccaaagattcaagaatggaagcatatctcaatgtagttaaagatctgactaaaagcttcaaaaagttcgaactcattcgcatacctcgtggagaaaatatgactacggatgcacttgctgctttagcatcaacatcggatcctaaggttaaaagagtcatcccggtggaatgtatttcagagtaagcattaaagagaaaaaaagaagccctcgtcatttcaaagctgctatacgtgatcgtggtgaacccgagatagagttgccacctgtcaaatgaagaaagtcaaatggttcaaccatacccgggcccggcgtgtcaaaagaaaatagtagcgaggagcccatcaatccgacagaagatgcagttccagaaacaattataagaaccgagccactaatcgaggaagatatccttgagccaaatgagcatcccgaaccagaactatgaatattccacgagatcgaccaaattctggctaaagattggagggctgattggagggagccaataaagcagtacattgtgacagtagagctcccaaaaaatagatgacaggctaggaaaatgagaatcgttagcgcaaaattttgtctatggaaggattctttgtatagacgaggtgtcagcgatccctaattactttgcattttttggccccacgtcgagatcgttatgagcgaagtgcccgaaggtttgtgtggcagtcactcttcaggtagggctatggctttcaagattaagaggatgggatactactggcctactatgatcacaggctgcgttaagtattcccagcaatgcaaacattgccaactccacgcgcctctcatccatcaaccttcagagttattctctttgattcctgccctatacccgttcatgaggtggtcgatggatatcattggaccattgcacaggtcaacccgaggtgtacagtatctcttggtcctaactgattactttttgaagtggttgaagccgaagcatatgtaaacatcaaagattcggcagtaaaaaccttcatttggaagaatatcatatgtaggcacggcgtcccatacgagatagttacggacaacggaccacaattcatctcacacgagttcaaagctttctgctcggattgggggatcaaagttagttattctactccatgttatccacaagggaacggtcaggctgaagccgcgaacaatacaattttaagcaatcttaagaaacgtctaagtcatttgaaaggaggatggtatgatgaacttcatctggttttatgggcatatcccacaactcctaggcgctcgaccggagaaaccccgttttcattggtgtacggaatggaggcagttgtcccagccgagctcaatgtaccaggacttcgtcgaacagaagctcctttaaacgaagaagagaattctgcgatgctagacgatttgctagataccatcaacgagaggcgagatcaggccttaatccg

SEQ ID NO: 15211 - DNA, 895 bp, Arabidopsis thaliana landsberg
ctgagcccgagtccgagccctgggtcgggcggacggaagttcgccgtcttccgggtcttagcccgagtccgagccctgggtcgagcggagtaagttcatcgtcttccggggcttagccgacgtccgagccctgggtcgggcggacgggagatcgccgtcttccggggcttagccagagtccgagccctgggtcgggcggacggacgttcgccgtcttccggggcttagcctgagtccgagccctaggtcgggcggacgagagtttcctatggcgcctttggaaggcctgactgcctgtcagtctcactctgtcaagtggcaccgcagtcggagtggcgcaggcggccgtgtccttctgtcagaccggtcagtggagcggcgaagtgacggcggtcacttcggctctaccggggggcgcgcgtcaggataaaggtgtcaggccacctttgcattaaatgcccctgcgactcggtcggtcagcgcggcgatttagtcagggttgcttcttagcgaagccaaggcctcgggcgagccggagatgtgtccgccgttggatggggggcctcgggcgagacggaaatccctcggggtcggctgcccttgtccgaggctaggctcgggcgaggcgtgatcgagtcgttcgtatggactgatccctgacttaatcgtacccatcaggcctctgcaactttatgctgatgggggttaccagctgagaattaggcgtcttgaggtacccctaattatggtccccgacagtagcccccgagcctcgaagggagtgttagcactcgcttggaggctttcgtgtcacttttttgcaagggaaccagcctttatcggttgcattttgcttccggtcggtgcggcgagcgcaccgccgggtgtagccccc

SEQ ID NO: 15212 - DNA, 2088 bp, Arabidopsis thaliana landsberg
aactctccgtcaaagagtcgcatttctctattgcttgttttagtttacttgttcttagctcagataaaggtcattctttatcattggtgcttttcattttgacgagtgctatggctccaccggtgacaaagccaacagcttccgattctctccaggaatcgaccgaactcagggagacgacgacgcctccacctgcagaccctccaacacctcaaccattagacattcgtctagagagtgtggaaaaagaagtactttacttgagagatgcggtcactcaaatcttacgcaaccagatcttcggcgtgagccgtgacggaggttcaacaccgtctgggttttcaacaccgacgccggcgatgccgttacagacggtaaacccacagcctctggcgggacagaacagagagattttttccggacctcaaccaaagcttcagatgcgtttaaaagagacacgtttacgtcctccgatgtttgagcagccacacttccaagcatctacgtcctcagaacctccgcgttttcaaacaacctcactggacccactgcgttttccagcctctgtttcggaacctccgggctttcagacaggatttcagaccagctttccgactacaccacctcttccacccgtgttacatccatcacaacttccacctcagcttccgtcgccgcgaccaagggctgacccagctccacgacgtcttgtggattttccggcgtatgaaggaggtaacgccgatgactggctctttcgattggaacaatgttttctttcgaatcagactcctgaggatgaaaaactagacaaggccatctcttgtcttacgggtccagcggttacatggtggagatgttcacgagaaagagaacaaatttatgcttggagagatttccaagagagatttcgagtgcgatttcgacagagcagagggagttctgccatcgatcacttgttcaacattaggcaaacgggcagtgttgaagagtatagagaaaggttcgaagaactcaccgtggatttgccacatgtcacatcagacatcttggagtctgcctttctcaatggtcttcgaagaaacctcaaagaccaggtggttcgttgtagaccagtgcaccttgcagatatagtagagatagctaagcttattgaatcccaagagagaaacaacctcagctatcaagtaaggaacccaaatagagattctttccagccacctacagttcagacatcgtctactatcagagcacaagacagatcgggaggaaaacaaattgtctcctctacacgtgacactaaccgtgcttcaggaagtggtgaagtacgaaacacaaatccatgtcgcaactgtgcagagagatggtttccgggtcacaaatgcaagcagcaacgcttaaaaagcttagaagtaacagaagaggacgaagaggagagtccccttattgaggagctgaatgagccattgacagaagaagaaggcgaaccagaaggaggttttcaagtcatgactttaagtgctatgtcagatgactctcaagaacattccatgaagatgcgaggttacgttaagaacgctaaagtggttgtcttgatcgattcgggagctacctgcaacttcattagtgacgaattggttaaacaaatgggttggccagtcacacaaacacgcagttttggtgtacgagtaggcggtggtcggatcataaagagtagtggaaaatgtgtggatgtgcccttggaagtacagggaattgagtttatcttggacttttacctctttgaattaggagacctagatttggtcctggggttcttgtggctagcaggtttgggagaaacacgtgcaaactggggtgacttacgcttaagctggcagattggaaggacatgggtcacactgtatggagaccccgatttaagtagaggacaagtgtccttgagatctatggagagggtgattaagtatacaggagtagcatatctattggaattagcatccttgtttgaaagtgaaagtcctgagcaacagaacaatattactcctgctatccaacaactcatggatcagtatcaagggtatttca

SEQ ID NO: 15213 - DNA, 1568 bp, Arabidopsis thaliana landsberg
agctttttgtggatgtgaaagcgccaaagttcttttgtacaaactcaaagggagaaagccaacaatattcaaaaaaaagaaacgaaaaaaacaaaaacctctctcgctgcaaagttttatattcacagaaggaaaatatgattgagagaaagttagcaaagcgaatactcacaatccagcaaacgagagagtatctcattgcaactcggtctttgttccggttctgtccaacaatctgcgaacaagagacaacacatcagaaaaggatactccataaaccccaaacaaagcttcaggaaaaacgaaataacaacactttgacaagtcacaagacctgcaataagctttcccagtggtccttcaggaatctcaagccgagctccctcgtaagcaatagcataaacaacctgagaagaaatatgaggaaacttgttatatatacacatatgtcactaaagagtcttcttcttgttcagttaagttacccgttcaggcggtactccttcccaaggtctggttaaagtgcatagctcccacattattacacctaaactgaagatatcacacttttctgagaagggctcattgcggataagttcaggagccatccactctggagttcctgcagagactgtgtctctcattgttgtccctgtcattattctcgacagcccaaaatcacagatcttgactgtccatttgttgctcaaaagacagtttgcactctttatatcacggtgtactatccccatccggtgtatacacatcaatcccctagcaacattttacaagtttaaacgctgtttgttaattaaagatgattacgaaactttctcatcgagacacaattccaggtcctatttggaagtgttattgccttctcctcaaaccaaaattttccatattaatactacatactatgttggaaagaaggatacacggttttgtatggaagatgaaattacctgcaaatgtcccgcagcatctttagcttcctccgccagcttaacctctttttttgtccactcaagtggagcaagtaatacaaagatcccatttccatgtactcagtgatcagtgataattgttgaggctttgtgcatgctccaaggaacagtataactacaagaagtcgaagatgcatgcattgatgaaaacatatactaaaatctcacagtgaaaattcatagagatagatgagtagtttagtaccattgggatgtctaagtcggctagtggttatttggacgcagaaggagaaggcaggaaagaaagtcagaagacaagtaaagacgttattgccaattttgaataaaacagagaaagcctatagacatacctaagaattgatatctcattgcagaaatcctccatgttctcagctgtaaggtcttgctcaaggaacactttgatagcaacgtctgtcccgttccagatcccacggaatacttctccgaaaaatcctggaaggaaaaatcaacgaagaagatttagatgggttactaattcaaaaaaaaaaagtaaacttttgaagatagataaatacgagggtaaggatcgtgaagtaa

SEQ ID NO: 15214 - DNA, 1342 bp, Arabidopsis thaliana landsberg
gactttcgtttatattggtttgattcttttgtatatacctaaccggttcgttccgggttaatgaggttacatagggaaagtgtatataaactcttgtattcacactttaatgaaataagagaaacattttccactttcggctctcagctatatcctcttttgcatcttcatccatcttgtctatccaaagctttgagctctctttctgttcttcattacttctaatatggtatcagagctttacacttagcttgtttcattctctgattttgttttgtctccgatttgattcttcacaatccgacgatggttaaagctgtcgttcatcgcagtactcgccgtccggcaagctcatcacgcgcatgaagcacctctcgagcaggaagcttaacacccattccggaagcattgtttgctccgtttggttcctctgttgtgatgaatcctgacagcatccactctccactgtttcttcataacgccgaccacccagggatatcgattgtctctgagcagctagacggctcaaactacaaccagtggagctccgcgatgaagatagccctggatgcgaagaataaaatcgcctttgttgatggatcttgccctcgtcctgaagaaggtaaccatctctctcgaatctggtctaggtgtaatagtatggtcaagtcctagatccttaactcagtcaatagggaaatctatggtagtattttgtcttttgatgatgctgctcaagtctggaatgatctgcacaatcgtttccatatgacaaacctgcctagaacctttcagcttgttcaacaaatccaggatctccgccaaggttctatgaacctttcaacctactacacaactttgaaaaccctttgggataatctcgatggtgcagaggctagtgaaccctgccagtgttgtaagaaatcgaactgcgatggtcaacttgctgctaaatccaaagtgaacagaggacggattatcaagttccttgctggtctgaatgagaagtactcaatcattcggggacatataatgatgaagaaacctctccctgacttagcagaagtttacaacatcttggatcaagatgatagccagagacagttcagtcacaatgtcccttcagctgtctttcaggttagtcaggaagttgttcagcctggtgtgttgccttcttcctcgaccatgaatcaacttggaacgttgaatgctgtttaaaagaaggactctaagcccatatgttctcattgtggctacacaggacatacttctgagcgatgttacatactccatggctatcctgttggtggaagaaaggaagtcgtttatgagaatcacacat

SEQ ID NO: 15215 - DNA, 1482 bp, Arabidopsis thaliana landsberg
aagcaaccgatttaccattaatattattattatctgagactgagagagagagagagggagattttctgaattctgattcgtcgaaaagcatcaaaaaagtgaacgcttgagaatccattatggcacaaactagccacttggtaacttccacgtcgcgagtagattatcttcaatactcgcatgcgcgtgagtaaaaaacatacaaccttttattcttttctttctaatagtaatatctttaagaaatatccataaaaagtttattgctttcactataaatacgagagggacccacaataccctacacgtacttttttgcactttttcgtctttttaattaataaaaaaaagaaagagaaggaaggaaattaggcacttttgataaatcagattatgtcagaagcgcctacatgtccctttgcggacacacccacccattgtctatccattcatttttttttttcatttcttcctccagagagagagagagaagccacaacaagaagaagaagaagaagaagaagaagaagaagttctggaatagtcatcatcttctctgtttctaggctttgtttatttgtctctaaagtttctggattcaacttctgaagaagatagtagtagtccacaagaaggatcttctttacgtgagttgtttgtttctcttctccctctgtcttttcttttctgattttaataatcccaagtgtgttcttattttcttgctatctgttgtataattggtgttagtgattgattattcattgtatatcgatgaagggttggttttgatttttgttgaattggatcttttgatttggggttttaaaacttgctcggatgatgatgattgggattgatccaaaagttttcgttatttattggaaattcagattttttcgattcagttccatttgaactagtaagtcaaacaaaatctctagatttactgatctggggtttatactttgaagcttgagttgttgttgttttattaatttatttcgattttgagtaatatccatttgtaggttttggtctctgactcttgtttataataaaagctctgtattgagtaaaatctcatgaaagtaggtttcctttcccttttttatccttctcctttggttattaatctcctacaacctttttttagaaattactacctatattcagaaagattccatctatttcttcttcaaggcttgcttttttgaaccaaaagtctctctctttttcatctaataatttgtttacttttttggacagcagaaagttgatttggtcagagccaaggaagatgggttacatgtgtgacttctgtggtgaacaaagatctatggtgtactgtcgatccgatgcagcttgtttgtgtctctcctgtgaccggagtgttcattccgctaatgcaagaaccaaaaaacattctcggacacttgtctgcgagagatgcaatgctcagcctgctactgtcaggtgtgt

SEQ ID NO: 15216 - DNA, 1343 bp, Arabidopsis thaliana landsberg
actgaaaaagattaggtgtctcaacttttcccaaggtatcatttttctaaagaatgcagaaccgaattttaaatacaaacgcgataggtaaatgatatagataaaccatctttcctaacaaaatctgaactcataccatatagaaatcagtcttgtttgatacaaaaacatcattaaaaaagcaagtgcaaaaattctgagcagggaatgatgataaaaatggaaacaactcaataaccacccttgagatcgttgacaacatcgtaagggatgggagtgacagtctccaatgtcataccttcaaccatgaaaccaggtttaggacctttaggctgtctcttggtgctgatagtctctcctctggctttagcatcagccttaagcacatcgttctgcttcttcctgagtttaaactcttcagcacaccttgactgttgcacatgctccacacgcacatgtatcctcttccttatgattctgttcccaatctaaaacccaacccaacacacaaaattagctctccaacagattacactaatcataaacacaagaaatgaaaagagaagctttcacaacatcaaaacatataataatagtaaacgaacgacccaataagaaaagcttgaaactttcgagccaacactaatccaacatctcagaattcaaaacagatagctcacagaaagacgaattaaaccccaaatgaaagaatcaaaatcaatttcaaaccctaatttcaacaacaaaaaactctttcaaacagattaaaagttttgagtaatcaaacctgtttgttgacttcaacaccaacggcacgtttagtgacattccagatgcgaccagtacgaccatggtagaacttatgaggcatacccttgtggatagctccattaaccttgacatcgacgtaatcgccgaccttgaacgttctgaggtaagtggagagtggaatataacccttcttcctgaatggtctcgcgaacagatctcttgttctcgccctcactccgtgtcccgccggcatttttcctcctctctcacttctgtctctgacgaaaccctaaaaatgggagagagaggtgaaactagtttaaaaggctttttgtgtacatggtcttattgggccttcaatatttaagccttattttgatagacagaaaaagcccctatattttcaattattttttctttgaaccctggtgttactatatagaacagacatgcatagaaaacgtatatacgtactaaacaaaaacccttattttagtgtttttcctttttttgaataaagacaatttttttttttttttgtcatccgataattattagagagaataaaggca

SEQ ID NO: 15217 - DNA, 1000 bp, Arabidopsis thaliana landsberg
catacacgactatccaattcgcatattgttctaggaatctctcccgaaaatcgattattggagctgaacaagaaaatcatagagtctactggtaacaaagggaatggatcctggaatgtgtttgaacttatgtcaagcatatgtagttctccacgttcttgaataacatctgctggtccttcaaaaccattgaaagaattatgagaaatgtttacataccgcaactctggcagactccataaccactctggtacttggccttcaatttgattggcagagatgtctaaataggataacatggtttggtttcgtagaaatttgggaaactcggaaatattgcaggacgataaaataaaggtgtatatggatgagggaagactgacggttgaactgatcttcaaattaatcccggaaagatccaaatgaccaagtgacaagagaggtgagaatatactcaaatcaacaatgcctggattgaaattgtttcttccaatgtttaaatgttgaagattagattgtgaagagatattcccaatctcaagagggccggtgaagtggtttcctcccaggtcaagtaaaaccaacgaagggagcatgaagagagaagagggaatggttccagaaaatgaatttccaccaataaaaatatactccagtttggagaggctactcatgctagatgggaggatacctctgaacttgttatccctaaggtcgatccaggtgagcgaatctgtcagtcggtttaggttgcccatcgaatctggtggttcactagtgaactcattatccgaaagatcaagatgagtgagataagaaagacttccgagtgaagaagggattggcccattgaaattatttcttccaaggtgtaatagttgaagtttagattgtgaagagatattcccaatctcaagagggccgctgaagtggaaacttcgcaggccaagttcaaccaacgaagggagcatgaagagggaagagggaatggttccagaaa

SEQ ID NO: 15218 - DNA, 1580 bp, Arabidopsis thaliana landsberg
attctaatcacccctgttaaattcattaagatgtgtacaacgaatttaaaagatgttcgacaaggcttataaccttgatttaaacccgctggttcaggttgtgccgagtttctgaaagaaatagggaacataattaggatctgacccggttcagttttagcatcaagtactttctgattaattattttgaatttttagtttgtattaacttgattcttgttcgtggtagtcgtagtttcagattttaataatgactggtcatatttagagctttaaaagtcatatgtcgttttgtttcgctgctttctctgaacctcctttaatgttgtatctaaggtaaaacatataatctctttaaccttggagagaatatgaaaccgttcgaaattttaatacatgacactaagacatggccacatggggacattcgacatccatttgatctacctcattatttaagtttgttaatatttcaacgtcatgatcccgttggttccttttcgatagttattgaaaatgcgatagttattttttaaactccattttggtagactgatagatagcattgtcattaatcaataataataatttggtattcctcactatatattttgtgctagggttaataatttgttttaatgtcgttatcgcaccatatcactagtatctaagttcaaacttgcataatgtattcagttgataatactttttatatcaatacttcaaaggaaaacacaattattcaaaacgaggcatattttacaagcatggaagctacatgcatgaatatgcataacacatacattcgaaactatataggatcctctttgtaagagatacaaatttttgaattatgtcttacttatatatcaatttgttataaactcactttggataattattgccaaattgctatcctttaaacatccctttattattaaaaggcaagtacaaattgaaattttgtctaatttggcctcaattttgatttcaattttggattttgttctttgctattcaaaatcattaagggtaatttagtcttaacaatctcctaaactttatatgatctgattcaatctaaaccgttcaataaaattggttttcttaaatctaaaccgttcaacaaaaataagtaaataacaaccaaacaaaaatttaaacacattttaacacattcctcttatcactaaataacaacccaaaaaaaatctcaattattatttagttatgtttgattaaaaaatttatatttataagtttaagatatcaaatttattcaaatatttagtataagaatcaaataaactgattaacctgcgataaaccgcaggttaaatcctagttatattcaaaaaggatataagagtatggggataaactaaaatgcctactacaagcaaaactaacccgggaagatagatttttgcttccttaaggattaagcccacgaaatgtattgaaattcctacatgtgtaaagcctattcgaaaatctaggatcaaattatgggaaataaaagatagtcacaagcaataccacacgcaacttgatatcaatgatataacatacacacgtta

SEQ ID NO: 15219 - DNA, 2443 bp, Arabidopsis thaliana landsberg
gaggtactacaaaaacggatgacttgggtatctgcttccaagttacgtgttgtatctctctttcctattctgctgagatcatgttcccctgctcttgacttgacttgtctaaatgatgattttcgttatggtattggtagagtaatgaatgcaatgataattgattgggaaaactgactcactttagcttgattaaacaaaacggaacgaacaagaaccgatacaacatgtcagatacaaagttcatatgatcttatttaattacgtactggttataggacttatttgattacgtactggttagaaacttagaattaatcttagactaatagatgttgtgaagaaaagcttaaaagtaaatatatttaatgcaagtggttcgttttaataaaatcatatgaattccaaaaacatcaaatataccttcgtctatgatgttggtcatctagttgacactgtcaattaaccataattattatctttatatttaaaaatatgtctactaattcttctacaagaacattcttgagctcaatgagaagactttttgtgacaaaaggaaacgagaaaagagcagagctttgagattttaatttagatccaatttttcttcttccaaatcaaccatggattctgagggagtgttattgcggttgatccacgagcattctatgatcccttgtaatcatctgaggaaaggtgattgttgtggacgctttgaagctataagcgatggctactactgcaaaacatgcgattttttcgtccacaagaaatgtgtcgatgaggcctctgaatctatcgagcatccatctcatcccggtcacactcttcagcttctaagtaaacaaaaatatcgttattgtaatttatgtggaagggacattaaggatctatgctatcattttggtaacttcgacgtggatctatattgtgcaaagtacccaccaccagaggttattgaaagttctgagacaccatgccacaagcgcacccttctcaaggagaagatcgagtttcattgtgatgctaaatgtgaggagattggttatggctttccttacaaatgtcttgaatgtggtttgacctttcatatcgactgtgttttgcatccatccggggtaaaacacctgccagaggtaatccacccgctagacgtaaagaatcactcttgccaccccttgcaccctcttaagcttgttctcacaagtcaactaccagactattctgatgaaaaatgtcgtctttgcacaagaaagattgagggattgttttatcattgttcttcttgcaacttcagcttagatatgcgttgtgttataaatccaccaccacaatttgttatggatttgaaagttcatgatcacgaactcacccttctcccaagactcgactcttttacatgtaatgcttgcgggctgaagggagatcgaagcccttacatatgtgttcaatgtggtttcataatccaccaagactgtctttcccttccacgcctcataaacatcaatcggcatgctcatcgtgtttctcgcacttctgttcttggtgttgtgaactctgtatgtggtgtttgtcaccagaaggtagattggacttggggtgggtattcttgtcagaggtgtcctcaatatgtcgttcattcgaaatgtgctactagaaaggatgtgtggaacgggaaagaactcgaaggagtgcctgaagagatagaagatatagagccatatgtggtaattgatgacaacacaatacaacatttcagccacaaagaacattacctaagattccatgttaatggtcttctctgggaagaaaacaagcgttgcagtgcttgcacccatcccgttcgtctccaatcgttctatgcctgtaaagattgtgatttcattcttcaccaacactgcgctgaatctcctaaaaaagaatggcacgtgctacacaatgaccggcttactttagttacaagcgtggccaacttcttctcgtgtacagcttgtagtagattgtctaatggcttcatgtatcagtgtgattttatgaagttagatgttttgtgcggttcagtctcggagccgtatatccatccaggccatccccatcatcctttatattacatcccacaagtggaagaaaaacaatgcaatggttgcaacaatcgggaggttcgtgtgcttacgtgcatcgaaagtggttgtggatatgtcttatgcttcgattgcgccactttaccacaagtggtaaagcatagagtagacgatcaccctctctcactatgctacggcgaagaggcaagtggcaaatactggtgtgacatttgtgagaaagaaacgtatccaagacatggttttacacgtgtaaagatcaccgagctagtttgcatacaaagtgcgtgctgggagacttagtaggactcatgccaagaagcacaatagagttgtttaga

SEQ ID NO: 15220 - DNA, 829 bp, Arabidopsis thaliana landsberg
ccaatgcacctcgaatctgcttacactcctcttgtttcttatcgcaagcagtgtcttgaaaagcaggagattcgcgatgctccgggcacatccattatggaaaagatcctcagttctcttcctaatgatgcttatgagaccttttatgcaccactcaacaggtatgtcaagcgacttgttgacaatggtattagctcagatgacgctaaactgctgacattggacatcagtgcaattatgctgcctaaggtcaggaaagagaaagcacagagagtggatattgctgagtacatctgcaccatcactccttatcagaccactaagaagcttcctgatccaggtaccttcattcttgattgctctatctcttcaagcaggttcagccgctctttgtgtgatctgggatcaagtatcaacctcatgcctaagtctgttgctgagagattaggcatgactaactacaggccgagtaaaatcactctcctcttcgcggatcatttcaaacgaatccctgaaggaatttttgaggatgttcttgttaaggttggtaactccctaatccctgctaattttgtggtcctggactacgataaggaacccaaggatcctcttattcttggaagagtattcctagctacagctggtgctaggattgctgtgaagaaaggtaggactctctaaaagtttgtgatttggagatgtagtttggcatggatggttaagagttcactaagactatcagtagtattgcctctagtacaaacatacctcctcatactgctcagaatcccaaacagagccacacacaacactcgccaatgagagttgc

SEQ ID NO: 15221 - DNA, 541 bp, Arabidopsis thaliana landsberg
gaaagaaagataagactctgaacttggaagacaaaaactagacataaccttggctagggttcttgacaaacataaggggctgaaactacatagatctacaaggattaaataactcattttgattatgtacaaggcaaaccaaattttgattctgaaagtacaagcagtacattctcttcgaagcagatattctcttcaataaactgaaatttttaacttgttgtggaaacagacttgaagttgtcttcttttgaaacttagatgcaaagtgtaacaagactctaaggaccagagtaaacaaggacaagtgcaaaagagaatctcaaagcacaaattttaacaaaatagataagttggtaaatactctgttgcagctgttttgtgttttgtcattttgttttcttttactactaaacacaaggaaatttgagtagaatgcaatggataccgataactcacagctatagcagaggcggtaagaccagatctttcccgtggatctctacggtcatagtttgtcaaatacaaaaacgtacaacgc

SEQ ID NO: 15222 - DNA, 1229 bp, Arabidopsis thaliana landsberg
tatggcccggctgaaggcttgcggaccaggtggttcgggcgaggggctccgatcctccccactatcgtagcgtcccccatgcctggggtggtagcctcggcgtaccttctcatcgaggcgggctcgatggtcgcgacggtggtgctcgttgccgaggcgatccggggctgcaggcgtcacgtctcgcgtgcacccggtgtggaccgaggcctcccgcataaatcgggaagttgctgcgcgatgctccggggggcacccttgccttcgggaggcagagctcttggcccgtcggaccgcggcatcctccaggagattcttgagttctccctggatacgtcgcccctcggtggtggatggctccggcattgctcggagtagaattgccactgcagccagattctggccgaccccgctggaagccgggggcagccttgccctagcatcgtcagtgatacggcgctggacgtcctgggcctgatgacgcgcttctccggccggagcttggtctgcccattcctgcccgatgttccgccggaattgctcaagtgttcctgctccctcgtcgagcctagcctgcatctcgtggatttgctcgagctgtgcgtcctgacccccgcagggactgggaccatagctagctcccgaaggatgtcaacgcgaggcgtaggtttagggggatcgccgttttccggcataccaagatggttgccttcaccaggaccccctagatcgacgtggaaacattcacgacttgggccgcagtcctcgtcgccgaagctaaggctaccatcggaacaatcggagaggcagtagtcgcatgcggtcatgaagtcccacatggcactggggttaccgagcccagagaaatcccaacaagagtcgagctcatcatcttcctcggaacccgagggcccgtaggtcgagacggcagtcagtcggtcccagggtgaccgcatacgatacccagagggtttggactcgcctctatgagagcatccaccgaagcgaagtcgcttggtgggtcggggctgaatccaaaaggcacgagatgggagtcggtcggtacctcttggtcgacgggtggtgacaaagtcgcgtcaggggcagactgcaccgtcgtctcaggtacgagggtgacgcccagcaagtcctttgcgagcgtgctggcgtcgtccgtttgcttgcagttcgcctgttgcggggagacagcgctcgtctatagtctaaaa

SEQ ID NO: 15223 - DNA, 1888 bp, Arabidopsis thaliana landsberg
  unsure (1)..(1888): unsure at all n locations
gaatatgaatccaaaatacataactaaaacatagagtatgatccaacggattttaacattggttggattaccgtaggatcatcaaatatgattggattgcgagattacattggagtatgatacaataaattaaatacataaatttacaaaatagcttattaaataaaaaaaattatgattatgatttatgatgtaaactagctaactaaattttttacaaatagtttccaacgctgcagagtgtgggtataccgtctcgtattactatcgacccaaacccgtcttaccatctaactccgttcagtgaaattaaacattattttgttatttttgttttaatagtattttaatttaaaagatatataattcaacagatatcgtagagaagaaatctcggaaaaagtatgttttggagtaattagttgatgaaaaaaatctcggattatagaatttctgggagaaatttttagaaccatttgttgaacgcaatataaaatatttaaaattttaaatctgaataattaataccaattagatatcttgagagattttggcagctattgttgaacataatatcttatatttaattatcaataaaaaatatttaatgctagtagtactgtgttgtatgcgtcccttccaacccaagaaacccattcgctaaggaacgtccctcctattttatctcattctttctttatttctgggctttttttcaagggcctcatccctttagagacccataagggacattgttggagttggtcttaggttttaaatgctcatgataattctgctaagatattctagaagatgtcacccatgagaggtcgccgatgtcaacagattgcgttgcagaggagcaaggtttagtcacttcggcatctggggttgtcacccgtgagagatcgccaatgatgaaccatgagtcaagaactgcatagcagctgtccccggttgttcttgttactgtctgcaagttaaatatgaattgcttgttgtagaattgccggggggcgaataaacccaattttcgacggtcaattcgttacattctgaaaaagtttaatacagatgtgttagccatcttcgaaacgcacgctggaggtgatcaagcgggtcgtatttgtagaggattgggttttgaaaattctttccgtgtagatgcagtgggtcaaagcggaggtttgtggctcttgtggaggactggaatcggtgaagtgtcggttgtggactctacggaccagtttattcatgctaaaatagttaatggagaggattgtgtaaacctcattgttgtctatgctgctccaacggctagtagaaggagtgggatgtgggatagattaggcgatgtcattcgtggtgtggatggacctgcggtgataggaggtgactttaacacaattgtgagactagatgaaaggtctggaggtaacgaactttatcaagtgattcagtagcatttggtgaatggattaatgagctctcattgattgatatgggcttcacgggaaataaatttacttggaagcgaggaagagaagagaggttctttgtggcaaagagattggatagggttctttgttgtgctcatgctcgtctgaagtggcaagaagcgagtgtcatgcacctacctttcttggcgtnnnnnnnnnnnnnnnnnnnngtgcagttatctccagcggtaagtagcaatcgtggtacacgaccgttttgatttgaagcagcctggttatctcacccgagatttaaggaattactgcaaacttcttggaacggtgatagctctacaccggaggcacttaacagtccgcagagaacactacaacagtggaacaaagaaattttcggagatattcagaagaaaaaaggaaaactatggggg

SEQ ID NO: 15224 - DNA, 1603 bp, Arabidopsis thaliana landsberg
attttccctcgattgttctggtattgattcggattgagtggattcttggatacagaatgtgatggggcgtggtgtttccgagcttgatctatcaatctttgtggattcgcttttcgaagatgactataatctctttccaaaagtgtttgagaacaaaaaactagttaagctcggattaagttatatttcttggttggatgggagcattttcttaccaatgcttaaaacactccttcttcactcttttacgttatgtgttgataagttttgttttagtgctttgcgcttgaggaattagtcttgtttgctgtgacctggggaggtaagtctaacgatttcctcttaaaacattcgatgtttcggcttcgccgatgtcttttcttcgaatcttcgctagtagctccctacgaacaaggtaggtgtcgaactttactaaattctcctttatttgagatttcttagttcagaagtttcctcttggctatttacgttgttaacttagggattctctcttgcttaccaactcatcttcgcgtcaatttaataatcaaaactttctctaaaaggatttcagagtctaaagagattcgtgttattcatcacaatgagcaacatacaacatatctagagtagatgtacaaccgaaagcgtaaatctagggaaatctatctagttcagaagatctagttacacagaatatatgaatctgttagagtatattcgtagatgattatgccaagaataactgaagataaccgagccaaaacaaacccctaatattctctgtttgtatcgctgatttctcacaagagcttgtcttctttcgtgtagagaagatggatctcttaagaaatataccagacgagcttatttgccatatattgtccttccttacaacaaaggaggctgctttgacatcggttctctttaagaggtggcgcaatctgttagcttttgtcccttacctcgagtttgatgactctgtctttcttcatccagaagagcgtaagcgggaaaaagaaggaattttgcagagcttcatggattttgtggatagagtcttggatttgcagggtgattctctcataaagacgttctccctcaagtgtaaaactggtgttgactcagatcatgtggatcgttggatatgcaatgtgttggctcgtggtgtttccgatcttgatcttttcattgatttttcctatgaggatacccaagaggatgaggatatgctacctcaagagatgttcgtcagtaagacattggtcaagctgaaaataagaaatgatcgttgtgtggattggtggtgtgaaaagggaggcacttccttaccaatgcttaagagtctttatattgactcggacttgattctttggggtaagatgaaaaggtttctttcttctttccctgtgcttgaggaattacgaatggctagtatggagtggaaggaatcacacgaaaccgtgtcaagtgcaagcctcaggaagctaagtatccttggcaccggttgtgaagactatgtgaatccaaagagcatttcttttgatactccaagtcttctttacttaaactactctgatttagttgccgaggagtatccatc

SEQ ID NO: 15225 - DNA, 1589 bp, Arabidopsis thaliana landsberg
tgtgactaaaaacattttatcctcagtatctatgtattgttattattcaaatacaattttgaagcttagttttagatttcaatgcaagtgttagtacatataatcataatgataataggccgtatatttctaattgctttcttaaatgtttttttcaagaaactcatattaagttgtagtgtttttgtttctaaaaaaaacttcaactagttcatttgataaaagtttgttcttacgaaaaacaaatattctacaaaattcggtaaagatttcacaaaaaaatatttcgtgcaacccttcttgaatttaatgaaatctttcctaaattttataaaattcgttctaaatttaagaaaataatttattgaaagattgcacgaaatttaggaaagattctacaaaattcaggaaggatttcatgaaattcatgaaagattacaaatcttatgttattcactcattaattttaaaaattctaatgaaatctactgttattgtattaatgattttaaaaatctatattaaaatctactgttattgaaaacagtttgtggatttaatttagtacccctaaataagtaaaaaagaagatgatatgaaactagaaatcaacttatattgatatcagttaaggaattaaaaaagaaagttgaatactgtatgatttaaaaaagtatatctacttctaatagaaatacagatatcaaatcttagagtcttaagttgatcagatttttagaagataaatataacagtttggaaaatataataaaaataagataagtaaaatttaggtggtaacaaaaacagggaatctcgggatatatattaattaccaaaattaaagatcatatgttaaatacttgccttacaaatttgtctcatatgtataaagaatctacttatttaatagctttaacttatttgttcatcatataagagcttaaatttgttacagtactaaatctagtttaaaccctaactgatgacgagagaaacaaggatgatctccgatctgccagaggatttgatagaagagatactatatagggttccggtagcatctctgagaagcttacgagctacttgcaaacggtggtaccatcaagctttattcaaagatccgagattcatcaaaaaatacaatgataattaaaacagcaagacagtatcatgctctcatgctggttgatcatagagtatgtccaatgagctcctttctctgctagacttgagaaattcatatccatatctaaagatgggcatggcataatatctccccattctaatcaaccagtcgatttatctgaagcctttctctgcgatggcatattgctatgcccttttaagaagaacatgatgattgtggtttggaacccgttttatgggcaaacaagatggatacagctgcaaaataaagccaacatcggagcctttgctctcggatgcgacaagaatcaattgtgtcgtagctacaaatcctcaggtttgtgtgtatacacgaccccccggctcgggaaagaatggccatgtatgagttaaaaaatacttcatggaggaatcttgatgtgctcattcccgatcaggcc

SEQ ID NO: 15226 - DNA, 838 bp, Arabidopsis thaliana landsberg
  unsure (1)..(838): unsure at all n locations
actttcttgtttcgattttcctttttccctttgcttaatcctgtgtcaatgtgtcttctactccattgaaagtgctgtgtagggtttgctttgaaaaagatatcagtttggtactgcttccatgtagacaccgtgttctctgcaggtaaagatacttgatcatgttacacttaaaattttatgcatttgcgctcaattcgtctagaaatactgtacaaagaaactaggaatctatgaggactgaggtcatatcaatatactcattggactcagtgtcatacctgacttaatgtcattgttcacaattttttgtttctgtgccatttttgttgcagaacctgtgcagacaagtgtacaacatgtccaatatgtcgtatagacattgnnnnnnnnnnnnnnnnnnnnnnnntatgactgtgttaactttggcccatgatcaagagtaggatttgtggttgatgctccagacaaacattccagtttaccaaccatactgtttcccaaacttctgatgtttttgctgaatctttttgtttgtctgaatcagcagctagtataaaaaaaagtataggtgtatacgtgtatgtatttttctgtaggaaacctcattcaaactttagctgtaacatacaaagtttgtataatatccatctcttttttgtataaatcacaaactaagttatgctttcatgtccacgacttatattgttatggaaagtgacactgacataaatagagataccaaaaaccatattcatatatacataaattgttaaaagccgactttcgtgaacaaaaaacattacaaagacgacaaacattaactctataaaagccc

SEQ ID NO: 15227 - DNA, 730 bp, Arabidopsis thaliana landsberg
gtaatgccatactgccattcaatgtaaaagacatattgtaaaacattaggcgcaccattcaatgttgctctggcgtctacaatgtatgtatcccacggtctattacatcttcagaaactacaatggtctgcttctcgctgtcggtggtgttatatcatcgtcgctggcactggcaaatactatgactctcatagcgaagattacaaaacaaaatttaagaaaaaatttcaatgttcgagatcaagacgacaatagactcgtattttaggtctcagaagaactgctctgatgaatgataccatttgaaacttgactcgattataaagaatgttgaatgttctgtgtttttgatagatggttttacaacgtatacacaaaggtaaacgtatacaagacttgccgaacaagtataacgtacaacacaatccaatgcagcctactaatgataatccattgatttgactgtttgagagataagagatactgtactgtagttcttttcttaataaggctttcaccaccaaagtaactaaaagttttgatgattttgcaatttcagtatccgacgttttccaagctaaaagatttttctcttttactttcgaaacaattgaaaacaaagctatcagtggttttactttgctttttttccaatgaaattctattccgacttttgactttaagttttttacaaatgtaagaggaaaattaatgtaacgtcaggtcattc

SEQ ID NO: 15228 - DNA, 1536 bp, Arabidopsis thaliana landsberg
taggatctctatcttttgaggaaaggttcatagcggctacacatcttagaaatgcttcatcggttttagatcctctgtctgctcgtcatgtagaaccacgacttggctctgttatggcccatcagcctgttccccgcacatctctgcttcaacatagttactttagacaagacgactacacgaccccacctagagaaagtctgtcaaatttgaatcagccttattatcctacagaagctcggcaactacggttgctcggagacccttctcggtcagattctcctcggtccgaacctccgcggtcatctattcaggatcctcaactcaaatacctcaccattttatctaatattcggaggtacctatggtgaacttttatctttgcccaaatatgtcgatcatagctcactgaagacctgaagttgtagccatcagatgtttaaaatcatagctaaacctgagaactctactaggttcctccactcttcagatgtttacattgttcctatttcctggctttgcagttacttatatgtgaatgtgtaatcatagggcttggtttttttgcaatgacagatatggatctgcatcagatcgcttggcctcagaaaatgaatatcatccggcaacaccatcagagaaggaccagtttgctgtaccttattctgataataaaaattacccttcgactttatctgggagtgagcatccttctgcttctgcagctaatgggagtgtgtatagaagtgagttctataattcagcatcacaaaaggaaggggaagctagtcagcagcatgagatccctgctgggacttaccatcacccagaagcatcaacagtttccaatactacaaagtccatgcaaccagatatgcaggcagttagtgttgctcaatctcataccgagacagctggctatcctacaccggcacatggtgaagcttcacaaccacctgctggagcaattggttacacacaccaacctcaaagtgtagcgggtaattatagcacacattcacagcctgggaatgtggaagaaagtacacaatcatatgctggaacagatagttactcacaacagcaatattatgcagctatggggcctacaactcaactccatgctggtggatatattcaaaaacctcatgaaattgggtactctcagcaacctcatgatgcggcaaccgggtactctcagcaacctcatgatgcagcaaccgggtactctcagcaacctcatgatgcagcaaccgggtactctcagcaacctcatgccgcatcaaccgggtactctcagcaaacctatgctgcagcaaccgggtacactcagcaaccccatgcggcggcagccgggtacactcagcaaccccatgcggcggcaaccgggtattctcagcaaccccatgctgcagctaccgcgcacgctcagcaatcctatgctgcagcgaccgcgcacgctcagcaactccatgctgtagctactgggtatgctctgcaactccatgctgcagctaccgggtacgctcagcaacc

SEQ ID NO: 15229 - DNA, 2353 bp, Arabidopsis thaliana landsberg
gaatgttactgccattaaaagaacaacacaacaagtgtctcgatttttgtaattgtttaagtaagagttattttaacatgaaaacgtagtgtaaagaagaaacgtaaagtaaaggaatgctatggtttttgatgtgcaaagctatcaatctcaaatctcaataatagtaacaataaaagtgggactctgaagttgttgtatcatcaactttccacacggatactgtccagcaaagactcacaagcatcttcaagcaagtccagtacctgtgaaagaaccaagtagacaagtaacagatcaagattcaactttccaagtgagttatgtcctaagaaaacagatctaacaggaaatatggatctttccaagtgcatttcctcttgcaaaattctggaacgggaggccattatgtagtgacaacaatggtatgctaatgccaatactaagcatagctgtaattttataggtagcatctgtgtaaaccaaaaattaatatccacattcagcttcatcaatctctatggtaattaccttctcaaaaccttgagctccaccataatatggatcaggaacaaacttgtcattgtgtttcttgcaataagaacacattagcttaacctgaaaattcaacgaaaatctatcaactaaatagagttccaaagtccagcaaacacacaccaacggtaccttcttatctgcatcgggcgggaaattccctctcgctttccacacattataagccttcaatatatcctctgcaaacatcaaacattctaactcatactcacttcaattctccataactaatcagatctaaccacacgattcctctataaagttgaataaattactatttgatctaccttcgttttgttcatccattgcaagaatgagatcaaattctctgaaatcagatgccttgatcggtctggatagtgatgttatctcaatcccgcgacgtttcgcagcacttctcattcttggatccgccatattccccttttaaaaaaccaacattttcacaaatcagaaacataaattccaaagtctccactgctcctaatttacaaccacattacatccacctaattgttccaatcaagcatcaatcaccataaactagattactgtttttgctcttccctagtaataagagcagtttcacatcaaaattgattcagaaacatcaatttcaaagtctccattgctctgtattctgacaaaattacatccaccaaaaaaccctaataccaaaaccaaacctctctattgttcagcctgcttttaatagggcacttcacaaaacagctaatcaagtatgtaacgttgctcccccaaatagagagagaacgcacgagaagattccggcgagagatccggcgaagagctccggcgaagtgatctcgtttctctttggagaatcccgcattctcttatcttccaatttctttcgtagtgtggtgtgaactcaaagacaagctccgtggaagtcacctcctctacttcaaattcaaatgtgtatatatgctctactaaaagtggatatataatataatcgtttggtgtacactgaactttgagatcattctgttcatccctgatgtcaatgtcaacgctcatccatctcctatcataactcatttcttcattaaccataacaagcatgatacaagccttaaatctcaaggttgtaggaagaggcgactccttcaacttgattttcaaggaatccccagaagtagctcgatgattgaagcaggcaggcacttgtgtcccgggtaacattacacattgacgagttgatgtgtgcatgatgagatctctagcttcttgatttagtttgaagcatttggggaaaatgagattaatccatggattgttaaagcaacaatccagtctctcgagggacttacaattatctgcatatatgtaatcaagggaatctgaaagttgggggagtgataccagattattgcagttgttgagtctaagaacacgtaaacgagacattctcttgacccatggagcaacttcttgtatgtctttgctcaactgcagctccgtgatgatgtcaagagcatgcgggaattcattgaggctttcaaagtatgacatttcatacacaggaggacgagaccacgacgtgatcgacaaaggaacttcttgtattgcagttcctttaagcttgagaacaagaatctttgtggagatctcaggataacgtttcaactgcgagcaatctgtgagatcaagtttatagagagctttcaagttgatgttggttggaagagcctctagctttgagcatcctctcatactcaattcatacaattttcgaaggtttccaatagag

SEQ ID NO: 15230 - DNA, 1082 bp, Arabidopsis thaliana landsberg
taaaactccttttctatggtgcatatcttgttgagcttcgtccattattcttctagcgtagtagatgacgtgaagtttgccattaatattttggcctacgacagccccaactgcataatcggatgcatcacacatgatctcaaatgggtggtcccagttgagtgcttgaacgataggtgtagacaccaatgcttcctttatcaaatggaaagctttaagacaatcttcatcaaagttgaactcagtttccttgcacagcaatctagtgaggggtcgagcaatctttgaaaaatcttttatgaatctccagtaaaaccctgcatgcccaaggaagctcctgatatccctaactgtcttagggggttgcagctgaatcatgacatcacacttagccttatcaacctctattccctcttaggcaattgtgtgccccaaaacttttgccttttctaaccatgaaatgacatttctcccagttcagaaccatgtttgtctcttcacatcttttgagtaccctgcacaagttcaacatatacgaggagaaggaagaggcatacacataaaaatcatccatgaatacctctaccatctcctatatcaaatccgagaaaatggaagtcatacgccactgaaaggtagcaggtgcattaccgagaccgaaaggcatacgcttgtaagcaaaggtcccattaggacaagtaaaagtagtgttttcttggtcatttgggtgaattgagatttgaaaaaatccgctatatccatctaggaagccatagtaaagatagtttgttaatctttctagcatctgaataatgaaaagcaatgggaaatggtccttcttagaggcagcatttaacttcctatagtgaatacacatcctatgtccagttattgtcctagtgggtataagtttatctttagcgtttttaacaacttttatacctccctttttaggaacgcaatgaactagagatacccaagtgttatcagagatagggtagataacccaacatctaataatttaagtatctcttttttcacaaccccttttaagtttgggtttaatctcctttgaagtcaat

SEQ ID NO: 15231 - DNA, 2417 bp, Arabidopsis thaliana landsberg
tcaatgttaccgttatcggtctcctgcacgttgccctattatgtcccattgtcctgcatctggagcaacgttttgatgattttttctggacataaatagcatccacattacctctatatcttattgttatatatatccgttaataacaatgttaccttgaactcttccctagagaatagtcttctcttacgcggcattcccggtggcctacgaacgtaaggtggcgcaagttttccgcctctgacattactgggggaaggagtcagtgtatccatgtcgtggacgggcatgattactcccttgtacaccaatctcagatatgggacggtgtggtggacgcctaccattgtttcgacacagattccttcttttatcactgctgctatggcatgagaacacgaaatcgttaacagctggaattctatgaatgtgcctgtcctttcccaaaggttaaccgcaaacgttgaatcttttctctcttgcacttcataaaatgcatctcctattttaattacgagataccctgccctttttcaaaattttcaatgaccatctcattcaccttaggggcaaaagattcccctcgtgttgtgcagcttttcgcctgagggcaaaccatgtaacaagtgtgattcgcatagtctttaagagagaaattaccggataatcccttgccatggttaagacattgtttagcgactctgctatgttgcttgtcatgaaattatacctatctcccacaaactgcgagcgcgtccaatgctcaaacctaatgtcttcgaggtaattagtacattctgggtgcatagctcttatctcagcaaagatgcgattgaagtcgcttggccagtaagctcgggctgcactggcgaccaaaaagctcaacccttccgacttgaatattgagactatgttcctcttttagatggacaacgcataccgcgcgtgaagacatcggataaacctgtacattagcgacaatgtaccagtgttatgatacatacttactcaaggtaaagtaacatttacgagatagccacgaaattaggggattaactatatatatcgatgtaatagtataattatcggggttcggtatataacttaccttccgtatgcttgcataaatcgatgagtgcctgtctaaaacgaacaccaaatccggatcatctgggatggcgtccgtgagcctctccatgaaccatgtccacgcatcgtcattctcgatgttcactatcccaaaagcaatgggaaagacttggaaattggcatcttgagcgcttgctacaattaagcagtcaccgtatcggtccctcacatgcgttccatcaatcactattacctttctcatataagaatatccttgtacagctgcatctagggcaaaaaacaattacctgaattgctccacacctttcttatctttctccgtatcaagggcaactagagagttagggtttgttttcagaagaagcatgaaataaggctggatcaaagcgtagctgcccatcaccgaatctatcgcattatccatagctatttctcgagcccttcatgccttccagtacgagacatttaggctgaactcatctcggagcatcttcctcaactcgttaggccttggcctcctaccaaccccaaaatactttgttctcatcagtttcccagtcacagctgtagatgcttgtttgtgaaagtctccccttacgtctacactgcaggtgtgatgttaacttgcacattttatcttgaatcgttcactatcctccatttttgttgcgtaaatacgccacgggcatgtatggcttacgcacgcagcgaggagaatgttagggtaagacttcgcgtaaatgaaatgaaactttcgtcgtatcgcatgtattgcaagttttgttgcgcagtcttctttattcttgaacaatctgccaatgaagatattgtttccttcgtagtcggcatcctttagagtgcgatgcaaataatgtgcagtttaccattttgttagataacttattgattacaggtagacatctaaatcgccatatatattagcagctacaagattgataactgtaatgtatccataagtattctataagaacacattaaaattagcggctacactaaaatttagtttgcaaactttgaattaggtcctaacatgttttaccttcttctcccggatcgtcgaaatatgatggggcgtcctcgtcatacaacatggttggtactggtgtttctttcaaatagatatctgccatcctccggctaacctgggtatttaacgtcataacttgttcttgagttgcaatgatttccacccccctttacaatgttgttaaacactactcaatcttggtgtatttattggttccatacagagtggtccgtccggatctgagtagatagtgtgccac

SEQ ID NO: 15232 - DNA, 568 bp, Arabidopsis thaliana landsberg
tcagttcacatcattcatatataccagtgtaatgtttcttgtgtcccgtttaacacgaattcgagattcttccacgggtctcaaaaaagtgtttcccctccaatacaagtcctacatagtttcatgcacagaggacggcgctcgctagagtaatattgtatggcgaatttcattaaggaagcagcttcaccatgtaatgtaacgaaactgttcctgaaatagccgggaataaccgtcactatttaatttctggttctgtgatctttgcaaaccgaattaaaccgggaataaagtattgtgttaaaagctaatttaagtattaaaaaatggaactatgatcaccaattcgagcccagttaaagtggttatctctctatatgtggcttatggaggagattccatcagggttcgagcggcgtattggtacgaatggagaaggaaagttggtttctctccatctacttaattgatccttcgatgtcaatctataaggcaatctaaattacttttttttggcttttacttcgagaaattttccaaagaaataaataatatacatgaatatttt

SEQ ID NO: 15233 - DNA, 2211 bp, Arabidopsis thaliana landsberg
taccagagttcccttccacagtttttcaagcttactattcttcattatgagtttaactagatactccgtcttaaaagtagatggcaaagacttcaatggacaatcatcccattttagaaacctgagtttaaggggcaaataaacgaggccctgaggtagatcaatatttgactgatgaccaaattctagatattggagattacgcatgcctttgaacgattcttcatctattactaataacggccttgtcgaaaataataccgtctctggcaaacgtattccaagaagagtttctgtcccctgaaaaaaaaatccgaagaaaactaatataatcttaacaatcgcaaccctttttatttttctgacacatcaaagctacgttttaattactcatgaggcaacaattgcttaagtttatcaatccccaaattacgattatattaatataaagtcatgcattcaaacggagctgcgaaaaacttacagttttctcggtcaatacttcttgaatatcctcaaaattcgtcagaaattgacgttttccaggatttctcggtcaatactttgcacgatcaatttctctacccaatttctctagcaaattgtgcatctctatatatccatccggtgtaatacgtatgagggacttctcagccaacatggtaagcccaacatcatcttcaagtagttctttgacgtaactgactttaaaaccattgaaaaaacatgcaatgcacttaaataactctctattttttttatttaacctatcgtagcagactcttagtgtttcctcaattttatcatctgagtcatttcgaagcctaggcatcatcttcacccactcatctttgtcccttccttttagagatgaacccaagacactgagacccaaaggaagactaccgacaagctcggcaacttcaaatgctagtgccttaaaatcatcaggtggagagtctttcccaaaagcatattgggatatcatctgaagaccaagatcttgagatggcagcttcacctcatatacaaggtcaatctcatgagccttgagaagttgcctatcttgagtgatcacaattattctgcttccagatccaaaccattcagcttttcccaccaaggtcttaagaaactctagattatccacatcatcaagaagaataagaactttcttgtgcttcaacctttgctccaccacaccaaaatgatctatctttatgtccttttgacctaagatttccgagagaagttctttttcccaactcaacttcatgccagagacgtcactaccgctggtgcttttataagttacgaaagcgcgatggtggaactgtctagagagttgactgaaaagagctcttccgatggtactcttaccaatccctgactgtccccaaatcccgaccattattctagcatcctcggattccaagcacagtattgattttattgcctctatatgatcttcaattccgactaagtcaccaaaaccctttggcagaggaaaaagtttattcgaaacatcattagctatctttacaaccatggctgcttcactaggcctaataacaatagtcaaaattgtgtcaataaagaggcacccctaaaagcacaatcgaagattcgaagtcaacgcaaaaaaaaaaaaaaaatacaggtttgaaataattataaacactcatagaaatagtggaatcaaaaaaacatacccgttccgaagatcctccccggctaaatttgatatatctgtgagagctttaacccatctttgtttctgatcctctggtttgtcctcgcatgtctttttaaagacatcgccaaattcaccgatctgttttctaacttccgaagtatcaactccgtagaaaaccggaatcaccatttgatccaagtctttgtccttgtgacacttgtggatctccaccaattcattcaagcaccacgtggaagaagcatagttctcagagaagataactattgagatcctcgcttctctaatggccgatataagctcatcggcgattatgcagcttctcacgatgccgtgatccatgaaagtattgattgatctgcggtcgagcgcctcgattagatggctgaggaacgttttgcgaacatctaccccactgaagcttgggaaaacgtcgtatctcccgctactaggagaagaagaagaagaagccatgggagacgattgagagaactcag

SEQ ID NO: 15234 - DNA, 1922 bp, Arabidopsis thaliana landsberg
  unsure (1)..(1922): unsure at all n locations
ttggaataacaatgtagttcaacaattttgcatcggctttcacttttcagcaaaatatataatttgtaacgggacgggtgaaagaggtccactttctaagatatatgagattttgacagcatacaatttacgtttctattaaagaatctgtctctttttattttagttgttatacatacccgtaattaaaatgcaaatataagtatagaataatctgaatttttgacacaataataaaaagtaaaacttttacataacattgggttaacataactgggccagtatttctaacataactgggcctgcagtctatttacaaagaaggttacatgaaggccccataagccgacgactatgaattaggtagggtttctgttctttgacaaaacattttagggtttttgtgcttataaataagggatgcaaccaagaagaagatgaatattacgtggcggtaaagaaatgggtcgtgtgattagggcacagcgtaaaggtgcggctggttccgttttcaagtcccacacccaccaccgcaagggtccagctaagttccggagcctcgattacggagagcgaaacggttacctcaaaggattggtgaccgaaatcatccacgacccaggccgtggtgctcctctcgctcgtgtcgcgttccgtcatcctttccgctacatgaagcagaaggaactgttcgtagccgccgaaggtatgtacaccggacaatacctctactgtggtaagaaggctaatcttatggtcggtaacgttcttccccttggatcaatccctgagggagctgttatctgtaacgttgagctccatgtcggtgaccgtggtgctctcgctagggcttctggtgattacgccatcgtaattgctcacaatcctgaaagcaacaccactaggtaatttcgggaaaccaattattagtatataattatatcttcatgttgcgtgctgttgttatcttatgcgtaaacctaagtatattactggaacatcattgtcttacttgacttgaatagcaatttacaagattgatctgtttgttgtaccataaaaagggttaagcttccttctggatcgaagaagattttgccaagtgcgtgcagagccatgattgggcaagttgcaggtggaggaagaacagagaagccacttctcaaggctggaaatgcataccacaagtacaaagcgaagaggaactgttggcctgttgtacgtggtgttgcgatgaacccagtggaacatccccacggaggaggnnnnnnnnnnnnnnnnnnnnnnnnnnnnnnnnnnnngcgtgataaatctgctggtgctaaggttggtcaaattgctgcaaggagaactggtcgtcgtagaggtgcagctgccacattagcagccaaggcagactactagacttgagacacactcttctctgctttcttgattttaatttcttatttctgttatacaccccattgtagccttttactttagttataacctctttttgtgttgaaagctaatgagcttcgttttgaatctgccctttaaaggtagaattttgaattctttaatttatgagatcttttggggtcatcttgatggtatttttttactacatattacctatactttgcagtacatctccagactctagctatatattacaacagtttttttaagcgattacaaaactcaactccgttaatcaatcgtttgttttaaaagaccggacatagtttactacaaattaattacgcagattagttttgaaatcatgatttaaattaatattgttcggctttctcgacctcttaaactggtgtcattaaactggtgctctaaacaaataactttgttaaatgaattaaaattggtgcgcacaaattgatcaaaattgaaagttgtatcacctcangttttgttcctta

SEQ ID NO: 15235 - DNA, 1677 bp, Arabidopsis thaliana landsberg
ttgctttgattgcaaactcaatttggacattggttgcatagctgatcacagatctgccccattccatctgaatatgtcgtggcatcaccatcctctagtgcttggtctttcatattttgataggtgcagcttttgtcacaagattggcaacgaagacagcaagggctatcgctgccttcgttgcgggttggtgattcatacaagatgtaccttcatatttgactcaccagagatcactcaccctgcacatgttagacaccctcttaagcgtctcaccgatggagctccaaattacacagaccatagatgtcatatatgtggagaaaacactgggaacttactttatcattgtgatatttgtaagttcaacatggatttggaatgcgcagtaaaaaatactccaccagttgctctttcaaatattaaggttcatgagcatacactcacactcatgccaagattgatctccttcatatgtgatgcttgtgggacaaaaggtgaccgggctccttatgtgtgtcatcaatgtgatttcatgattcaccaaaaatgcgctcatttaccacgtgttattcacgtcaatcgccatgaccaccgtgtttcgttcaagtatcctcttggtctcggagaatggcgatgtggagtttgttttgaagagattgattggtcatgtggtgcttattcttgttctctttgtccccaatatgctattcattcactatgtgcaacaaggaaagacgtatgggatgggaaagagctcgatggagtacctgaagaagttgaagatattgagccattcaagaggaatgataacaacacaatcactcatttcgctcataagcataacctcatgagcctcagaaaagacggtgaagaaagcagtatttgtggagcatgtgtttgtcccatcagttcttacacattctacaagtgttcaagatcagattgcagtttcattctccatgaaacgtgtgctaatttacgcatgaagaaacgacattttctgagcccagaacagctagttctatcccaatggaaaaacaatgataactttcctagatggtgtgacgcttgtcttctagtttgctctgaaggattcgtgtatggtgcgataattgatataagtatgcagttccattgatgtaccttttttccatggaagtcatgatcatcatttactcttccttaaacttggacgcggtaatgtgaagacttgcgagtgttgcggcatcgtccaaaaagaatatgctataggttgtaccaaatgcaattactttttggattttcgttgtgccactctacaattaacggtaaggcttccaaggtatgatgatcatccactcactctttgttatggtgatgaagaagcaagcggaaaatattggtgtgatatttgcgaaagagaaacaaatccaaagagttggttctacacttgtaaagattgcggggttagtttccatatattttgtgtagtttgggatatcagattcgccaaacaaggagaaacaatcagagacggtgttgaattgctgccaaacaatacatcttcacggccactttgcaaaaattgtcaatgccgttgcctaggtcccttctctgttaaggattatgacaacatatactattgatcttactactgttatgcacggattcattctatgtcggacattgggagtt

SEQ ID NO: 15236 - DNA, 770 bp, Arabidopsis thaliana landsberg
agagatcttcccatgaggcatactaaaaaataaatgcaccaagcaaggcatcaaaagtatatgcacatatataataaatacacccgcatatgtgtatgtatgcgcatatagatggaaatagagagaaaggaaacaaaataaagcatatacaaaagcttttgaaaacgctattttatcagcgcttgttactcttcttagcttccaatgtagtcccatccttaagagcttgctgagcatcggcttccatacccagcttgaacaagcaagccgcttgcagatacaaggcggttggccaatccggagacacaacctgtgcctgcaatgcatctgtcagagcctcttgtgcgttgtcgttcatcagatatgacaagcaccgccgtgcgtgtactgttggtgacaccattgttcccccatctatgaactatacaacataacaagccagccatttcagtttaatgactgaatgtctagccccatgatggctcttggcatcaaaattcgaggtatttgattcaaatgctaaagaggtatgttgcatttagagatattacctgagtgtagcaatcgaccgcggttgtaaaatctttggaacggaaagctaagtcgccttgcttcttcgaattgagagattcctgcatctgattggtccacatttgaaacgagagctgcaggagaaggtaaataaaaccatatttataacaagtccttaatgcaaaagactaagccgtgagcgaaaggaaagaataaattaacacctcattgcaattcct

SEQ ID NO: 15237 - DNA, 2376 bp, Arabidopsis thaliana landsberg
  unsure (1)..(2376): unsure at all n locations
tttgggtactttgacggttttcttagtggtaaaatgtaagaatctggagttggatcatctaatcgtagttggatccaagtgaaaaacgaggagacatgattcaactgatttgtttttgtttgtttgtttgtttgccacacagatttgtatatcaaattattagaagtgaaacaagagacaagactcattcatcagaagttacattcaccaaaagaacacacaagtattccaaaagaaaacacattcaagtttcatcaaagagtaacatcaagaaccttctccaaaacaacatatcctacaggttcggtaagcacatcaccaaaccactcaacaatcccccaaatttcacaacttttgcgcctttcaagcgcaatctctgcacaccgaatcatcttcttatagccgctatcaggtccacgagaaggcaactcctcctcccacaaaaccgttaattttcctccataatcagccaacttaacattggcaccagaaccgaacataggtagtcctaccaaacccttcaaatctctccacatcattgcgttagtgtcataccatctgaacactccatgagtacaagagtacaaaacattctgtatctcgcaagaagctgaaaacttataatgatccatttgttggccaaccatgtcccatctaccttccttggaattgtaagcaaccgcctctcttttttgacctacaggcaccacatggaactctccgtcaatgcatgcggttccgcatccgtaaaaatcgccttccgtcttgctgcaagtaatggtatcaggatcccaaaattgtgtttcagtgtcaaacacctcgaacgaattcttataggtgtaagaatcaccatccaagcaacttcctgctacgtatatctttcgatcaaggacactagaagaaacagaacatagcccctcacgcaagcttggagcctcgcgccacgtgtgagaccgacaatcaagaatggagacgcttgaagaggactctaggtagctggatcctgcaatgttatagatattagaaccaacagctaccagactagaagagtgcaaaggaggagaatgtaaatttgagactctagccaaaacatacccgcttgacttcttgatggtgtcattggttagggttccgtcaggtttccgacagagagtgaaccaatgtgtgttagggccagaatcaaaatgaaagcacacgtagagacaactctcagtgtggcctaagagtgatcgggctttgtaaaggtccggtgaagctagtagagatcggaagctcttggagacaagagagagagtcggatagtacaatcttgagatgcgtgcgaagatgctcaatagcaaatcatcgggaagtgacgacatgactctactgtttaagttcaatatgacacatataagtttttcctctttttgttttcaatactttagaaacagataagaaaataaaaaattgagaaaagagcatgtataattacttgagcagcaatctagggtttttgcctcggatcggatcgaagcaaaggtagattatttgttgatctcaaagcggatgctacaggaagagcgatttgatccttcgcttcctagggatgatagatcaagagcgcattgagtaaagcatttcagttcatgtggnnnnnnnnnnnnnnnnnnnnnnnnnnnnnnnnnnnnnnnnnnnnnnnnnnnnnnnnnnntgacttcttcacaggcctcggcccacatggcttaaagattttctaaatatattctaaatattggtgattgacagaacaatgatgagactgagattgatatccctgaagatttgctgataattgagcacgaacatctagagaagaaatagtaaaggaagattatggagactcatttgcaaaagagagtgatcataatttctttgaagagagagatcgagctattctaaatccaacaaaccaagatgttaatatgattaacgagtaattaatatgctatatcacattatatcagataacaacgtttttttcttctaatacccacattagtttatgaattttataggaattgattagctatatattgccatgtgtagaattgagacgtcggttacaaacacaactgatattatggtttactctcaagagtttctgaatagcatcaaattgtttagattgactaacaacagtttgcgactgaagattggtggccctctcatgttacttggaaatattgatcataaaattgatctatgcaatggcactaggttatatatcattcagttggctaatcatgttgttaagactagatttataatatataatagtgttagtgctaaagtactcttgatccatacgatgcttgtctctcaacataagcaaggttccctttttgagaaagtttt

SEQ ID NO: 15238 - DNA, 910 bp, Arabidopsis thaliana landsberg
  unsure (1)..(910): unsure at all n locations
agctttgtcataataaccacatttattaattcaatatcactcacgagcagccgcaacaagttgtttcccgacgttcttaccgtggaagagtccaatcaaagcagaaggtccattctcaagtccttaagctatatcctcgacatatgttatctttccttctcttacatatggaagtatgaagtccaaaaacttggagtatttatcaaagaattccacagctgcaaaaccttgaacccgaatccgtttgtaaacaatgctggctaagttatgtacaccttctggctcctttagattgtattgtgagatcattccacacgcagcgattcggccatgtgttctcatgttttcgagcactgcgtctaacattttacctcccacattctcaaagtatatgtctattccttctgggaaacacctgatagatccaaaaacaccaaaatgatcaaacaaaaattttcttacaaaagcaagccaaactaaacccaatccaaaagttgaaatgaaccgagccaaacaaacttttggtttctacttttggtatacatttctcataaccgagcaaaatcgaaccaaacggaacaactgatacacgtccctagaatttactgacctctttagggcagcactaagatcatgctcttcnnnnnnnnnnnnnnnnnnnnnnnnnnnnnnnnnnnnnnnnnnnnnnnnnnnntataaagaggggatgacatatcacactctctggataaaaaaacaaattcaaaatgtgaattgcattactctttaataattgatataaaccttctctttactactggcacttccaacgacatagcatcccgccatcttcgcaaactgtcctacaagttgacctactgcaccagaagcagctgatacaaatacagtctctccttttttngagaacata

SEQ ID NO: 15239 - DNA, 1850 bp, Arabidopsis thaliana landsberg
  unsure (1)..(1850): unsure at all n locations
tttcaattccttgaatgatcaagccaggttcccatgacgctgcttagcctctaagcaaccatctcaatttcatcatcgttcaataatcctccttcattgaagaatttccccaatctttatctccatccacccatcttttctcctctctggttttactaggttctttcccctatctctccttcgaaactgctcatccatagtctcatcaaagcatatatatcttcgacaagattcttctaaatcctgccccaccactccaactacaacttctacggctacattctcaaagccataacatatattcaatttcttgtacacaatgtaagccgagtaacgagtttttggagatatcacacgactatttattctgccatgaatctcaaacaaacatacttcaagtagctccgctactgtttcaaacctgtataaggcatggtaacatttttcagcaagaaaatcatctaaacgagtcattaaaaccaaattaattacgtaaagacgatgaaaaaagatacctagcttgaggatctggaatccatcgccaactctgaggagaattcccccacgcgattgcaaggttcatcgctgatatcatgatacatctcttcgcgttcgctttttctatccataagctcttcgattttcacctggactgaaataagccaaatgatcataaaattcaccaaattgctaaaaactatacgcacaaaatttcttatttaaacttaaatcacatcattattgtcaaagttctctaactaaatttgatgattcaaaaaaaaaaaaatcccatattaaagatagatatacctttttgccatcgtcaattagaacagatttgtcgcaaagagcgaaatagagctccttcttcgataagaatttgaaagctcgggattgagaaatcaaagactcatactctggcggaataaacttctcccatacaatatctgacttgaccgccgatgcaaaggttttcgaaaccgaagcaaggacgcacgcatcttgagggcttgtgaaagagactatgattgagacacattcttccggtaagtcatccaactcagcaacgccgtgacttttgtcggaagctgagagtttaagagtcttcttaactcgttgtacaattttacgaaaatgctcatgcatgcaccttgttttggtcattatagtctctctcaggagtcgttggtttcggacttttttggtttggaaaaattctaacgaacaaacccaaattataaagagtcaagtaaggtcgactttgtggaattaaaccgtgttagagcggaataatatgtcattcccgtcattcttattataatatagtcttgactcgttacgctaacaattactagaaaaataagacttaaaaaggatatcatcacataaacaatttagaatgatacatccattcacctatcttacctttcttcgggtttcctccttagaaactactcatcggaagccggatcaaagcatacggcggccctggctaagaccatacggatccaccactctaccttcagcttataaggggacatcccaaatccaaaaatataatccaatttcctaagcactaagtaagtttgagtgacgatttttggggacagaagacgaggattcaacttgtcgtgaatctgaagccaatttgtacatcaacctctcctactctttcgaatctacgaaaaacatgggcaacatttttcggtgttgatcatcaaatgattacaaaatagatttggacaccaactttttcccgcttgctttgtctaccagaagctcttacactttcaaaaatagaaagagctaanagactatcagagtatttcaatctctagaactaaacgctt

SEQ ID NO: 15240 - DNA, 590 bp, Arabidopsis thaliana landsberg
cggcacttgtttaacgtcgttggctctacgtttgggaagcaattaggttcaatgaggaggagcttcagggatcgcttctcctttgggcatcgttgatatattgatatgctgccccagcttctacggtaagtgataactgtgcattttacatgttttgagcatccatttgtcacgaaattagcatcatatcaccactgttttataccatttcacatcatttgtcatcactttgcatgcatattgcatatttgtgttgttttcaggtgatctggagatgtaactaagctaattggaagaagtgaacctgatcaaatcaacatactcgaccaatactactcgagttacgtcatcctggacttcaagaaatacttggccacaacctcttcaacataccactcgacccccttgtcgagtagacgactccaccacttcacaagaccactcgaccccctggtcgagtagttgccttcaccattcctcatcactactcgaccaagtgatcgagtatcaccacatccaattctcgccgtccactcgatcactcccactcgaccacgaggtcgagtactaccacaaccacctacttgacc

SEQ ID NO: 15241 - DNA, 667 bp, Arabidopsis thaliana landsberg
agtggagaatcctctatggaccctgattacaacgtggatgaagctgagtcctggtccgctaaaccgagagagcaacatgtttaccagagcttcagggatgaattcgaacgctctacagcccgacgtaatcagagaagagctgaaatcgccaaaagaaagagggcgatgtcaagtagatatgagctgattgatgaggatatcgaaactgagtatgagccagagtcatggcgcaaggagacgaagctactgaacaaacccgacgaggttacagtggaggagtatatcagattctttgagatgaatgacttctggggaacgcggtatccgtgttatgagactttagcccagctggggttactggaggacgtgcaacatctgttcgagaagtgtcacctggagacactcatgtcttacccttaccctgcctataaggaggagacaatcgagtttctttccacgctgcaagtggagatgtatgcggcactcacagactttgagctggataccatggggttaggcttcttgacgttctcagtgaatgaacagtggtatcagctttcgatcaagaagttagaagaactgtttggtttccctagtggaaagggaactaaacccagatttgacagagaggagcttaaagatttgtgggccactatagggaacaatc

SEQ ID NO: 15242 - DNA, 1276 bp, Arabidopsis thaliana landsberg
aataatatagtaagattaaaaaaattggattgtaagtttaaaagtaaaactacaacacaattagtaagtaatcaaggctttaagaaaaattaagacggtaagtcagacttacagcccaatcaatcatacactaaagttacacaatatacataatgtaatataaattcccttaattaggtttcttctttttgaccttacgctcaagtttgtgggctaatcaccctacacaaatctattaattccgtaattacagatttgaccgttcccccatataacactatcggtatgtacattcatattgcatttaattatacatttatgttcttcagaaatggtaattttgtgatacctaactttagacccacatgtcatttttgtcattagtaaagtaagtatattggtttttgccgtaactgtcccaaaacctctaatgataacaaatactattccaaatgtcaaataccaaaatatctcaatacctggctacctgctgacaaaagaaagaaaaagaacgcagccattctgtgatgttgtcaagatcggtttagatttccggttatcaaaacaaacattggtgccggtttagttaaaacacccgacttttcttcgcgattgcaaatgatctcgttggtcaatgtcattttcttatccatgctatcgccaaatcgccaaattatattggataaagtcacaatcgaatgattcgcccaaacgctaccgaaaccatcgaacaagtcttttattggttaatttttctttaacaaaacctttggtaagtcatttacttgcaacttataggttattaactcatttggatttgacgcgttcaaacatttaacacagtcaaactcctaacaagagatttcgacgttaaacagatcatcaaaacttcaattataacaaaacttcacaacaaagatatttatattggatcaagaaaaactagggaaacacaacaaagtattagataataatttgcattcattcatagattagtaccaagtggttacaatctaacattatagtcttataaaacacgattatattaatactatttcataattaaaaccctaaggcacatctatacaacgatcatcttagaaaaatcaggccccaaaatccataattaattcttattagcagataaaatacgagattagtaaataaaataatatgaacacactaagatcccttcctctttttcttggaagatatccaaaaaagccaatgagacttcgaaatacggtcagatttttttctttacatgagcaggtca

SEQ ID NO: 15243 - DNA, 926 bp, Arabidopsis thaliana landsberg
cattgaggaacttggcaacagctcaaacagtcttgtctagttaaatcaggagtgcattaaagcagcccatacaaagtctggactgaagtcaattcggtctttaacgtataaaatattctgaaactgttgactgttacgatggcagcttggttcatcgtggacgacacgtaagcaacgaacgaagtctctttgattagaacaaatattgttgggatttttcatgagtaatgctccgtcgtatgtaactgtcgatagtaaattcttgtcagagtatctcagtatgcactcctagtaatagaacacggcttctctcttatcagaacaccgattaaatgtgtcgttgacggcaaaagtaacacagctacggcaaacttctggcgagaagaaaaccccgacaaaggaaaagtccggtgacccggtcgggggcttttcctgacgtggcgttttggaatccggtggagtaagaggcgttacgtgaagagagagaagacagaagtgttctgagattggtgaagtaagtgctgttacctgagtaatatgtcgtagttagacatcccccacttaggtaataaggtctttgagcagcagcactgacgctagtgaggaatgagataacgatcaggaacatgagcgagatcagagaagacatggttcgagttcctcgatttgagtttcacatcatagagctcccatttgcacactgataaggtttcttctctctctctctctctgattagtactgctgaataacgtgaagtagaagatcgttcgtgacaacgatacctcaatcaaagtcaataagtcacagtaaacgattctaactgattctcgcagaaaaatttggttccatagttaacattagaaagtagactaaacgatagctctcggatatcatctagctactatgtatatggtttaagatagca

SEQ ID NO: 15244 - DNA, 1845 bp, Arabidopsis thaliana landsberg
  unsure (1)..(1845): unsure at all n locations
aaagtaaagaagcacacaaagaaactcaatctacataacttaaaaatctttcttccaacgttttgtccgtagaaggatcaaacataacaaacaatacctttataagatgctcttattagtattaagtatatatatactaggccaaaaaatactacacatggattcttttctcttctccatgattcattagaaagaagaggagaaaaagagagtaaaactttaccacaagacatagcagaacttaaaatgtagacaaaacctggaaaagattgaggaaactctcatctggtaaacaaatatgatgtctgtgccaagccggcttctctggagttactttcctgaaaaagttcaatctttgcagtatctcgcgtttcaccagaagttaatgagtcattcacaggttctgcatatgaacctcttttaccggatttgaagcaggaaactaaccaaagtgttgacttattgtcggtaatcaagaagaagagattcccatcatcatcctctcttgtcatacttgtttgcaaactccttgagtaacagcctctggcgaaaggcgagatacgtatctacactggttccagcccattgctgacaaaagctttcatcatttggaactaatgaactaagagggaatggccctttccgcactttctttaactcaaccaagaagcggtggcgcggacgtatcctttgatccaaggacaagctcaagtacattgggtatttggtcagaatgtgaacttcattattgagctcattgaccaaatacatgtacttaggttttagattatcttctagtgaaagagacaaaacctattcagaccaatttgacaagtgtttatgagaacaaacattctagttttgatttaagtatgaaaaagaatcaagcaatctactaacctgtgtaaggctagtcaagactttcagtatatcagaattgcacatcccaatgctcctaaggaaattgattcgaggcaagaacccgtcatcgatactgtagtgaagaagctgcggatgcttctttaccatcttcactacgctgtctctaggtgctcctaactccttggagaggaacatgtagcgagtgttccatgttatgtcgagccgctgaaccagaatctgagggctaagttgcacaacctttccaacatcggtttcctttatcccaacctcttcgatcagataccttatcgtaggtctcaatgaattctctacactgtaagagaagagagaaggggtagcagcaacaatctgtcctattttggaattaggaatgccaagacccattagaaaggaaatgtgagctttgagattgttctcaacagtgtattgaagtatctgtggttgtctcaagagcattctcttgatatctctgtgtttaacaccgacactcaacaagtaatcgagtctctcttgagctgagaacacattaatctgaagggatggcatgtgtctctcgtacatttgaacaaagtgtgactcttttaaaccaaatgtgccttaggtatcccagagtggtacnnnnnnnnnnnnnnnnnnnnnnnnnnnnnnnnnccgagggtatagtttctccacatacttcctcgaactcatctaacgaaacacacaagaaaaagagtaactttctcaactcaacgacaaagaagaggtatttaagcaaaactctttttacctttcctcgaccatctaaacgccaagactccttcttcttctcagaagtggcattaggactaatgcctaaatcaagatcatcttcatcagtctcactttcttcaggcttgacaatccctttcttcacaccttcacaaacaaagccacatcttagcaaaatcatttcattgcaga

SEQ ID NO: 15245 - DNA, 1335 bp, Arabidopsis thaliana landsberg
gacatttactaatggagcagctactgatacctacatttgcaaaagctagaaatcttccttcagctataaccaaataccccaccgggttattggttttgaaactctagcatcaacatgaaggattagagctaatattttggtgtattttactccagaagttccccatttacctctttaattattagtgctgaggaacatagttcatcatgcagatcatacctttgctccacgtcgatttcattttcaggctggacacgaacacttggatcagctttgagatcctcttcatcggtcttgaaagttattccaccagcattgtcgctaccagaggagtagctctttttttgttcatcatcagtttcatcatcttctctcgcccatctggaagttggtagaatgaggtcaattttctccttctttacaaaggcttttagctccggctgtgggattggtattgtcgaggccagatccacaggctcttcagtttccactttatcatagctggttttcatccgcttaggctcaatgttaacttcttcccaagttgaatgtccctgtcgatactttgcattttcatctactacttcatagccacgttgtttctctgcatctttcagacataccagccgagcaaccatcatctctctaccccctaaaagtgatagaccgttgtgtctgcagcgcctttcaagctctgaaattggtcgattcattagctcttgccttgcagctccttcacccattgccagtgcagcgtcttgattgatcttatcagcatcgttcatattgcctatcagacctttcttctctatatcaggcgcatcaccacagatagaatgaaacgaggtaacaccaaagtttcttgaccggagaaatgtggcccgtagcccatttatatatgcatctgagaagagaaaccagtctgcccatacctgcagtacttttagtactcgttcctgcacaaagtaagaatgagaacagaacttgagagggtaaagaacaacataagaagaatatttgctttctgggattactctaagagcctccgcggtaatccttccatgtacgctgtggtatagatcgttgaagctttccattatatcaggtaatgttgcttcgaattttgtccggtatgcagaggcatttttaacccgagcgctgctattatgaataatgtcagacacaagcatgagtcttgcaactttagtgggaattgatgtctctttcagggtcaacgactcagtcagaacttcaacaacctgtgaaacaaccaaatctttagtaaaaaaaaaacaaattggagattttggtccagtgacatgtagtctgaaaaca

SEQ ID NO: 15246 - DNA, 1499 bp, Arabidopsis thaliana landsberg
caaattattaatattatataaacaccaataaaacacaaacacacaaaaacaactcgattcataaaaaagattgtagctatataaaaaatcataatatcaaaactatctaattagaaaaaagaaactggatgattattgtgtggtcgagactcggtatttatagcttaggaattagggcaaaacccagtattatccaattttttcctgtttgtaacatagatgtttttagggttttacatatgacgctgtatttttttgggctaattttttttaataatttcaacaataagcccattaaatataattctgtatttatgtatatatatttttaaatttttggaattactttataaaaaaaatgaaaagtaaaaaatttaaaagaattaaattaggtaatttcattaaagggggtaaaaacgtccgctcatattctgagagcgaacgtgagcactttaaacatctgctttaatatataagaaagaatcgctaatgggcatgtttagacctgctatggaaaattgaaaacttcccaagagaaaccttctacttttttagttttatgaaaacgccctcatttatttagtatgacagttttgcgaattacttttgcctattttgacaatttaatcctaattttagtaagtcgtaaacaaaaaagtgttgatgtttttctaaaccgaaaataattccaattttgttgttagacttcgtaacaaaatatattcacgttggatctatgccaactaaattttatttcgtgttggtaatcttcagggccgacccaaacactaatcatgccttaagtccaacaaaattttgatgcccatttagtacatataaaaatagaaaaattgttaatattttcagttgccaaggttcaaaccaacaaccatatatagccctgggagttcggcataaaccgagtaacccgaaaccgaacgacaaaattaattttggcaatcggatgttggtttgggtcagttcggtaatcgaaccgatcgggttaattcggtttagcagcctattaagctgccctatataagtctaaccaaccctaatttcatttctctttctcttagcctccgcctcatgcaatttatagagaataatctttcatctcatctctgatctagtcatctagacatcatctcatctcttctccttcatcatttcatcgtgatcaacacttctacatcttcttaccctcgtcatttaagaaattcaagctgcaaccaaggaaatcaaagaggtcacttctttgttcttcttcgactttgtatctaatttaataagatcttcttacccaaacatctcttctcttctcttctacttcatcacttcatctccgtacgctcctcattttcaaccccttttctttttcacagaagttcaaccgaagaaatcgtaaaggtaagctctttcgatcttaatcgataatactgcttctaattcttcttccgaatcgctaatatctagatgataaattggatacaaaacat

SEQ ID NO: 15247 - DNA, 1851 bp, Arabidopsis thaliana landsberg
gactgaatgattttgttttgtttgattcagatggttttccattacctctggagatgttggagattcatgacatattcgtttcaggtgctatcttaccttcagatgtgtgtactgataaggagaaagagaagggtgtgaggtgtacatcgtttggacgggttgagcattggagtatctctggttatgaagatggttcccctgttatttggatctcaacggaattggcggattatgattgtcgtaaacctgctgctagctacaggaaggtttatgattacttctatgagaaagctcgtgcttcagtggctgtgtataagaaattgtccaagtcatctggtggggatcctgatataggtcttgaggagttacttgcggcggttgtcagatcaatgagcagtggaagcaagtacttttctagtggtgcggcaatcatcgattttgttatatcccagggagattttatatataaccaactcgctggtttggatgagtcagccaagaaacatgaatcaagctatgttgagattcctgttcttgtagctctcagagagaagagtagtaagattgacaagcctctgcagagggaaagaaacccatctaatggtgtgaggattaaagaagtttctcaagttgcggagagcgaggccttgacatctgatcaactggttgatggtactgatgatgacagaagatatgctatactcttacaagacgaagagaataggaaatctatgcaacagcccataaaaaacagcagctcaggttctgcttcaaatatgttctacattaagataaatgaagatgagattgccaatgattatcctctcccatcgtactataagacctccgaagaagaaacagatgaacttatactttatgatgcttcctatgaggttcaatctgaacacctgcctcacaggatgcttcacaactgggctctttataactctgatttacggttcatatcactggaacttctaccgatgaaacaatgtgatgatattgatgtcaacatttttgggtcaggtgtggtgactgatgataatggaagttggatttctttaaacgatcctgacagcggttctcagtcacacgatcctgatgggatgtgcatattcctcagtcaaattaaagaatggatgattgagtttgggagcgatgatattatctccatttctatacgaacagatgtggcctggtaagcttactatcctagtattttgtactcgcatgtttctacgtctgttttttcttctgttgctgatgtataaggtatatacaggtaccgtcttgggaaaccatcaaaactttatgccccttggtggaaacctgttctgaaaacagcaagggttgggataagcattcttacttttcttagggtggaaagtagggttgctaggctttcatttgcagatgtcacaaaaagactgtctgggttacaggcgaatgataaagcttacatttcttctgaccccttggctgttgagagatatttggtcgtccatgggcaaattattttacagctttttgcagtttatccggacgacaatgtcaaaaggtgtccatttgttgttggtcttgcaagcaaattggaggataggcaccacacaaaatggatcatcaagaagaagaaaatttcgctgaaggaactgaatctgaatccaagggcaggcatggcaccagtagcatcgaagaggaaagctatgcaagcaacaacaactcgcctggtcaacagaatttggggagagttttactccaattactctccagaggatccattgcaggcgactgctgcagaaaatggggaggatgaggtggaagaggaaggcggaaatggggaggaaagaggtt

SEQ ID NO: 15248 - DNA, 595 bp, Arabidopsis thaliana landsberg
tgaagatgaagatgctgctttgcttctgttggtacctttaccactatcatatgagaactttgttgaatcatttatagtgaataaagttacagttactttggaagaagtcagatctacgcttcacaggatctactgctatagcagaaaatgacactaagtctcaatatgatgttgctcttgtggctgctggaaacgcccacaactctgatgtgtaggttctggatacaaggggcatcatttcatatgtgtccaaggagagagtagttctcaacatatgtacatgtagaaaacggctgcatcaagatggccaacagttctgtctgtcaggttgctggaatcggctctatacagatcatgacacatgatggcagattttgcacactgaacgatgtcagacatgttccgtcgacggagaaaactttgatatcactgagtctgcttgatagcaaaggtccaaaatattctggtggagacagaattttgcaagtctgtcaaggttgttataagtggtcctctgtatatactacatgggttcactgttataggttcaatgaacgttgcatcttcagagattcacaaggaggatatgactaag

SEQ ID NO: 15249 - DNA, 5022 bp, Arabidopsis thaliana landsberg
cattttgataatatatacaaaatacagtatatacacttacttgtattaatttttaaaaaaactagataaacatacatgctacgcatgggtttttgtttttaaaattgttggaaaaaattttggttatggttttttgttgattttgatattcattttttttttccttctaaaacctttattattgacgagtgtcataatcattgtttacaaaagacatcaaaaatacaggacatgaatgatacaaagaccagagatttgaacctaaaatagtttttttcgctagtagatcggcacaggcattttgttcactatgggtgaaacagaatttcgagtttatgaaaccacttctccaatgttgtattgccccatgtagtgtttgagtcgaagatgagcaccgtacgtattaataacttggttgatggttttattaccccttcgaatattacgtttcggtatcctaaccccacgcagcctgtattgcccagataagtgatgtacattcagcttcttctatcgtatttcgtccttcaaattgtcccataccacagtccaacacaaagccattggaatcacgaattatccaaccaagtcctgaggctccagctccttcatgatgatgatttaagaacatgaattttgcaaataaccaaaatccaattattgtagttaacgcacttttatttaattacatttaacaattattgtaattaacgcacttttttattcatgaatgctaaagttacaaaacaataaaactggccaagagtccagtttggaacccaactaactttgtgttcaccatgtgatgtctctcgggaacattaagtatactttaataaagacagttttaagtttttttttaaaggatgaggatgatgaatgcaagacttttatagggtcaagctttccgatttgaaggaaccacagacacatggagtattcctttccattctttgccggggttcactgtgattggtttagcgacagccgcgctttccaccgttacaaaatgcttataatcttcaactcccaaatcggatactttcttgtcccatggattccacaccactgcacattaaaattacgaataatgcatcattagcactactaaaacaatcatttctgtgtctatgtacgtttacaatctaaaaatttgtaattaccggcatcaacttgtccctccttgtgtacaacaatagtcttctttttcttatggtccacgattcttagttgatctggagtgcttaggtacaacctgtcaagcttttgtgcaaggtgcgtttttttagtgatggactataaaataatacaagggttgaaatttgaattggcaaaaggtaagaggcttacttgagcattgaaagttataaccttctcatgatcagtgaaacgtgttctgttcttttgttggtcaaggtaatccaagttgtgtaatccttcgacatggatttcactgaatacaacaaccagctgattcaatgacacttacaccaacacaaccaaaaaaaaagatatcaacgtgaagttatgactccttggattacctgatattggaaacagcgaagtaggggtgaagagcaaatgtgaagttaaatggttttgtatcagtattcttaacacgagatgttaacgtcaaatctccatcatgtcccaatgctactctcagtctatactcaaacctgaaatggatacatagattaaaaaacagtctccatattttatgtaaaatattcctaatcaaatatctgaaaaaatgttgaaaatgagagagagagagatgtttcaagaatcttacttatgcggccagatcttcaaatcctcattggatgatcttacgatcaggtcaacatgagcagtagaaagtgatggcaaaggaggtggtttagtctcaacctcccagaacctctgtcttacaaatccatgtgagggaagtggaccggtgttactgtactgcacttccataaaaaacatttcattaacaaaactatacccttcaacaacaaagaaaagtttttttttctataaacacatacttgcggaaacaatactggaattcctccacgaatcggtgttggaggctggaatatagcctgcacaatacgtaacacatgttttagatcactctgctttggaactcatacacacacataaaattactactactttagaacaaagcagattattaagctatacttatctattcatttacaagcctctaatgaagtaacgattcaaaacaaaaaaaaaagaagatgtaaagattcatctttgcataatttacttagttcaactattgcacatacaaaagcaaaacaaacaaaaaacattatcgcagatacagccaatcagagaacaatatttttagccaatcagagaacaatatttgtagcaatcatatgatcctaaaaggagatagagtgaatctgactgaagttaccttgctactcataacaagtaactcctctccattctcatttttccaagaactgacttgacctccatacaagtaaacctgaataaacaaagaaacaaaatctgcatcatgcaatatccaaaagatgttttgaagccaagttttttgatgtaaatgacacaatcaatagatctaaaccaaaccgtaagagtgagtacctcagcagatcggccacgacggtcgcggatgatgatcttgtcaagaccattgacgcctttagtcctctcattgcgacgatgctcgatggccgtggctactactgcaaccaccagagcccagaagaagatcacaaatccgagatttcgcttattccccatcatgaactttgcttgttgaaaattattgaaaattctttctctctcttttattttataaatatggcaaaggaaagaaattaaaaaaagtccacgagtgagcctaaaaacaggaaatgaaacttagaaatccaatcatttatatttagacttgaccaatgaaagattggaaagtcttaatttgtccactgatttgctcaaaagtagtcattacgccacatctcttgaccttatagacgccaatatttactttcttgttaaagagtccattcaactatatttagatttttaaacatgaaaatattttattatatatcagcaacaataaactttacttccaattaagtttagctaaactagagaataaaatttatggcaaggaaattagatacttaaaataaaatgggttttggatatcataactaaggaggatgtgttggattaaagattatggatgattttgtggaatttaggaaattttagattttgagagatttgagtcagtttttaggatatgtggtggaattggtagatgttttgttttaaaagtagaaaattagtttgtgatttggtgacataaagatgacatgagtacagtataattttgttaaaatataaaccaatagaaaaccaatttactatgtgagttcttttacttcaatgttgatttcatggcttagacttaagagttacaatatcatgtggtgaatggtgcgatgcatagtttatggaaaaacatagttgagagttgtgatactctaataatctcatcatctcatgtgttaggaaatgactctcgtagaatctgataaattttgttgatctttgcttttttggtttttcaaagaagtgaaagaaccttggtgggttgttgctattcactctaggcctatatatattcattactctcaaaagtggcccatttaagacctataagtccactatgggtaaaacagtcttttactcagagacctccaaaaaactagggttcttaacttctttttgagctttcgttcatcatcgtatataaaaacaaaaccactctcgatcgtcactttttccagaaatctctcactatcgccatcgattttagcagacattgaagaagatgggagtattcacattcgtatgcaagaatggaggcggcgcgtggagcgcgaagcaacacgaaggagaacttgaatcttcagcttcttctacctacgagctccagcgtaagctcgttcaggtatctctctccgctgattcctccggtggcgttcagtcttcgttttctcttgtctcccctacctccgccgtattccaggtataagtctctcttgctcgaacaagcttacagtttgagatcgtgcatctttgaaattggcaatactgtgtgagaatcggagcttgcattttcagataaatgattcattcacagtaattatggtcgttgatcagtgatacaagtgtcatggctcactatagctctcttatcattgcatcaaatgtgattttgcgtcaatgtagcttgttttataggttaacaatgatacctaaaggttacagctttgtaatagctaaatcactcaatttgtttttggttgccttctctgtttaagtaggtgactttagtttacatggctccggaaactagtacaaatcaatatttgtgtataattcctgttttgcattgtaatttttatcaattggaatcaatttcttgtggcgtaggtaattgttggtggtggtggtggtggaggattctctgctggaggagctgcctcaagtggaggtggtgcgggtgaagctgcagctgcccctaaggaagatgagaagaagaaagaagaatcagaagaggaagaaggagacttcggattcgatctctttggttaagattgaaatagtattttggaggtgttggtttgagctttccatttttgtgtggggtgtttcttccattgtcaagtgtgatatgctacactgctttcaattatatttcgtgagtaatgacaagtttctctttcgatcctataccttggctcctcatgtcagatgaatgaaagaaagtctcaaaacagagtgttgaaatgtgataagaatctgtagctcatgaaatttgaggaagaggaggctatttcaggattagcatgtaatgtttggcttcaataataaaattctctagtatctagaaagtttcgaataccatgtgaaattccacaacgagttacagatctgaagtaaactactgatggg

SEQ ID NO: 15250 - DNA, 1955 bp, Arabidopsis thaliana landsberg
caaaagcagggaagacacagcgacagatgggtaagagacacgaacttgtaggtagtagaacaagttagtggcatacagtgaatgtgagtgttgtaaataagaaaaggaagaagtgcccttacgactgcgtcatattcgactgctaatatattataagtgtggaaggacttcaatttccgcaatgtttgcacagcctggtcacagaaagtcgattcatcacaggatgttgcaaatgggtacgaagcaaaggaatatatcggaaaccgaacagttgcagggccaggggaaagccatgaagtgcaagagataactgattgagtttcttgatgagacactcttctgactgaatgtgagacccaactttcattaaccggagagtgcgagagaaagagtgtcgttcccaaggataattgagaaaaaaatcaatattcttaacaatctctactacttcgacaaatggacgcataggttgggatgcacttagaagggcaccttcaacaataacaacaagagatatttggaatttacgccaggaaggcatggcacaatcagatttgagaccgctaaccactgatttcacagtcgccgaaccgagttgccccccaatgagtttgtaccagtaaggagattcaccatcagcatatgaagtagcagaacgtactttagcagctgacgggtattcagaacaacacaaacttgtgacttgctcaaattctttgagggaaaagcgtaatggctgtccagcaaacacaaaccatgttgcatctatttcctcagtaaacagctgcctacataataactgatgcaaaagttgaccagacaaagaacagtatctgacaggaagggagaaaagagacccaagcggagactggagcagaagttgtagctcaggagtcccatacaagatattgaaaatgtcaataagatattttgccttggaatatgagttgatgcggacaggatgtgaagggtagcagtccagggcaagtaagcgcggaggaaggtcacctgagaaacatggagtaacagacgtaagtgactgtcatagagcagaacttggatggagtaataacgagaaaggaccgaaaaaaaaaaaaaattagaagatccataatgaaaacacaaggggcgaaattcagaatgaacactataagcagaaagctaaaccataatgaatggtaaacactaaaccaaattgaccttagtggttacaggagcgaaagaaatacaaaatcttgtgagaagaacactaaaccctacaggatactatcttgggaacccaaaggaataaagttaacacaacagtatatggtaagacattgtcctcaatgcatataattgagtaagtaacgcagaaaactaaaaccctaacggatacaactgtgggaacccaaggggacatagtcaaaaacagcgggatattggcacacatagaacgtggtacactttggtaaacttcgtccgaatcagaggccattgctaaatcttcaaaaaactgaaattgcgaaaaagtgcataacataagggatgtgtagtaaccaagttaaacactgtgcagtacaacaaacagctgctgcagtaacgaaagaagatcggtgtaacgcccgtgaactggaaaatcggttagggtttgtttttaaatcatccggtttaattggttgggttaattggaaaccctagagtgtgcctataaaagaaggaaactcgaaattagggctttggttagcctcttttcgttttataaaggagaaaaagagagaaaaggagaaggagcagaatcgttagggtttgggagaaatcagtttcgtcatattaaatcgtggtaaaaggtaacgaaatttagtagagttattcccaaatcctttatcgttatgctccagtttacagaaatggatttggattaaaattggttgagttattcgcagttttgtgagacacgttttctcagacgcgaa

SEQ ID NO: 15251 - DNA, 1936 bp, Arabidopsis thaliana landsberg
ttgccttttgtgacaagttgttgagtgggcttgatgggcctttcggtttgaatgttgttattgggctgaacaactgagcccaatcctaatccttcaccaagctctattttgagcttctctctaatactcctccgtaaactttgtgtgggtggaacatatcaacaccaagtttatacctgagagaagcaaactcagcatacggcaatggcttggtaaatatgtccgcaagctgcaagtgagctggaatatgctgaacaacaagggaccctaacgccactctttctcggacaaagtggtaatgagtctgaaagtcttttgagcgtgtgtctaattctattaggtagtgattcttgatcatcgaggatataatcattttcgtagaccaatgtcactgatcacgttatacatgagtatcagtcgataaactagagtgtgttctgagaatctatttagataatagtgttattcatcagtatgatataatgctttacataatcttcaacaaatcaatagaacacaacttagatagtattatacatcaacgtgatactttagatatttcatcaacacaacaacatagtaaaatatttgaggagttttcctaaatcagttttcgtcgtagtatcgttgcaagatttgtgttcttacagaaactgggatggctacattgtgcagagtatcagtccaagtcaagcttccaaaatagtaaccagtgtttactttgtgtgtagtcgagaaccgaacagtgaaagatcgctttgtagttgtatagtcgaacgctagttccgctggcgtaacaaccacgttaacgcctgttggaggatcgattacaaccttgtataccgagttaacgggtccaacgttagtgacggttcttgtgagaatgacttcgtctctgagatttgggattgtgatggatggtaagttgagatcaagaacagaaggtttgggattaggacagacagttttttttccgaggactcgagaaatggaaatgtcactgtaatcaacagagcacatgtacataacgtagtcatctgttgtcatgtcgtatacgagacctggttttacagctttctctggatttatgagtcctcctccgtaatcaaacggatcagctagcttgcggcttgacccgtctgcgaatattggctctccagatggatcagttctccaagctgcaatgttaaaatgtgttccttcggatgaataagttttttgataagaaaactgttataacaacatttttgatgatgataagaacctgtggtaacaatagctgatttgatagcagaaggagaccaatcaggatgtaatgatttgaggagcactacaactcctgaaacaacaggagtagccattgatgtccctgacatcatagcaaaacctccatcatttatagagctatttggagaaatagctgctagtatgttcacaccaggtgctgctatatccggctgcaaaacatagaagcggttacaaaacagagaatcttaaaaggttagaaatgtatgaaatggtatgatataccttaagaatcgccggagaaactgaattaggtcctcttgacgagaaggttgctacctttgtcgacacggattgtccaaaaagcgtctttgaagcctgtatctttacaatgggagatctaccaaaaacacacacaatatgtttagttgaatgtgtttgttgaagaggttgtgatcattttgaaaatataccttgtggagcgtatatagaacaaaatgtcggtccctagctcgaagtctatggaaacccagggaaacttacgagttggagtaagcgagtgggtcggattttttgccatgattaacccaagaccaccagcatttattactgcggctatagcatcatttgatggtggagatgctgcgaaacacaacacaacttttccttccattgtactgttgggattagc

SEQ ID NO: 15252 - DNA, 1887 bp, Arabidopsis thaliana landsberg
ccagaaaaaactaaagcattgcatgcagtgagatccagactttttttataaacttaaaccacgtgtcttattggggtggggcacttggcaaaaaccagccggcaaaacatgaaggaatatacgacagtgtcaggagttcagtttctcaccaaacacgtgtcagaaaactaaaaaaatacaattaagaatcagattttgggcattattagggcatctttcttcactacaagcatcttcggtcttgatcctcagcatctatgaaagatccaccgttcaacttgtcaagatccaatggctcaccatctatctctcttcagatccatccaacggctaagattcaatctctccccatactaatcctctctttctttctccctttatataaccactgattcaatcttcttcgttaggatataataaaaacatttcagaaatggcgactttggattctccgttagaggttttggctttcgactacgttaacttcgtctttaacaatctttggacatggatcgccgtcgtgacggcgccgttagtttctggcggatccgagccactaccactaccaccaccagcggaggtggtagagacaatggcttaatagatgaatcttttcttgagccaccaaaaacacaagcgacaaaggctgctctccttatggagacgaaacctcctagagtcaaggtaacggagactgaggattggagtttgttgttgtgtaaggacggagtaacgaaggggaagctaaccgtgtactacgaagaagagattgacggagagagagaagaagatgacggagagacaacggccgttaagtatggaggaggtgagagtggagaatggtgggagagatgggagagagtggtgaagatgagaaatggagatgaaggttggtaccgttacgtggatttaacggtgattaacggaaatgttgtgaggttgtgggatgctaaccgtgtacgtaacggtggttgggttagtgtgcaacgtaaggagtgttatggttgagacatgttggggacaagtataattttctaatttaagcatatgattattcattgaacctttttggtttaaagactatttttgttgaattaaagttgtaatgtgtatatatattttagtgatataactatgatcattgttgaataaagaagaacaaattccctttcatgtttttttttttgtttttgattatagttctcaactaggtcagtacccgtgctacgcacggtatctttggtttaatcaataatcaaatctcagttctgtgtattccacagaaacattactttattttcattatctgtaaacatatagttgtatatcacgtattattggtatcaactaaatatatttagtctcgtcaaaccatattttgtttagtatatgtagtttcctcggtttgtagcatggaaaatatatgtctatagttggtatgtacatttgggaacgtaattgtatattttgtatatgtaggtgtacacatagtagttttgtacgttttcatgtatgtaattaatatagaagtttaacattatctcataatcaaaaaatttctaattttatatatgtttatatttacagaatgtgaaactaacattttttgatacaataattatgttaaatgagacataagccatttttgtacataaatagattttactaaattttgcaattttgatagtgaacgacgaataaataaatatgttgagttagagatatatagtaataataggtaatatatagtaacattcttatttattttaggcagaataatattaaatttagtcaataatagccatgcgatattgacgattcaaattttaaaaatattataaattaaaaatatgtaaaagtcttaaccacaatcagacacaataataa

SEQ ID NO: 15253 - DNA, 2078 bp, Arabidopsis thaliana landsberg
  unsure (1)..(2078): unsure at all n locations
aagggtaccaaaaacagaaatcatcaccttcctcagacacattttaattttcaaccaattgaagtttctgtccagccaaggccacttgaacaagcgccactatcggcccctagccttaatcgtccaccgctccagcaggaaatagctcatacaatgcgtgtctacgcaagacgaggtccacgaccaacaaacgcacctgttttagtccctcgagacagctccgtcgtgcaatannnnnnnnnnnnnnnnnnnnnnnnnnnnnnnnntccgacgttatcatcatcatcaccggatttgtcttcgagttctttgagacttgatgaagatgacgatgaagcttcctcttctaatgttatatctgagcgacaaaagaatccaaatcctgaaacaggcccaagcccaactccaattaaccctcccttaaatctgaaaagcccatcacaatctggcccgttatcacctacaccaaattcttcctcctcatctgcaacttcacgatcgacgccaccacctcctccacctataccagaatatcaaaatccacaaccaccaccaccaccaccaccacaaaacatccattctatgagaactcgctctaaaaaccaaatcacaaaaccaaactctaaatacaccctcacgacgaccacctctactcgtgttcccatgatcccaacaacggttgctcaggcactaaaggatccaaattggagaaacgcaatgtcggacgagtttaatgtgcaaatgcgcaataacacatgggatttggtaccaccagaagctgctcaacatatcatcagctgtaagtggatttttacaataaaataccttcctgatggctccattgataggtataaagcaaggctagttgctcgcggtttcaatcaacaatatggtcttgattacttcgagacattcagccctgttatcaaatctactaccgtacgtatcgttcttgaaattgcagtcaagtgttcttggagcatccgtcaactcgatatcaataatgctttcctccaagggactctaatagatgaggtttatgtctctcaaccacctggttttgtggatcatgatcgcccacatcatgtatgccgcttgaagaaagctctctacggcctcaagcaagcacctcgtgcgtggtataatgaactacgcagttatctcttacaagctggtttcaccaattttttatcagatgcctcgttgttcatatacaaaagcggctgcaagtttctctatgtccttgcgtacgttgatgacatactcgtcaccggaaattctgatcttgacacgtgttgcatttcctctatcgcaaacaggttctctttgaaagaccaaggggagttgagttatttcttaggcatcgaagcaacaagaacatctaaaggacttcacttgatgcagaggaaatatatcacagatcttctcactaagactaatatgtttaatgcgaagcccgtttctactccgatgtcaccaacacccaagctctctcttttctctggcacagttttggatgatgctacggaatatagaacagttctttgcagtctacaatatctcgcttttactcgacccgatattgcatttgctgtcaaccgtctatctcagtttatgcatcgaccgactgatgttcattggcaggccgttaaacgagtattgcgttatcttgtgggcacactatcacatggtatatttcttcgttccgacaatcctctatctgtacatgccttctccgatgcagattggggaggagacactgatggttacgtctctactaatgcttatgttatctatctcggtgggagtcccatctcatggtcctcaaagaaacagcgtggtgtggctcgatcctccaccgaagccgagtatagagctgtcgccaacactgcatctgaactcagttggatatgttctttattatctgagttaggagtcaaattaccaacagcaccggtgatttactgtgataacgtcggagccacttatctatgtgcaaatcctgtatttcattcccgtatgaagcatatcgcactcaactatcactttgttcgagggtacatacaatctggtgcact

SEQ ID NO: 15254 - DNA, 3032 bp, Arabidopsis thaliana landsberg
gaaatcattttctgaaatttttcaaatttttttggtttttctatgccttagatgaatgcagagtcgagaatatatacaatggggcacactggctaagccctcccccaaacttaaatcacatagtacactgggtgactaaacttggaagacaaatcatagaaacaaaataaaaacaagagatgatatataacaatggtgaagtgaggctcttacctcagtcgaagaatgaacggagttggtcatcaatggctgcctatgattggtcccaagccatttacgagtcgccctgttctgtatcagctccagcatgtgggtactcgacctcatcggctttgtggcggccagcaccactttgaggatactcgacctctctccttctgctgcagttagcaccgcggtcgagtgatctcctcgagtggataaagcgtgatctgctgctagagcgaacgagcgtagccttcttcctcttttagtgttcccgggactcgaatgacgaatgtctagtagggacatgtgagactctctgctcactaggctctggcatgtcctgacttggctcaggcacataaaatctcctcgatggcatgtcctgaggaggctgtctctgtggaatagatgtagtggaagagtagcagcttagcttgttagttagaaacttgatagtcttgaagcacttggcgagtaacttatcttgtgtcttgcactacttctacaacttgcttttgttcctgtgagcttcactcaaactcttgctctccctcgctggaggtacatcctcactacaatgatacatggtcatactccacttctctgtcttcgccatcccatcctcggtagcttcttctgtatgaacatcctgatatgttggctgagcgttctcgtaatagaggttatcgagctcaagcctgaaatcaatgttatctccctctattatgcgtgtaacctcagaactagcgagaaggatgttggctttcttatctgtagagtgctcaaatttgaaacgatgcatgtcgccaaccattgcgaactcaaggatttcgtagtgatgtaattgctcgatatccattgcccgtggctcgagtccatcagatgtgattgggactccacaagcgataagaatcggtgtcacaacacctcctatgcaaagagcgcctcgtgctctcttgtggttattgctgacagcccagctcttgtatccacacatgtggatcagaagaggtatagagagaggagtgtcattggtttcaccttggagagacataccgttcttggtttggcggagagtgccattgagagccatagcgatcatctccatatcggaattggtaacaatccctatgatctctcgggagtagaggacattggctatagaacactggaagtacctgatgacagggctgcgtatctgattgctctttgacctggaagaattcagcggtacagagttgccaatggtgatccctaaatctttcaactcttctctatcatacttgggcttagtacccgttccactggggaaaccaaacaatccttccaagcgcttgattgataacctatactcatgaccatacacagagaatctcaagaatcccaatccttcgcattccaaatcatcaaaggtcataccttggtaaagctccacttgcagtgtggagaggaactgaatcgtttcttcttcatatgctacatacggataagccattaaagtgtccagatgacaactctagtacaagtgctgaacatcctccagcaatccaagttgtgcgagtgtggtcgagcatgaataccttgtggtacagaactctttcaatttgaagagcttaatatattcctcaacaaacaatacatcaggtttatgcagaagtttggtggctcttcgagtatgctcaggcatgtaactcgtcttccagatcctcatctataagctcatatctctctgtcatcactctcactatctcagcgagtatgctcaggctatctcagcttttcttgtgaagctatcatattctctctgttctctctctggccttgaagatgacgactttgtctcatccatgttgtagtcaggatcaacagaagaactgccactgtaattactcatgattctcctatagaaatttagaactcaaagctcaaatgtcaataggttagtctcaaagataacaatgaaaccaaaattgttatcaataggcaacgaaatagaccgaattggatcgagtaatgtagagaccgcggttgaataacttttctgaagtcgagtgggtctgccgatttgctagtaccagcggtcgagtggttcctcagtgaatcggaattgaagcctggtatcttgaaacgtgaagcttggtcgagtggtcggctccagtaggtcgagtgaaacgttgaggtcgagttcagccggtaaagtccagaggtcgagtaatccttcggtgagccggaattggtatggtcgaaaccacaagtcgacggtctattcctctctttgtaatcgagtagtccctaagacttcgatggtgaacgaggtagggactcgactgcggcggcgcagagggatccgagtagattgagaacagagtaacggtgaacagcaaggtgagaaggtcgagtaaagaagcaaatgaactcggtgacggcggtgaagcggtcgagtgcctttccagtggttgagtaatctgatggggtcgagtgcgagacagtgaatcgtggtgaggtgcgtttaggaagaaaggttgaattaggtcgagtggttgaaaaatgaagataggtaggtcgagtgattttcgaaaggtgtggtggaagttgagtttgacattctctctccatcttatttttagtgcgtggttcacactctgttgactgagaaaaactgcagaaaatctactgtaaattgcaggaaatcctttaaagtctctatagctcttgttggtcgagcacagtaatgattaaaaattttctgggtcttaaacatcacatatactcgactgaagaactaaaattcaggaactcaagatgcaacagaaaactttcaaaat

SEQ ID NO: 15255 - DNA, 3297 bp, Arabidopsis thaliana landsberg
tcctccttacaagattaatgctactggtgtcgtagctcctgttgggttcaagactattgctacaagtgctactcattacaatggtgttcgagagtacgatgctcacagtatctacggattctctgagaccatcgcaactcacaagggcttacttaatgtccaaggcaaacgtcccttcattttatcccggtctactttcgttggttcgggtcaatatgcggctcactggaccggagataaccaaggaacatggcagagcttgcaagtgtctatctcaactatgttgaacttcggtatatttggagttcccatggttggttcagacatttgtggattctacccacaaccaacagaagaactctgcaaccgttggatcgaagtaggcgcgttttacccgttttcaagagatcacgccaattactactcaccaagacaagagctttaccaatgggacacagttgcagactcagctcgtaacgctcttggtatgagatacaagatccttcctttcctctacactcttaactacgaagcgcatatgactggtgcacccatcgctagaccgctcttcttctcattccctgaatacaccgaatgttacggcaacagcagacagttcttgcttggaagcagcttaatgatatctccggttctcgagcaaggcaaaaccgaagtagaagcattgttcccaccaggttcttggtaccacatgttcgacatgactcaggtcgttgtttcaaagaacgggaggcttttcaccctccccgctccgtttaacgttgtgaacgtgcatctttaccagaacgcgatactacccatgcaacaaggtgggttgatttctaaagaagcaagaacgacgccgtttagtctagtcgtcgctttcccggcgggagcatcagagggatacgcctccgggaaactctttcttgatgatgatgagcttccggagatgaaacttggaaacgggaattcaacgtacattgacttctacgcatcggttggaaatgagagtgtgaagatatggtcgcaagtgaaagaaggtcagtttgcgttgagccaaggtttggtgattgagaaagtgattgttttgggacttaaaggaacatggaaagtttctgaaatacttctttgtggaagttcagtctccaatgagaccaagacgattgaggtaagctccaaggagcagatgtatgtggtgggttctgaagatgaaggagagagtaaaagcttcatggttgagcttaagggccttgagatgctagtgggtaaggacttcaacatatcttggaaaatggctagtactaatgtactatcaatggcaggaaatgaggttatcgcgcgctaagaaataaaattgtccccaaaagagagagaatatatgatttggaaaataaatgatgagatttcctgttgaaaacgtgatcaaagcctaacacattcttgtctcgtaagatcaatatcaatacaataacatatatcagtaaatcaaacacattgtctatactaacttaacaagtaacttcaacactaatcaccttaatcagttagaaaaacagagactgtaaacaaaagataatgacaaaaaagagtaataatataaagataatggcttcgcccgggttcgaaccggagaccttcagtgtgttagactgacgtgataaccaactacaccacgaaacctgttgaacattgattcataaacatagctatttataatactgaatccaatgtaggtacggaaaccaaatcatcttgatttaaggttgttaattgaagggaacaaaggtttctaaaattatcaatttagtggattttaatttttgatttggtattagtttcgattctatagtggtatgaaattctggttagtgtcttgatatttcaggttggaagactatttttattggaatggtgaataaaaagaaaaatagcataagtaccgttacctttagaagctcgaaattgagaaaaggagaaaagaagatggtatggacaaacaccatatgcatcgtccagtgtacctcgagagacaaaccactttatcctttttggaccacatcattctgttttgtaagctttctatttctttcttgttaaatattgggttcaacaatcaatatacaaaaatgttccaaaataatcagttggttctaaactcagatgtaataggtttcttatagttttaaactagggatgtcagtcagcaaagcccatgctagcatgagctcgtacgggcatgattattttctatatagtccaacaccgaaaggtccgaaactataataacttaaagaaataaataaaactctactactgatctagtcatcaaatagatttatccctccatttgatacaatttcattctagtacacactctaaacctaattgagttttgattttgtgagcacgtagactattgggatatatcttcatgcgataacgtacttgagtgactgtgatgatgtcaaaaaaaaaaagtgagagtgtgagactctctaaacggtaaagaggctctcgcatcagaaatataatctctatatatcaagttccttcttgttttgtgactatacagtatacaaattaaactcaatacactatgcatgaatacatgagaactatacataatacaccgtatatatgtacaagaactgagagaggttgtgtcaaaacagagagccttgacgaccgaccctgcgtggtaatccaaaattttggtaagttcggatttggcccttgattgtggctgtaacaatcaccattccccaagctgttggctgaactgaatgtgttccatgactgccactactatcaaaccacgaccaagaagaaatccgagaggagattgatatagaaggtgaatccccatgctttattgactcgcctgtgttgttctctgattcgttatgcgaaatatgcgtagctggatcatcttcttgatgttgttctgttgctccatccgcggtgccgtcattgtttttcttaggtaatggtgggaggcctgattttttacccgtggtcgtgttttcaggggtagtagtagtagttgatggttttttcgggtttcttttcgattggtgttgtgtggatggtggttcaccttttacaacgccgttccatgggactgccacggaaacatctttgcacgggaaggtttcataagaagtacacatggtgactgtttttctaccggtgatacctagtcgtggctcctcgtgtttccacacgtaaacctgtgagtcttcgctagcgcaaacaatgtgcttagcatctactgtgtaagatgctgtcatttggctg

SEQ ID NO: 15256 - DNA, 657 bp, Arabidopsis thaliana landsberg
  unsure (1)..(657): unsure at all n locations
acaacatcctgcggggggtgaacttcagggatatgaagaggtgacctgtaatactacaatcagctttaacataccatggactaaacatcagtctcacaataaacataaacattgatccataaaacttacttgtgaatgaaggtactagcactagaccacangaacaatactgcgagagcaagaattgaaatgtggccgaagagtgtgagaagattgtactcaagtaactcgaataagatccaggaaacagttgcagcacccaatactcctcctgataccttcttattcctccacaggaaaatgtcggcagctgaatcaaacaaataaaagataataagcttacgaaattactcattccatagatactctcagattccagaaccagcaaacaccaaaccaaatcggtcgtttatatcctgattttctgaatctatactcaatccaagcaacaaatcaaatcctaagtctcaatcaatggctagattccagatccgataagaaatagtaactaaaatcgcaaatcggtgaaaagagagagagatccatacgttttccgccaccgaaaagcttgtgaagaggctgttctcttccgaaagacgataaatctcggttttgagagacgcagagttcttatcgtcatccgaatcggaagaagaa

SEQ ID NO: 15257 - DNA, 1439 bp, Arabidopsis thaliana landsberg
cactgttctaaaaagtgaatctccatctcgggtcgctccccgaaagtttcactgtaaaatttcagtcttttctttctggccacgaacccacgaaacgaatcagggtaagaaagtcatcgaggaatgacattgttaagttatcgaaacaccagaacaaaataaaagcctttggaactttggaaagtggataaagccattcaggcataagttttacggcgactagaaaaaatagaaacaaaaaaagtacgaaggataaagccatccaggcacgagtttttacaaataccaaaagaagaaaaaagggaatccggttcttatcattggtcaagtcccttattccgcgaggcatcaccgcggaggttcgaaccagcttggttgatgatacagacttcatccgcctcgcattccaccgatcggtttcctccaggactcaaaggatccgaggaggatggaacctgagggattaccaactcttccttaacttctttaaggagactggtaaacttcacctcggcatccgcaaaatctttcaactagctgtccaccagcttcttctcgtcctccagacgcttcccaccctcaagcgcggcaatcagctcggtgtttgccttagcctgcgccaaatacatccagtggtcgctagcttgatcgaccatagctaacttcgcctcgacagctttcatcctctcaacaaacaaagctgcagtctctcgcgctaccgatcgacgaacccgagcaattttattatccaagagacctctctcctcggtcaacatacgcttgtacctctcgcctgtcgacgaaatctcaaggttggcctcggctagtaggatgggattctctttatgggtgaaagcatcctgctcggctttccccttttcttgcaacatcatagtcgctttgcgttaactcgagcaagttccgcagcggccaacttcttttcagcttcgagcagcttgtccactgcgctcagattggactgcgaagaggaatcgtaggatagcaccatcctattcaacgagccgatggcttgaagaaacaaaacaaagataagaaccttgtaaaaactcttgctcggagatcaaagtttctaacgtactctcaaaaagttcgacgccctatcggcatatagctcggactccaacaaaacctcgggggagacaacaaagccccagtgcaggcgccgaaaaggttagccgaggcagccctgtccgtcgagtataggctcgacgacgtgtgggcagagtctcggcgtccgtcgtcgtccctctagttgctccctgccgggggatcatgcagtgactggtgtgcttccacgaggccttagaacgatctcgagccggcaatccaactatggcaacagcactcgctcggagccagcgaaggatcttgcactacagtaggttcggcagccgcaataatcgcctcgggagacgggt

SEQ ID NO: 15258 - DNA, 3340 bp, Arabidopsis thaliana landsberg
tgctcttcactgtgcagtttctggctgttctgtttctatcgttgagatcatcaagatcttgcttgatgcttctgcttcacctaattgtgttgacgctaatgggaacaaaccggttgatttgttggctaaagattctcggtttgttcctaaccagagtagaaaggcggttgaggttttactgaccgggattcatggttcggttatggaagaagaggaggaggaactgaagagtgttgtgactaagtatccagctgatgcatcacttcctgatattaacgaaggtgtttatggaactgatgattttaggatgtttagctttaaggttaagccatgttctagggcttattcacatgattggactgaatgtccttttgttcatcctggtgagaatgcaaggaggagagatcctaggaagtatccttacacttgtgtgccttgtcccgagtttcgtaaagggtcttgtcctaaaggagattcgtgtgagtacgcgcacggtgttttcgagtcttggcttcacccggcgcagtataggacacggctttgcaaagatgagactggttgtgctaggagagtttgtttctttgctcatagacgggatgagttaagaccggttaatgcttctactggttctgcaatggtttcaccaaggtcgtctaatcagtctcctgagatgtctgttatgtctcctttgacgctgggatcatcgccaatgaactctcctatggctaatggtgttcctttgtctccaagaaatggtggtttatggcagaacagagttaatagccttacaccaccaccgttgcagcttaatggtagcagattgaagtcgactttgagtgctagagatatggatagggagatggaactaaggtttcgcggtttggataaccgcagacttggtgatctcaagccatccaacctcgaagagactttcggatcatatgactcagcttctgtgatgcaacttcaatcaccaagcaggcattctcagatgaaccactatccgtcttcacctgtgaggcagcctcctcctcatggattcgaatcttcagcagccatggcagctgcagtgatgaatgcaagatcctcagcgtttgcgaaacgcagcttgagtttcaaaccagctccagtagcttctaatgtctccgattggggatcaccaaatgggaagcttgagtggggaatgcaaagagatgagctgaacaagttgaggagaagtgcctccttcggcattcatggaaacaacaacaacagtgtgtcacgccctgctagagactacagtgacgagccagatgtgtcgtgggtgaactcactggtgaaagagaatgcaccagagagagtgaatgagagggttgggaatacggtgaatggtgcagcgagtagagacaagtttaagctgccgtcgtgggcagagcaaatgtatatagaccatgagcagcagattgtggcataagaagcagaaagaaagatgtgggatttatattgcttttgtcttctgggcctctctacacagaatctaacaaatctggcaataattctttgatttgtgtttgacccatagtttggttactagtatatgttttttcatgttctttttttctttgtcattctcttgtccttcgtgacactatgtaatgattaaaagcaaataattgatgcatgagttcaaatgttctttgaaggatccatcttattagctttgtaattgttgtgatatcttaatcttattggttacgtatttcaagtgctttagaaaaaatgggcctaagagattttggggagcttttttggcttgttattttcctcacatatacaacttgcagcttattatttattgaaaatcttttcttatctagattcaaaagatttccacaaattttaattaacgacccctgattacaaagaaacctacccaaagtcaaattttgtccataatttctatcgtgtaggacactaaaaagtaaaaactcatacctaattggtttctagtagaaacggtcagtgcactatctttctttcaggttatcgaaggaaaaaagatcagtagagtagcatcgttaatagtagagttaagaaaagcatgtaacatgtggtctactttttatttcacagaaaaataccataccatgtgataatgtcgcataaaatctttacttttccggtgttatcgatgtgtgttaatgttaaatacccgaaacaatttcaagactcaattttgaactatcgaatagaattcttctaaaatggatgaggaaaagtcgctggtattaagtcgtgcgaccctcaaaatatagttaggaatataatcacaagctgcatactttcattaatcaatttagaaagaaacgactaactttattctttctttgccaaactccataattagttaagtctatgaatgtgaagagagagttttacatttaaaattgtaaagggcaaaattataaaaaattctgtgtccaccaattaggcttggctctttaactcactgttctcaatctttaataatccccatcttcttttctcctatatgattatctctctttccttcgtgcgtgttatctctctgagccacatgccgacacttacataactgttgaccaagtctctcttccttctttatcaaatcatgcaaccttcaagaacaagagtttcattttttgaaacaggagagaccatgaagcaaagaaagaagagttatctctcaatcttcgtgatcttcttctctcttttcttcttcgggatcttcatgtacaatgacaacctcaaatcctccattgctgacttcacatcttcgaacccattctctagttcatttgtggagttgccgccggatgagtgtgatctgttcaccggtcaatgggttttcgacaacaagacatatccattgtataaagaagaagagtgtgagttcttgacggagcaagtgacttgtttgagaaacggaaggaaagattctttgtttcagaattggagatggcaacctagagactgttctttaccaaagtaaagctaatgtttcaagatgccctgtttttatccggtttgatcgaattggtatttaacaattgtctgttttatgattggtttgatgaagattcaatgcaagagtgttgttagagaagctgaggaacaagagattgatgtttgtcggtgactcgttaaaccggaaccaatgggaatcaatggtttgtttggttcaatcagtgattcctcccggtagaaaaagcttaaaccagaccggttcactcactgttttcaaaatccaggtaataaacattaatccatttgtgtgacactgacactaatgacattatttttatagtttattactttcttg

SEQ ID NO: 15259 - DNA, 3911 bp, Arabidopsis thaliana landsberg
  unsure (1)..(3911): unsure at all n locations
ttgcaacaagtgtaagtacatatgtcagtgtttttcttcacatgctctgaaagctgtttcagggtcaaaaagagtgagatgatttgtgaaagtcacagaaagaacacgaaatgatcttaaactgctgataatataatttcgtatacttcctcattcattagaaaacagaaattgtttcatgttttaccgttaaattcatgtttgtcttccagtgatttgagcttcaacaaattacatggaccaattccggcttcacttttcaacttaagtcgacttactcacttgtaagatactaagatgatatgttttctgcttcttttgggtcttactatataactacacggatcatattataaaaaaaaatcgtttgtcttttcatattaggtttctgggaaacaacacgttgaatggatccttgcccactctaaaggggcagtctctgagcaatttgtgagtaacgaaatcctttataatttttccatctttaaaagccatgtcccctaatttcttggacggtttgttgacagatcctcctaatatggctcgtacactatttaccgggcacttattcaagttgaataaggttccactcctggtgacacagataacttgccaagatattaagaaaactgttttggacatataatatagtcggtagatcctaactgtatttttcttttatgctgacagagatgtgtcgtacaatgatttgtctggaagtcttccttcatgggtcagcttaccagatttgaagctgtaagtaaagaaaaacattatatctcaacttatcttcagagcctttttaaaatttcagaatttttcccacatgcatattcattaggcctcttcatatgcagcatgagacttcctctttgtcgtaaaagtttattataatcacttgttagggaataataaacagaagcgtttgttatatgtgcagcaatctagttgctaacaacttcacactggaaggtcttgacaacaggtgagtttttgtatatatttctattcttttcctacaaaaggatgcaagcataaacgatttatcatttctttcttaaatctttttttgttgttaaaagggttttatcaggactacattgcctgcagaagaacttcccctgcaatcgaggcgaaggaatctgtaagtgtaacaaaaagataccctcacaaattatgttctccatgttgaatgagcaaacatatggacagggctccaatgtcttattggaaaaaaattgttttaagactttcgctattgactggtgtctagattataacttttcgatcaactgcggaggcccagagataaggtctgttagtggagcactatttgaaaaggaggacgcggatcttggaccagcttcgtttgttgtgagtgctgcaaagagatgggcagccagtagtgtaggaaattttgctggcagtagcaacaatatatacatagctacttcactagcacaatttgtcaacactttggactcagagctatttcagtcagcaagactttctgcatcttccctaaggtattatgggttgggtctagaaaatggaggctataccgtcacacttcagtttgctgaaatacaaattctaggttctacttccaacacttggagaggtttaggaagacgacgttttgacatttatgtccaggtctgcactacttgaccgagctttctgctttacaaattaaattttggtgtaattatctgcttccgacttttgattctgatgaattctaagactagctcactttttccagggaagacttgttgaaaaggacttcgatgtacgcagaacagctggtgactccactgttcgagcagttcagagagaatataaagcaaatgtatcacaaaatcatctcgaaattcatcttttctgggctggaaaaggaacatgctgtattcctatccaaggggcttatgggccattaatatcggccgtcggtgcaacaccaggtaaataaatggtgaattcttcttgttttacaccatctcctgatgctagttagtgcttaagtgttacatatttctgttcagatttcacaccaactgtgggtaataggccaccatcaaagggaaagagcatgactggtactattgtgggtgtcattgttggcgttggacttttgagcatcatttctggtgtggttatcnnnnnnnnnnnnnnnnnnnnnnnnnnntacacagatgatgaaggtatagatgtaaaaagctcttgaactgtagaattttggccctctgattaaaaattagttatatatcatctctcatattggtcgattttaagaaccgaattgtttctggcagagctacttagtatggacgtaaagccttacatctttacttactcggaacttaaaagtgcaactcaagattttgatcccttaaacaagcttggagaggggggatttgggcctgtttataaggtaaggtacccataccgaaatggacgacatatctgatatctgtatattcttagatatactaggaaagaagagtgtctgtttatacgttttgttttgaaaaacacattcaatagggaaaccttactgatggaagagtggtcgcggtgaagctattgtcggtgggatcccgtcaagggaagggacaatttgttgcagaaattgtagcaatttcttcagttctacatcgcaacctagtaaaactttatgggtgctgctttgaaggagagcatcgtatgctcgtatatgagtatctacctaatggaactctcgatcaggcgctatttggtaatgaacagaaacatgacttacctatctctgcttctgcgaagctaaagtaatcattatgccattgggttggatgttacaggggataagagtttgcatcttgattggtcaacccgttatgagatatgtctgggagtagccagaggtctagtttatctccacgaggaagcaagtgttcgcataatacacagagatgtgaaggccagcaacattttactggactctgaactggtcccaaaagtttctgattttgggcttgcaaaactatatgatgacaagaaaacccatattagtaccagagtggcagggacgatgtaagcaaaatccatagaccctgacattttgtttgcaacacaattatggatttatagctcatgttagttgtatcaatgcagtgggtatcttgcgccagagtatgccatgcgtggacatctaacagagaaaacagatgtgtatgcctttggtgttgtggctcttgagctagtgagtggaaggaaaaactctgatgagaacctggaagagggaaaaaaatatcttcttgaatgggtacgtctatacttgtcatataggcgaagttgaagatggtgtgataaatgacaaaagccgataatccttttgtatttcttgtatacaggcatggaatctacacgagaaaaaccgtgacgttgaactaatagatgatgagctaagtgaatacaacatggaagaagtgaaacgcatgattggcattgctctgctttgcactcagtcatctcatgcgttgagaccaccaatgtcacgagnnnnnnnnnnnnnnnnnnnnnnnnnnnnnnnnnnnnnnnnnnnnnnnnnnnnaggctacctaaccgactgtacatttgatgacaccacaagctcctcattcagcaactttcaaacgaaagacactagcttctcgacgagctttatagcgcctggcccggagatgccacttagagacggcgaatcgaagccaatggttggattcaagatcaaggagggaagatgaagattgtctcctctataatttgatatgcttgtatatggaagatgacaattttcttctatatatgtatgtggagaaacagattcaataataatattttagttgacaatttttcaatctttgtaacaaacttttgatatcttgcaagga

SEQ ID NO: 15260 - DNA, 497 bp, Arabidopsis thaliana landsberg
aaatcaaagctggtctattacttatgtttttatatgttacatgaagttcatttgatttattgggtctttagcaaagtttagcaccgtgttttcactcagactccacttcttacggaggctttcaatttctctttgacaaaatttacctatcacccataagtcatacctgcatcttcatcatccatgattattggttagtataacatcattgctgaacaactctaaataagtgatctaaattaaaaatctgttgactaaatttttttttttggggttaaaatcccatttatatttactgagaatatgacattagttccaagaaaaacgtgttttattttgttttgtctcatttagatataggagttggtggtttcgagcaccattgggtaggttttgttttgagatttagataataataacaaaaatgctatgaggttttactttctagcctccaaatataataaaagtttctcaaaagtggctacatgcatggttct

SEQ ID NO: 15261 - DNA, 3531 bp, Arabidopsis thaliana landsberg
cttttagataatttaagtattttggttacatttggttatatctggataaaagtaaccaatatatttacgggtaatcgggtatttcggatagatttgggtatatatgagaaaaaacccgaacctaacccaaacctgaaaatattttggatatttttggtcatttttacatatttactaaaataaccgaaccgacccgaatcgaaaccgaaccgaaatttaagaatatccgaatggttctcaacctcctacccaaataaatccgatatccgaaaaagaaccgaatccgaacgggtatccgaaaaaaagaactgaatccgaacgggtacccgaattcacgtagaagatgtaaaaataatattagacatttattctagaaagggaatagaataaatgggcctcaatccgggtcggttaatttaattaggaaacgggtcattaaaacccgacccgctcaggctaatctctcatatcctagttttagggttcctcccggcaacgaacgcagagaaatttgaaaagatgaatccattgacgcaggtgaagaatctacagaagataaacgctagggaatcagatttaggaatatctgatgaagcttcatggcacgctaagtacaaaaactctgcatatgtctacgtcggaggcataccgttcgatctcaccgaaggtgatcttctcgccgtcttctctcagtaagtgttgtgtttcgtttctaaagtttcaatttttttaatgggtttataggtttaatgtctttttattttgtggaattgcagatatggtgaaattgttgatgtcaatcttattcgagacaagggaacgggtaaatctaaaggttttgcttttcttgcttatgaagatcagagaagtaccattcttgctgttggttagtgaaactgactcttgtacatgtgaaatttacttttttttaggtgttaggatttgtaattgggttctgtttttggtgattgtagataatctgaatggagctcttgtgttgggacggaccattaaggtggaccattgtggggcatacaaaaagcacgaagaggaggatgaagagacgcgacgccagaatagagaggctcgtggtgtatgcagagcttttcagagaggagagtgtactcgtggtgattcttgcaaattttcccacgatgaaaaagtaagtaagcgtcattttgtactttattcttttcaacagacgattttgatgaatgcttgatagaagttaaccctttttttttttggacagagagctgcaaatactggttggggtcatgaagaggatagaagttccaagtgggatcatgataataatagagagggtcgtggtgtttgcagagcttttcagagaggagagtgtactcgtggtgattcttgtaaattttcacatgatgagaaagtatgtaagcgagtaatcgattctttcgagagatgattttgaataaatacttgatagaagtttttaacatactgtttatctcatttattttcttgaacccttttcttatggacagagagctgcaaatactggttggggtcatgaagaggatagaagttccaagtgggatcatgataatggtgctaaaaagggtggtacaagttttggccatcgaggagatttcaaacctgatgcggaagagaaaagttacagaggaaggggtgatggagatgcctcgtatggccgccctaaagagagagaaagagtggatagggaggatatggggccaaggtcaagagatgcttatgatatgaaggaacaaaagagatcaggacggtatgataatgcgcattctagaaggcacaatgatgaaattgattatataagggaggacaagggatccagaacacaagattgggagaaaaggaaggcagaatctagaagagatcgtaacgaccgggaggaaaaagatagggattcattaagaagggaagatcgccgtcgttaaaggggtagatagtggtatgcatactcaatggttttcagttttagctagtgtctgtggaaatgacctttgttctttccaagagagtcacctgtggttagataaactgcttcattctgtaacggcgattctatgtttgttgtgacacttgagacttgttgatttttccgtttggaatgaaagagtttgttatatccttttttgtttatttacagaattcttgctatctcattataccttttgttgttagtggctgtgttgacctgtggttacagactcaggttctacagggatgagtgattctggctctccttgtacttgtcatatggaaggattagtgcaacgcttgctgttcttgtcatatgcaaattaaagaggtaaactgcaaatattttcctttcaattcctaatgactttgtctataaaaaactgaacaaagaattgtgtataaattactgtatcatataatgagatttgaatttttcttctgctagatatgagtatgattaagatactttcgaattaaactattgggctattattttattgtattttgctgaaaaatatatagaagcaagttggtgtatatcgaaatcgttgatgtcatggtcactgctaagaacttgactaacatccctcagctacatttttataagaatggtcgttgctattagtgttaattaatcaaattttccttggtaaaactaaagtatatagtacttgataagcgtctgatagttgacttgggcgaaatgaagcagtgaataatgaggcaacatgagaataagtcattgctctattggactttgaccctaatagtcaacgaggattgagaataatctgcataccgcaggctgcaagccccgtggttttggaatatccttactttgtttgcgagtttctaaaaggctactatgctacatattcctcattattgcatagggaaccaaagccgcaggatttttatttgctcataatctcaacagtcatcctggttgtgaagaattttttgtctccgtttagtttaggaaaacaaaagcttttacaacccatggggtttccttgtattgttatgagactgattcttgtatctgctttacttgtctctgtgtcacttgaacattcagatatggtcggtgcacaaacaatcagattgacggaggagactgataaacaagcattgcttgaattcaagtctcaagtttctgaaacaagtagagttgtgttgggcttgtggaatgactccctgcctctctgtagctggaccggtgttaagtgtggcctcaaacacaggagagtaactggtgtggatcttggaggactgaaactaaccggtgtagtctctccctttgttggtaacctctcatttcttagatctttgaatcttgcagacaactttttccgtggtgccatccctttagaggttggaaacttgttcaggcttcaatatttgaacatgagcaataatttatttggaggggtgattccggttgttctgtcgaactgctttagcctgtcaacacttgatttatcatcaaatcatcttgaacaaggcgtgccttttgagtttggtcgctgtctaagc

SEQ ID NO: 15262 - DNA, 4682 bp, Arabidopsis thaliana landsberg
tcattctgaattgcagaataaagaaaagacttctcttttagaggaattgagcttgttcatggagaagctgaatgatgtatactacgacgatgatgatggtctgcttaacgatttccaagttgatactggaaccttgccatgtgtggcttgtggcgttcttggcttcccctttatgtctgtggtacagccttctgaaaaagcattaaaagatctctcagagagacaaggagagacaggtaacagatcagtttttatccaagctatgaactgcatcatatgccttttaaagtctattaattctgtttctattaactctacagatgctcaggaaattatgacactgtcatcagaaaagtctgactgcgaatggaaaacgtcttctagatatataagacctcgcattttctgcctcgaacacactattgaacttcagagactgctgcaatcaagaggtggattgaaattccttgttatttgccataaaggtttgtctgcatcatttgcgatactttttgataaattgttgaatagaagagagttatgatttttacacccccctggaaataaaaattatctaaaagtctgttgattgttgatattctgttaacctttttctaaaattgttgcagactttcaaaaattcaaggcacatgcggctatagtggcagaggaggtcaaagtccctttcagctatgatgatgtcctgttagagagtgcatctcaggaagagttgagtctaattgatcttgcaattgaagatgaagaaaaatacgaacacagtgttgactggacctcagaacttggcatcaatttacggtactgtgtgaaagtgaggaaaaattcccctactaagaaaattcagcatgcactgtcactaggtggcttgttctccgatacaagccagatgctagattttacaactatcagatggctgcagagaaaatcacgctcaaaagctaaacccagttctacctcaagtttcacaccttgtgaacatcttgaagtaaaagcagatggaaaattaagggataatttggattctcagaccggaaaaaaggaagaaaagatcatccagtactcgagaaagaaaaagttgaatccaaagccttcagcagaacaagttcaggagctagctaccctagctaaatcaaaagattttgataagacatgtaaaaattttagcagtaggtcacatctggatagtgcaattcgttctgagatgaacagtgagattggagactctggaagggtcattggggtatcattttccataaatccttgtagctcatctttcactgtgggacatgggcaagaacatcccgagatcactgtcaagtttggttcagatttagatgggaatgtcacaaatagtttgagtatggtgaatggagactctgctgacctaaccttaacctccatatccagagagcagcaccaaggacactctatgaccagcaataataatggctccaactcaggtagtcatgttgtggcaagccagaccatacttgtttctacaggtgataatcatgacggaccaagaaaattgtctggtgattatgtctgcagtgatgtgtctgttcgtggtattcacgaagcggttgaaatgagtgaccaagagtttggagaacctacgtctactgtcactaatattgaggatgaacagcaatcacagattgtgaaaccaacccatagagaagctgtatttggtgatcacgaacaggtggagggagcagaagctgtgtctaccagagaaaacttgtgctctgaaataattctgcacactgagcattcttcagctcatgtgggtatggaaattcctgacataaacacggccagtgagaacttagttgttgacatgacccatgatggtgaacctttggaaagtagcgatatattaagttcgagcaatggtgatgaagcttcttcaaatggattgcaagttctaaatgatgagcttagcatggagagtgaagtttcaagctcagaaaacaccgaagttattgaggctcccaattctatgggagaagcaaagaagaagcggaaaatagaatcagagtctgagacaaatgataatccagagagtagcattggtttcataaggagtccttgtgaagggttgaggtcaaggggcaagaggaaagcaacatgtgaaacttcattaaagcacactgaaacgagtgatgaagagaagaaacccattgcgaaaaggctgaagaaaacaccaaaggcttgctcagggagtcgtcagcaagaagtccccacgacaactcaccccaaccgttgttacctagagggatgcaagatgacttttgagagtaaagcgaaattacaaactcacaagagaaaccgttgcactcacgaagggtgtggaaagaaattcagggctcacaaatatctggtgcttcatcaacgtgtgcataaggatgaaagacctttcgagtgctcttggaaaggatgttcaatgactttcaaatggcaatgggcgaggacagaacatttgcgtctgcacacgggagagcgaccatacatatgcaaggtcgatggatgtggattgtcgtttaggtttgtatctgactatagtcgccacagacgtaaaaccatgcactatgtcacatagaaaaaacggcactgaatgcttaaaaatggtggctgaacaaagtgaaatggcctctctttggaatcgagagttgttgtaacatgtaatatctggttggtttttttagttcttttctagtggtttagaccgttgctatatctctttatgtagtatagatgtgacttctttccacttttgagaaggcctcgcactcttgtttagattcgttgttaaacttgtaacgattggattcaaaatgttaatacgcatgactcacccatttaatcccagatctcttcttaggttcattgcctacagacttgttgcagcagttcccaaacggtttaacaaaaagtattcttgttttctcccaggtcacaaatatcagtcttttacggaaatgtgttataattggaaacttaagttttgagcttttggttacgtgagaagtattgtaatgtgtcaattggaattgaggaacacgtgtattaaaaaaatagaatctatgtcagatgttgtagttacgtatacgtgagttaatcattatcccaattcttacttgtattgtaaattccatagagggttttattatctaacgatatagattacgcatcttattaaaatcacaacataatgctgccagtaacgatatcttttacgtatcatcattattatttttatttatttttcaaaaaatgaaataatattttatctctgctaatgtaaaccaacaaaaatggaggaatagttgaacttggataagatgaattgaggtatgaaaaaacaaaataaggtaatggaactggtacctaagcgtgacaacgactcctaataaggtagtaataccaaatacgataacacacataccaattgaagtaatatgtgcaactattacctagtcatcaattgacaaatggtgtaatggtattatttaatttactttcaaattatttaattttgttccataaaattgaatattttatttctgactgaaaacaaaaaaatattacatatacagtaattcataattatttgaatgtaaattagaagaaaatagaaataaatttattcaatttacatgtactgataaacatatcagttaaagaaaagtgtgattgtaggaatagaaaaacaaattctttggtaattttaattttatgattttgttttttacttgtcaaaaatcaaaaatatctgaaaggaattaaataaagcgtgatctaatcgttaaaaaagtgggagacacgtggacaaataagggaggctattggggaaatagcggggttttaggattgtctttagcaaccgacctccgatattaacccgacgacggtgtgaaacggcgttaatgttataaatatatatctgccggctctttttctttttttcaacggctgcgattttctctatctgattctgaccaaacccatcttctaaggttttctctttctttcacttttttttctcttctccgttcccaaaaattttcatcaaaagtttcagcgatctccaagttcccgaggttggttggttttccaaattccctttcttttcatttgatcaattcgttttgaaaaggtcaatgatttgttatcaaatattattatgttgttgaatttgttccgggttggtctccaagttgatgtaagagagaggttgttaatgatcatgcgttcctcgtttccatcttttgcaggaaactcacaattctaaacgcaagagcaagccaaaaacgcatttttggttgtttctgttttataaagtttgagaatttgaataaatggggtatgagcctgatccagatgctcttaggtggggtcttcatgatctggaggtttgtacacttacaaatgctggttcttgctctagtgtaacaaggtatgagtctggtggtggtggtactcaaggctatgttagagaaggttacaatcagcctgtgactggttatgttgacaatgatgcggtgattgctcagttttatcaagacgaattgtctagagttgctcgagccgaagcatcggggatcaatagtcttagtcctactcgtgttgttgcacaagactggcctcatcctcatcaaggt

SEQ ID NO: 15263 - DNA, 458 bp, Arabidopsis thaliana landsberg
  unsure (1)..(458): unsure at all n locations
tataaactaagaacttgcttaatcatttgtccataattttatggttattccacctcttaacaagctctcttagcatatcttcatcatgcctctcccttaaagacggcaacaccttaaccacacataaaaaagagactatattacatcttttgcgttaaagttaagaaaaacaaacatgttttcttcacacattgatatttnngngcacgatatctaagaaactaacccaaatgaaaagttttggtactaaccgtttggatagtataatcttcaattactttacgatacttttcataaagctgctgtgaataatcggatctctggacacacatatcgtagataatcctgtgaatcacataagaaattactgtggtaggtacaaaactgttaacaaacgttacataagaccacaaacattacttacgtgtaaagtttaaaacattcactaaaataaaatg

SEQ ID NO: 15264 - DNA, 4210 bp, Arabidopsis thaliana landsberg
  unsure (1)..(4210): unsure at all n locations
gaccatcactatcagagtctgtttcaatattcatcgtccttttctttttacttgcagattgtttcaaagtcccaaagttattcttaaaattttggtaaatttcctgaccactcaatattctcctcttcctgccattttcagctttcccatcaaaccaagacttcttcattctgaaatgatgtgttggttgcagaccctttctgtggcacatgtaaacatgttttctgctgaacttcaaccacatgatatctgtatttttcccacatagaggacatcccatttttccttttactttgcagccagctagattcccgtaagcagggaaatcactaatcgtccaaagcaacattgccttcagattaaatgttgatttactgtaagagtcatatgtcaattccccattgtcccacaggtggcatagatcctctagaagaggttctaagtagacgtcaatgttattaccaggttgttgtgcaccaggaattagcaaagtcaacatgatgttctccttcttcatgcataaatcaggaggcagattgtagttaactaacaaaacaggccaacaactatatctagcgttcttcattttgaatgaattaaatccatctgtagaaagcccaagcctcaggttcctttcgtcagctacaaatgacgggtatttggcattcatctgatcccatgttactgaatctacaaggtgatggagttttccatcgctgctttgttgctaaagtgtcaccttaaattcttagccatttcttcagacctaaacattctgttaaggcgcgggattatcggaaagtaccttaatactttctgtgggacacctttctttatttcactagtgtgcaagttagttttccatcttgaagcgttgcatttaggacaactgtcaagcttcttgtaattctttctgaataggcagcagtcattgacacatgcatggatcttctggtaacccatatcaaaagatttcaaaaacttcttcacctcatacattgatgtgcctttggcaacatctccaacaatatctctagaagatcattgaagctcttgtcagaccacccgttttttgtcttaagtctaaacaaagatacaatagccgacagcttgctatggttcacacaacttggatacaacggtgtttcagcatttgcaagctttgcaaggaactcatcttctttcttgtcatcacactctggaatctcactcaagccaaccttataagcaaactcttcatccaaaaattcagcagcttgatataacccaagtacctcatcattccactgactcactttggtatcactctcagccctagagtttgattccccatgatgataccagtcacaccgcttcttatatgcctcatctattccccttgttacaagatgatcaacaacaacagaggttgaatgacgatctaaacagcgataatcaatgcagggacatataatcatatctacgtctcccagagctgcatccacatctcgtacaaactttgtagcccctctctcataagcaggctcaacttttcagagaagagttaaagggtaataaaaaaatcaatatatgatcaactcttcagtgaaaagttaaaaggagaataaaaagagaggtaagatctccagattttcctactgaaaatcttacctgcaaagatgcacccaatccttgtccaccattataaattgaaaacgtgttttaaaacctttaataccaaaagaatgattccagattatatgaaagactcttgaaacatatctaaatcactttatatttagccgcaaactcatattcactatgatgttcaagacaaaaaccgagagtgatgttcaagacaaaaagaaacagtaatgttcaatacacaaagccacagtgatgttcaagacaaaaagaaatagtgatgttcaagacaaaaaactacagtgatgttcaagacaaaaaagaaacagtaatgttcaatacacaaagccacaatgatgttcaagacaaaagaaacagtaatgttcaatacacaaagccacagttattttcacgacaaaaaaaaatagtaatgttcaatacacgaagccacagtgatgttctagacaaaacaaaacagtcatgttcaatacacaaagccacagtgatgttcaagacaaaaagaaacaatcatgttcaatacacaaagccatagtgatgttcaagacaaaaagaaacaatcatgttcaatacacaaagccacaatgatgttcaagacaaaaagaaacagtggtgatcaagatgatactaacatgtcgcataataagagccaaatatcagcttcacattcccattatttacacagcaacacttgcaaaaacaaaaaatagaatgagtatatctagtttcatgtgtttgtttatgcaagaatgtgtttgacaagttgtggaaatattctaaagattcagagaccatgtcattacaagcactaaaagatccaaagattcaaaggttatagctccttatcacgagcctcttcgatttctcctttgttataatgttgatgcatgattgataacacggtttttagcccgttttagctattgtttttttttatgtttcaaagagcatttggtgccatttgtaagtgtcaaaactcgcacaatagaatttattttaagggtttcttcaaagaacggatctttgtgagattctcaaagaacaacacaattctcaattaccgctgacggtgttcttgattgtattaatgagaaagtaatgatttgatcgtacaagtgtgctagaatatgaaaataagtgtttcttccttcaaagtcagagcgtttttgatagcctgaagttgagagcgttttagtgtatgtcctctttatttgtcctctgaggtgctttttatagagttcgagaatatcacctctcgcgatattctcggaagatttctctttatctttatcttgttgaaggagattgcccttatcttccgaagattctgggactttctgtatccggtgatatctttgaagataatctcttccggggttttcagagatgatgtgttttgaacttataccggctaagtcttttgaagttttcctcgtctaacccgagactcttccgagccgtgattaagctggcctcgggtcgtgcttgggatgctcggtccacggtatttgaggacagattcccgaggtgtcttggagcccgcctcgggacgatttgccgggttttatgcccgaggcgtttcgaggtcgggtcaggggaccatttcatgagactgctccgaagcattctcgacatcgcctcggtgtggattcttgacgagatctccgaggcgttttgtggcccggttcgggataactcatcgatgtctctcgaggcgttgaggtgtggttggctcgctatcctgggtggaatccgaccccaacaccattctagagccaataagaggagaaacacgtattctaggtgccaagaaggttttaaaagttttgaagctaaaagcatcaaaaggcgatcattctagtacttgagaagtttagcatccggccgaagtctttcccatcacggcaaccagatattttggtatgtatcgaaagctagaagagtcaagattaacgtcgaagtcgaatcgaagcaatccatgaagccgtttggaagatatgacccaaagagtgaagacatgtcaagaaccggccgtttggaaataataagtccaaaaagtatccggccaaggagacttgaacccgggcagctccgagaagctcaccactgaccactaggtcacgcccaagtgcttcccgacttgcgccaccgtcattaggctccttcattaaagcccactactcggcccgatcacttacttatccggcggaatgacaatcttacccctaaacctaattcttggcactcaagtataaatacttgttctaagccctaaccctaggtgtgccttcatcacaagcaaaccctagccatctccgagagctgcccactcgccgtcgcacctcttgaagcttgaagaacaccatctctctctttctctttctcgtttatgtgtaagactctttaaggtgaagctnnnnnnnnnnnnnnnnnnnnnnnnnnnnnnnnntctaaaccctttttaagttttactcatctatttgttatggtttcacccaacttttgattagtccttttgcatgacgagtagattctagttgggttgagggggttcaaaggggaatcattg

SEQ ID NO: 15265 - DNA, 1303 bp, Arabidopsis thaliana landsberg
  unsure (1)..(1303): unsure at all n locations
caacatagttttcgataactctattgttaatcactaagttcttttcaattaatcaagtaatcgcctatctctttagtgggtaatttgtcccctatcattatacctcgatacctctgatactcttgtgttagttgaatctgttcctatctctttagtggataattcgtcctctataattagacctttgactttatcaatcattgtgatgggttgaggatccataatgagtgggctatcaggatcagagtaaaagtgtactagtgtttcgtcacctacagttaaaagttaaaaagattgaataattgttaatagcgcataagataattatcggataatatatgaatgattagataactcacctatgaccgataagctattgttggtcgatgagtcagtatcatccattaggtcttcgctacaaaaagaaatgcttgtggaaagcgaggttagcgttccgaaggttgaatcgctagaagatagagcaccacttttgccccaacaacatgtgtttatgcacttgcaagagtcaggcgcaaattttcatttggatctctttttgcctaatggccacttccgaaatctagggccctcgctgttttctctttgccgcacactttttgttgtattagtttgagttcctcacaaggtcatttgtgttacacacatatctcgccacgtttctttttgttgatttgttcgccacatctcaaataaacaatctctttccctctcctcgtcatcaataactttctcttttcctttcaagcttgtacttgcccctggttgtgttacttttgctggtagtcccagctgtaatatcaatgttgtctcttatgataacccatgcatacgtgttgtgttgctccttgcctttacgtatgtcaatctcgttgttctccccatggttgccatatcgtctacgttacctgaaatataaatactattcgcagatatctaatttatctgctaatgatccatttactcaagactgtagttatcagtttcacctgaaaggttccgcagcaacattgttgttagtgtagtcccccatacagctcttgtttctacactattccagtatttatccgatatttcttttgaactcaaaccgcttagattcatgttactctggtgactattaacgtttcgaacattcacacctcgtataatttttaccgcagatgcacttcatctagatccgcccnnnnnnnnnnnnnnnnnntcatgtcttagtcatctaatatatcgattaggtttacacgttttcagtcatggcccattatccactgcggccactaatacg

SEQ ID NO: 15266 - DNA, 2275 bp, Arabidopsis thaliana landsberg
atatttatatattatatattgtttgttctcaaggcaaatcctctgtggtttttaagaacctttctttctccagtggaattcaagttggacagattaagtgttaaaaggatgcattatttttgcaaggtaaattactctctttacaaagaaaaagcctctagattctgttttagaaaatggtcttgctcaggtcctgaaactatatatgtattttgcaatagttacctctagtccatatatgaatttctaaacgaaagatgaaaaaaacataacaacaagcaagcaactaaattcttacaaaacggtatgatgaatttcgtttttcttacactttttctcctcatttcttattcatcatgtccgctcttcacaaaagctaaaagaaattatgaaaaagattctttacctggggaacacattgaaccaaggaactgcaaggggtaagtattatttatgttattcttgttctacatctttttgcacaagacattgctagttgttttgtctgtacggataacctttgtggttgatatgatccttgctttgctttctgcaggcgctgctgttggattcaagttggacagtttatcgaaattaagtgatacacgtgctgctaacagcaagatgactctcatgcattatctttgcaaggtaaatgacaatcaaaaagagcaggatctagtttctgatgaaggttattataaaaactggtctggatcaggagagatacataatcctgaaactctcatctttctttttccaggtccttgcttcaaaggcatcagttctactggacttccccaaggatcttgaaagtcttgaatcagcctcgaaggtttgcagttgttcatttctcgtcctctactccttattttctattggctcatcatttgatcgtcctgtctattgcagatacaattgaagtctctggctgaggaaatgcaagctataatcaaaggattggaaaaactgaaccaggagctcactgcatccgaaagtgatggtcctgtttctgatgttttccgtaaagtatgttgggttttttaattttccttttgcatatcttatctatcatgaaattgagattagttccatgattgtgccacattactaaatctgtatcactttgtaaaatcatcaataacccgctggaaaataattcttcagttgggttttgtttatagagttaatttcttcctgatcctaaaacctacttttatgctttgataacagacattgggggacttcatatccgttgctgagactgaagtggcaactgtatcgagtctttactcggtcgtggtaatttgtcaacctctactagattccaagcgcctttaccttgacaatgtggttgatcctgaaaatgatttttgtgttgtatcttatgttggacggcagggaagaaatgctgatgctcttgctcactatattggggaggatcgtaactgttgtccatttgaacaaggtatgacgaggaatctataaacttaaatcctctagggcaatacatagaaaaataaaaagtccctaatcgttatttagttggaagtgttatgtagctaacaataataccgggtaatggactgctgcagttactgcaaccctcttgaattttataaggttgtttaagaaagcacacgaagagaatgtcaagcaagcggagctagagaagaagaaagctcttaaggaagcggaaatggagaaggcaaaaggagtcaacctcacaaagaaaccagttgatgatagctgacgaaaaacttaagtatcaatttgcaaaatccgcctcaacctctcaagagaactgagctagtcttgtaagccagcaaagaggcggtggtgctgttcaagtaaacctttccgcaaagcggcattggatgcttagtgcggttaaaaaaacaggctcgggtcctatggggagcggtttcgcctggcgggggctatcgaggaaccatcgaaagattaagagacaggtcttttcgccactcacgtttaacatgattgactccacattgatttaattctaacttgtaaattagaattctttcctgttttttatttcctgattagaggaatttttgatagattggaatgttgtataggtttcaggtagagagagtgagagatgtagagcattttgtctatttagtgtgtaactttgtataccttaacatcaatgttctttttaggattcagttcagacaatgagacggcacgtgtgataaactaattaatacaaaagaaaattgcgcgagaaaatgagatggcacgtgtg

SEQ ID NO: 15267 - DNA, 1791 bp, Arabidopsis thaliana landsberg
cttttaggattaaacatgcagtggtctttctttaaaaaaagtcaagcttgaactataaatagattagatttatccttgatgctacataaaggcttgcagatttatctgtgcaaacaagcatttatatcactctgcctccaagtgatggacgagctcatccaatgcattgtatgaagagcctccacttctaacagaggcattgagcatctctattagaacaagggctctctacctcattcctacaccttcatcatccacaatcaacctattcacagctctctctacacctgctctctccacttgtccttgcagcagaacccctactctccaaacactttctatatacattgcgtttaactgctgctcaccgttaaaaggtctgcaaattattggaactccttcttcaatgctctcgagtattgagttccatccacaatggctccagaagccgcccattgcaggatgtccaagtacttctatctggggtgctcgtttcacaatgtatcctctcagagaccattttattgacatcctctggcaatgactctattccgttagtgccaaggatagaacccgctcggataacccataggaatggttggttgctattacacaacccccaagccatctccaaaacttccttggtttccaattgaccaagtgtccctatgcttatgtatatgactgaccttggtttctgcttgttcagccattcaatgcagctcctgtcctcttcaagtaaactagaaggtggtgaagttgtaatgtgaagagggcctaatggatacacagaaattcctactttttgttccagccatgacagagacgagctctctagacaacttgacgtattgattataacagcggaagctgttcttttgttgacaacttcggcacaaatctccaaaaatcgctctagcggccccattcctgaagttggtaagtctttgtattttagtggatgtaaattttccaccaccttgttttgcacttcaggatctgtaaagtagaagacctatgcatgagtgaaagaactgtttcggaatgggtaataagttacattttgtaccttccatgtcgatcaagaacttctcggcgttgagtttgcttaaaatacaagaacaaacatgatttgtagcactaccagtggtgaatatgacactaggaatccttaaatccttagctgtagcttcagagaagtacatgagctcgtcgtaaatgatacaagcaatatcattgccttgttgcagcaacaaatgagctatacagtccttgaaacttgtctcgcttgttttgttgagattcataagatactcagctggtcctagttttttagattcaagttgaggtaagctttctggtatggtggcaaagtcaaacccaggaaagtgttgcaatgttgagcctatttgattgaactgtctgtgagcagcagtaattaaaaagccctttgattgaagggctttcccaaccggcatcattggggttacatgtccttgtgcagcaaccggaactaacacaatccttcttttctctgcccttttctccatttctctcctcttttctcttctcttgtctctgaatcctatacgtgattccaaagaaatagctagaatctcacaatcttccgaatgagatcattttctatagtcagctgttcatttttcgaagcagagaataatcgcgcgccaatggctattctgcatagtcttctgggtgagaaaataaaaaccgcgaggtcgacttctttagctgttaagataaaggtggacacatcacttacgtggtaac

SEQ ID NO: 15268 - DNA, 1010 bp, Arabidopsis thaliana landsberg
tcgacaaaggatttttgaaatatttttgtacctgacattacaaagtctaatgggtcttaattccgtcattcgattcggtcgtttcgtttttgggatcaagcatatattagtcgtatttaaccgtttatcaaaaactccatcttgtaaaaaagagttaaccagaaaaagcatatccatttttatggtagcccatgctttttgaaagaataacgttgtgataccatcaggccctggtgctttttccgggtgcaccaaaaacaaagccgctctcacctcatcttctgtagcaggtgccgttaggaagtcatttatttgatccgttattaaagttttaacctatgataaagattccgcaatatcctggggattcgacgtattaaacaaagtctcaaaataagacatcgctatatgttggatatctttatcctctgtagaccattttccattttcatcatgaagtcccgggatccgattcctagcccgtctctgttttgttagagcatggaaatattttgagttattatccccaaccttcatccataaactcctacttttctagtaccaatattgttcttcatctatataggcctctttcaaccgtattgttaaatccgttatctcctcacttgttctcgaatcatctttctgtgccgcatctaactcagatttcaattcctcgattgtttttctcccgtaaggaggtaagtctttccgccatttggaaatagcccgtctacaactaattattttttcaataatattaccctctcctgaaccattatcaaggttccaaccattggaaatagcctctagtaaaccttctttaccaatccatctcttatcaaaccgaaagttgtgcttcccacgtggtatcttatccacaatagtagctatcactgatgtatgatctgaagctaacatcggtaaatattcaatgaacaagttgcagaataattcatgccaatcttcattagctaaagctctatccaaccgacaccttattggttttt

SEQ ID NO: 15269 - DNA, 1062 bp, Arabidopsis thaliana landsberg
  unsure (1)..(1062): unsure at all n locations
ctccccaccaccgccaacctactctccatccccaaaggttgagtacaaatctcctccaccaccgtacgtctacagctccccaccaccaccaacctattccccatccccaaaggttgaatacaaatctcctccaccaccgtacgtctacagctccccaccaccaccaacctactccccatctcctaaggttgagtacaagtctcctccacccccgtacgtctacagctctccaccaccaccatactagtcaccgtccccaaaggtagagtagaagtctcctccacccccgtacgtctacagctcaccaccaccaccatactactcaccttcccctaaggtagagtacaaatctcccccaccaccgtacgtctacagctcaccaccaccaccatactactcaccttcccctaaagtagactacaaatctcctccaccaccgtacgtgtatagctcaccaccaccaccatactactcaccttccccgaaggtagactacaaatctcccccaccaccgtatgtctacagctcacccccaccaccatactactcacctgcccctaaggtagattacaaatctccaccaccaccatacgtctatagttcaccaccaccaccatactactcaccttcccctaaggttgactacaaatctcctccaccaccatatgtctacagttctccaccaccaccatcatactcaccttctccaaaaactgagtactaagcttcacattcaccttcgtattacttgaaattgtaatgagattcttatataagctaccaagttttatttcatttcatctttgcttttgttcttcatgatattcatatctaataaattttaattctgcctatttgattaaatattttgcttcaaaatcttcaaatggtttaatgcttttacttttatttgttttaagtttgcttgcaatctatatgaagttctctgcacatttgaattacgtagttcacattcttgactntgtagctntagataattatgtaatcttataacatgggacatgtttatggactgcatacctaaatgcatggattttttta

SEQ ID NO: 15270 - DNA, 1202 bp, Arabidopsis thaliana landsberg
tgaaataaaatataaaacatgagacattatagaaatacatatcgaatgtggattgcattattcacatagtttattatatgaacttaaatattaaaacatagtagttagatacatttataccttcgtcttggcaggaagcaataattccagcacaatgtgacagcgattacaggattctgtgaacagtgtcggggtactgttcacctatttataggcacagggtgcagcctgtgtaaaattacatttatgccctttacaatcaactacaataatgacacaaaacatcatgggtctttaagtcaatccatctttaagtcggttcggcccttcgtcttgagatttgtcattatgccgaagctctataggtagtagcttcggcgcttgctcctgagaggatccttcgaaggtgttctctttctttaggaccttcggcgacgaagcagacccccaacagtagccccttcgcggtgctagatcgtttttcgtaacgagcttgatccgtgaaaaattctcctagtcttcggaatgccgaagtccaaaaaacaccttccctgagctcgttgccgagaaacgattaaaatattccgagcgcgaggtggccccactatgcgcgatctggcgattcatctcccacgcgacgtggtccaacgttcagcgggtgcgggcgactgttcagcgggtgtgggcgacttgacgatttaccttcacacctgcagcactatataaacagacgggtaggtgtgaagttaccacagcattcattgctattgtactattttgctgccaaatttttagtcatagccgaagcttgatcattgcgctcatacaaaatttgcttcagcgcaagtggaagagcttcggaaaagacaaaaagtcaattcaaaaaatttcaagtaaatcataatcaaatggctagagttcgctctactgcaagagttgatcgcaagggagacgaaaccgaagttgtggaaaccgttcctatttcagaagcaatgaagcgatctgggttggtggcaccggaagacgtccctgctgctgaagcagagcaagcagatattgaagagaccgattctgaagatgattacaacatcgcagtaccaagcaaacctagccacctggacttcggaaagtcgaccatctccaaagctgattttcctaagatggtgaagtcaggctactttagcgaagataagaaagagctg

SEQ ID NO: 15271 - DNA, 492 bp, Arabidopsis thaliana landsberg
aatcagaaggtttattattttttaagatcataagatttataaggttttacaagatgtttatacacatctaaagatttgttgtgtttgcgtttataaggttacgcacatatttggatatatttggatagaatttaaatttttaggacttttatttataaggttttagaaagagatatttttaaaaagtggtatttaaaaaaaaaaatatttttgaaatttcctctataaagatcactctcattaaatttagaaggtttataattttataaggtttgattggctaaagaagctttacctatctaataatagatccaacaattcaacaccacgtctcgtggctagaggaattagatcatgggcaatatatgaactggtctaattaaccaaaggcattaagatcaattaaagatagatgactagacaattaaatatcataagatagaattacatataaggttttaataaaaacatcaccgttgaaatccctaaact

SEQ ID NO: 15272 - DNA, 1030 bp, Arabidopsis thaliana landsberg
gactgactataagaaattgtcttctcttacagataattagtgtctggcttcagactcttcatcaggttttataaacaaagaaaaaacagaaagaaaaggagaagaataaatttcggttatgcctcattcggttatcttcttttacgccttcctaacttccttacaattaagcttgagtactcttcttacattttacaaaaccctttagtttaaatggttgattagtaggccaaaatccattactgaacgtgtaacaaacgctgtgaaagtcacagacttactcgtcaagaagaagttatggctcttttcgctctctctttcattgtgccttcatcgaaagcttgagttacgttcttccacagtgcaacaagaccgtttactttgactttgaattttggtccgtcactcttcacaaaaccatgcatcctctgtttcaggctaatctattggattcccagcgactaaaacttaaatcgaggaaaaaccattatgtcttcttgggcctctttcatcttccttttcaattttcctttctcactagcttcagagtttttgctcaagatcctacttacagataccacagctgtcccaatacgacaattttctccagagacagcgcttacttctctaaccttcaaacccttctgtcctttctctcttccccctccgcctcatactccactggattccaaaacgccacggcaggaaaacaccccgacagggtaacaggacttttcaattgccgtggagatgtctcaccggaagtttgccgtagatgcgtctcttttgccgtcaacgaaacctcaactcggtgtcctaacgagaaagaagtcacactctattacgatcagtgtacactcagatactctaaccggaatatcctctcaacttctaataccaatggaggaattatcttggctaacagtcagaatatgacatctaacgaacaagcccggttcaaagatttggttttaaccacgatgaaccaagccaccatcgcagctgcaacagttccaaaagattcgacgcg

SEQ ID NO: 15273 - DNA, 954 bp, Arabidopsis thaliana landsberg
gactgtccggtgtgccagtggagcaacggctcagcacaaaggtcgactccaacgaaaacctgaaaagcgctacagtgcacggacagttcgcgcagagtgagagcaggcgccagaagcgaccggacagtgaacagtacctgtctggtgcaccaccggactgtccggtggcccaggctgtcagagctccaacggtcgaactctaacggttcggtgacgtggctggtgcaccggactgtcggtgaccatcgacagcagcccaaccccaacggttggtttggtggttggggctataaatacccccaaccaccaccacttcaaagcatccaagttttcagccattgcattcaatacaagagctctagacttcaatacaagacacaaacaagagatcaaatcctctcccaagtcccaatttcactcaaagcaattagtggctagtgagagagagatttgcccgtgttctttgagctcttgtgcttggatcgcttttcttcttcatttcttgttctcaacatctttgtaatcaaagcaagagacaccaattgtgtggtggtccttgtgtggactaagtgtaccaattgattgaggagaaaagctcactcggtctaggtgaccgtttgagagagggaaaggggtgaaagagaatcattctttgtgaccacctcaacgaggagtaggtttgcaagaaccgaaccttggtaaaacaaatcaccgtgtcatccgccttatttgcttgtgatttgtttttcgccctctctttcggactcgactctatttctaacgctaactccgacttgtagttgtgcttaaagattataaatttcagatttgtctattcacccccctctaggcgactttcaatttatatgatataaaaaaacgtagcaaagcacaagcaactggctagttatcatttaagcggacgggatctccgatgagtatttatccctgtgg

SEQ ID NO: 15274 - DNA, 1910 bp, Arabidopsis thaliana landsberg
aagatttaaacacattttcttaagagaatgattcaataaaatcaacagaagaaaaagttttcttctaatctgttcccgttaactaggatacttgttgtagatgaacaagtagtgtaaatttttattctgaaactcataagtaacaaagtaatagaaaagttgaaaagatcgttaacaagatcaagaatcaccttttactttacctgatggcccataacaataggtgcattctgaagtatgaaatgcaagaaaccttcagctctcttaagattctgagtaagctcttggaccggtgctgactgactctccatagttttcaaactctcactcagcttctccatcaatcgcctttctctctcagtactcgcctcaagcattttctcaagactcaacgccttctgtttccaatatgcaacagtgtcaaactcctcatagatctcaatcttcttgctatcgaccaaggcatctcgttttttctgcctaaacctgcggaacaaatcactcgtctcatccaaaaccggaacattctcaggctcgttgctctcaaacttatactcctcaatgatcttcaactctttagcctcagcttcttctctctgtctatcgagattctttagctcttcttttaacagccgaaccgcgttgtcttgcatatactcccattgtttcacaaggttggttagttgagaggagccttgatgagtcgaattcaataggtttggtaaccgtgtcatatccgcaatggtccgtgtctcgatagtaacttctttcaacgtgtctaaatctccggcaggtttctcgacgttgaactgtttgtcagcttcagttccaacatcttcgggccacatcgaagacaaaacttcgacatccatttcctcaatctgatcagtctccatttcacagaccattgatcaaggtttctcttcatacaacaacagcaacacaatggaccagacaaatctcaaaattcaaacaacttttttctttaagccagaaccttgatctgaataaagaacctgtatagatattttcaaacacagaggttagagtcaggacaaaccatctccatcagagaatcttgatctgtaaaatgtgaaaaataatgaactaaaatagaattttgcaaagggtccacaacaactaagtgtgtggaccaattatgaatgaacattagcgggaaacttcaaattatatgattcgagcttaaaaatcagaaatttgcagagcttcaaaaagaaaactgtatcagtttcttttttcagattgaattatcaactaggatcataaaattcaccaataaacgataaaatctgaaaataaatttaaacgatgaaacttttttttgagcgatgatcggaaaaaatatatggaaagaaaaaaatctttggtgatttattcttgacatcagtgatcatatattataaacgaaaatcttgcattgagaaacataaagaaattgtaatcatgaagtctcgagatgcaaaaggctgaaacagaaagaaatgaaaaaaacgaaagacaaagcagaggaacgagtatgccggaggaaaggggaagggatcagaagctttaccttctccgactccggtcaccggaaaaatgaagaagaagaaggagagaaagaaggagtgagtagatctgaagaagagtcgtggtcgtcgggagtagagtaaataaacttcaaatgagcattgggaagagaatagccaatgaagaaagagagaggagcatgtgaatgaattgtgaaagattggtaattttttttaccgggaagagaaagagagagagagagagagaggacatgtgcttgctcatgagacagagaggtcaatgtatattatattcatctgttctcttctcttctgttctctctctttctcacattgtaaagttggacatattttaatggc

SEQ ID NO: 15275 - DNA, 3005 bp, Arabidopsis thaliana landsberg
ctgatgattaccatgaatttgcttaacactcacgaaaagagcgaaatttgggttttacggttttaccaatattcctgaagggttacttaactaacacaccctgaaggttataagtacctaaagttgcaaattttctgggcaaaatgttttcttttaaacctagcagatgttgtagttcatcgatatgttccaaatctaactatatgatgcaaatcacactgcctatatgtaattcagccacaacatcagatcgacgttaaaaaaagaagagaactcaatgccttaaaataccaaatctgattaagcataataaagtatcaaccaacccacaaaaaccgacagaatataaagagtatctcctcaatgttaaagggtcgacgaaaaacaaaagaggaaccaaacccagagaagagtaaacaaaagttcgttggttctccatcaaaagcatataaactcagctatcgtgtggactggaccatgttccatcaacagaagaacatggaggttgaaacattattgtgcagctgcggcataggtggcacagggactgttccaggtgtggtgatccctccatggctcgaagaagtctcagacaactcttcatacttcatcacagttcccatctgtgcagctgccaaatgagcgtaacatacaggtgcaactgcaaacaaacataaagaaacttgagaattgagatattgcacataatgttgtagctatcagcagcaacgcataaaagatgtgagactaaccgactgagatcgcagtggtgctcctctggtagctacaagaatcaaagcaaacaatttgaagattattgtcaaaagtttagtagacattgtaattccacaaagatacctatcagattaagagttaaaagtgatataattcttacacataggacagagaatgcacaagttcttggaggtcgtctgtggcaaacccaatctcgtcatacagaacatggtaatgtgttggccttgtagttccctaacacatccaaaatcaatatagaaaactgttaagttggatttatatagtaactaagtggtcaaagtatttctgcaggagctataacttacaatcatgccagcatgggcgcagagatagaaatcaaagttgcgtgggtgacagatctggctgtcaatgattgttcctgcaggcaaaagccaggtttcaggtcattttaaacacaaaataatgaccaacagaaaatcatgcatttgtcaaatggattttacctggaggaacattatcagggcctcgagactggaagaactttgtgtgatggttcttctgggcaactatcactgtaaacttcggatgccacgtatcatcaagaaacttgcatgcctaataaagtaacaaaaaaagagatcagggcaactatcactgtaaacttcggatgccacgtatcatcaagaaacttgcatgcctaataaagtaacaaaaaaagagatcaggcaggcccaaagatatccaagatatactaaataaaacgtctttgtgtcactaaaagctctgaagctctagaactataatccatacctgcatcatctgatccaattcaatattaagaacttgattgaactgagactcgcttacaccatccctacatgtatattagtaacagtgagttaacaaattggagtatattattttacatgataccttaatagatttaagtatacctgaaaataatgatgtgctctggtttccttttctctgaactgtagtaaaagtctaacaagagttccctgtaaacagtaggaaatctctaattacactgatgctgacatacctttttgtacaagtataaaagaatattgtaccattcacaaggccctaaaatagaattaagatgacaaaaacgctgcctatgaattttacctgaacattccttcgtctttgccattgacgggtttgaagagattatcaatcatttccattttgcgtgattgtgtgcgtacacatgccttatattttgagatgagtggccattgtcttgagctcacaacctacgatttccaacaaacaccaagttaccagagttgttgccaagaatgaacacacaacactaaatgagatcacacgaaaaattaacaaaacaaaatcagtattacagcagcaattgatggtatatcagactggccaggggaaccatgggatacatccatcccaacaatgatggtaggaacttgcgttacttttggcattgctggtgagcgctccatagctaacaacgaattcaatccaccaagctacatatacgaattataaatcatttcagctgtaagcttgtaagcttgtaaagtctttacaatcagtcttgaaattcgaattgaatgaatttacaacctccagctaccttggcatttatcttcaggagaacattggtgagatactgatcgttcagtctggtgggagcaatgcactgagtcacaattccaagatcaacaagattcttttttttccaagggcctaaaaaatttcagacacatgaaaagttaaacatttacattcaagggggaaaacaggccatattcaagaatgtaaagtgtgatgtgatgtaccataaacatcagagtttttcctttcagcgagtatgcaaagaaggaacaaaggcggctttgggagtttggattttatctgctcaaacatattctctactctcacagtagctggtgcattcctaaactgaggattctcgttgatgacatccttgaatggaggctctacattctgggataaaagggaaaaacaaaagggacgaattaaacggagttgtgcatatgattcgcttgtatagtaaccaatgaacctaaagaaggcttacaattcctctctcccgtccacatttactcaagtcacgaatacgtgtatttgtatcacagcgagcagcgaagttcccaacaacccatctagtaaccgtcgttggctcagcgagcgtctgcactagaattcaaccaaaaccagtcgaggataccacttctggcctggggcag

SEQ ID NO: 15276 - DNA, 608 bp, Arabidopsis thaliana landsberg
  unsure (1)..(608): unsure at all n locations
actggattttgtgaacgtaaatctagaatatacagaacaaagnnnnnnnnnnnnnnnnnnnnnnnnnnnnnnnnnnnnnnnnnnnnnnnnnnnnnnnnnnnnnnnnnnnnnnntcaatatcaaacatacataatttaaggctaatttaacacttaaaaccgaagtcattgagatatatggagtacctgaatcattcccttgcctttgatgctgtcacccatttcaaggctaagttctccttttgcaagtttctggccgtaccacgcattacgacctttcagtaatgttacataggtatccgcaagcaaaggcccagcgagtttctctggctccttggccaataaatgagtaataaaaatcatctctgaagtacaatgcgcaaagtacactgatttgctggtagcactttccttagtcagtgtagccaccattcctgtggaatacaaaaacgccaaaacaaacactagctcataaactttgacctctgatcaccagttccagtaatttactttgaatcactattattcagataaccatttaagacacctgatcttacctgcaccaatggcataaacattcttcaagccacccattacttcatgagtaat

SEQ ID NO: 15277 - DNA, 4241 bp, Arabidopsis thaliana landsberg
  unsure (1)..(4241): unsure at all n locations
atggcttagttatgcctgcgtcacgactgagttatgtcaaaatacaaagaaaaagattctttgttattgaccagatacgacgtcggttgtgaaagagtctccattattgaccagatacgacgtcgttgtgacataaatgaaagatctccacttataaatccccaaaatcaaaccctaagttagaaaaatccaatttctggtttcagatctggagcttcattctttcttatttttcttctctgaactccccagctatagctaaagaaatgagtagcaattctgagaactcgatttcgagtacgcaatccgtaagccgttggggacgtgggttaccatcgaagtgtcatcgtggattagacgtggtcatctatacatcaacgtcagcaaagaaccctgaaagaccatacttccgttgtcatacgcgtaaagatgtaagtataattgattttgggttttattggtttcattgttaactggctagtgattgaaaatgcaggaccatttgtttaaatgggtcgaagatggtacatacgaagtggttgtagacagttggcaaaattgtccaccatggacagggagataaacactgccaagtccgaggttgtagtcgagctagaagcattacaggtgatggtgaaagaactgaaggaagaagtaatgaggagctaaagggaaagccagaaatggcaattgatgatcaaactttgctgcttttgtcttggctttattatcattgtcattgtacttggtatcctaatgttcccaaaaaccaacgaacaaaagcttcttcttggctactagtttgtttgatgtttggatgatttgtttgctattggattccattatgtgtttgatgtttatcttgcttctagggttaatttgttttttttgtttaagtattaacttgtaatgaaatggtactttgtgttcggccaagttaatcgaatgttatgactgagttactataatgttattgctgagttaagctaatattatagctgagttaatccaacgatgtgactgagttatactggtaatgttgtggctgagttaatccaacgcaatgactaagttattataatgttgtgtctgagttaagctattgatacaactgagttattataatgttgtggttgagttaatcaattgatatggctgagttatttttgagttacgcttgaattatgataaaatttaacaagtgacatcaagcgataacaactgattttattgagaaggcgatcgtagataataggagatataaaaccattaccaaaaaaaaaaaaagagtaaaatactgagttcataggaatgagataaagggaagacaagtaagagatacaaaagcattcaagacatgaaaccgacatcatctgggccaaattcagtaaacatgtccaccaaatcattccaaattgttggcgtcatcgaccacggcttatctaaaccacacgcnnnnnnnnnnnnnnnnnnnnnnnnnnnnnnnnnnnncaacgttctagccaccaaattaaactgcgcccactcggtatatatatcctacaaagagaaaaaatagtaagaatttggtctatggtttactggaagtgctttaaaacaaaactcgatgcttaccgtgaggaaaaaaaccatcttgccttgaaaacaacgggaatcatccggtacgtcggccacgcatggtgaagttgcgctggagtatatctccaattgcgacagatagttggtgattgaatctgaaccacgtatcaacccatgtacccaagccagggtttagaactgggagattcgcccgatcaggagcagtgagtacggcttcgacatctttgataaattgtccgtcaatgtgaggaacaaccatgtcgtcaggaagagaggatgagacgtgtaaatgatgagatgaagtaacaaatatatagaaaaaaaaaaagacaggtaaaggaatacgaaaggttctgtgtccgaccgtttagcgggaaagttttctaggttacggctaagtttggcggcaaaatatattgttacggctgagttacactcaagacatgtaacaatgttacggctgagttgtcaataattataaaataaaacatttaaaggaatacgaaaggttgcatgtttggcgggaaagttttctaggttacggctgtgtttggcggcaaattgtactattacggatgagttaacccacattacggctgagttgtcaataaagcttgaagttccattcgatttactgactaacccgatttacggttatatccgacctaattaacaacggttcaatacgcctataaaaacggctgctcctataaacttgcgaaggctaaactctcacaaacagaagatcacaatcaaaatatttctttacttttcaaagactcggaatttcatcatggcgtatttcgacagcatttgcgacttgtctcctttcataactagctggacgatttgtgttatggttcttagaacgtacaaaaggttttatagagataacgcatttgaactacgggttgtctttgtcgatgagtgggtaatggaatcttcactcttcttacaagtcatacttaaccttattcgtatcttatttcctatatagctcaccctccaaatgttgttttcatagggaattcaaattgaagctataatcgaaagatatttttctcaatgttacttcgataagctcaaagagaatcaatggaaagaaatcgcaacttttcgtgtcattccaaacagtggaatagtccgagcaataacccactactacatgattgagttcatggaagcaacatcggtcataagttccgacccaaggggaactgcttttttaacagattcacacctactgactacattattgaagacaccgttcataccaatactttggtcggtaagtaatacgtttctaatgcatatttcatactttcacctttgacatgcctgtttttaacttttatttcatactcccagatttggttggtgcactcgtcgatatcggatgtatgagaaatacctcacacaatggtgtcgagattgacggattcagacttcccttcaagattatggacaaatagtaccatttctttcgatcaattccttttaaatttctttcttttcatcatgtatttttcttgagaggggtataattgtaacattgttttatctgtttcagcaaagagagattgaaatgtgaggctgttggctaaatggtggttgactttgatagcaggtttcgatcttttcgcaatgacaatattgttattgcactcacttggtggaggatcgttaggtatcatactggccccaaacacatgaagatttttcaattattcgaccatatcagatgtgactatcgaacccaatattgaagaagtgcaagagataaaaatggtcgtcgattaatgcaagatggaaggaatcgggtcatgctgcttgaagttaaatattgtttacttttatttcctcctatgtatcccttaaacatatatttatgggaagtttcatattgtcttagccttcaaaatgttcattttcgatctatattataactcagccgtataatagaataactcagctgccaagtaacataattcagatataactcagccgtaaacccacataactctcgtaaagtaatataatttagatataactcagtcgtaacatgtaaattaaccgaacctttcgacttccctatttaaataacttagccgtaacatgtaaaatgaccgaacctttcgacttccctatttaaattactcagctgtaacttgtaaaatgactgtacctttcaacttctatatttaaataactcagctacaacatgtaaaacgaccagaaattattgcaaataactcagctgggacgttaaagaaattgcaaatattacggtgcttagagtctataatgtcacgaaatagatataacggttaccaaacatagggaaagaagacacatacagttcgtgcaaacaaactatgcacagcaagttttaacattgtgcccatcttctttacatcgagaacatgcgtgttccttcctagggcgtttattctcaacggcgacttctagtgctgatttcatccttagtttattgggcctgccaggctggttcacaacaattggaggcaagcacggttggtcaattacaatttgaggaacagggacttccgtatctgaaggcatgattgcaccagcgtacgcattgaccaaataactgctcttatagtaaggattgacacatg

SEQ ID NO: 15278 - DNA, 2119 bp, Arabidopsis thaliana landsberg
  unsure (1)..(2119): unsure at all n locations
aatcaaaagcgagtcaaatttaatacctctcctctgctgtattgtttaatatccgctcgcatcttttcaatatcggggcgcatttttcgaaactcttctgcaacacgagttgatttatactcctatacacaaaaaaagacaatgaagaacactaattaggttgaaaaaagaaacagatcttctagcattccttaagtgagaaaactaaatgagtatttatcacgtacgccatggagataacaacacaagatattaacaaagacatctatacttctggacacttgtcatcaacacaagataccttaaccgtttctaaggataattaagttcacaacacaagatatactagaaaacagatctctacacacgatccatcatatgttcctgacttcctgtagtaatagtgagaataccagtactaataattaacgaaagtttggaaaagaagaattgcctcggatttggcgatgtcggctttaaccttccccatcaccgactcaaagccactggtgattgcgccggttaatgcctccgcttgtgttgagggtacgttgatcgcctctagagccttaaccattcctaatttgtcgacatggttcccggaagaaagtgaacgataactcagacctcttccgattcttacgatgctaatcgtgcgcttaagcattgccatgatgactctagcgcgtggaaagagtgaacaatcgaaattaatttatttgttaacgtatgactaacgaaaccctaaaccctatgaccaagagaaagaagaggaagatcggatactcacaaaacaaaaacaaaaggcttgcttcacaaatcacaaggaatattcttctatacctctcgcctcctctcgttctttgtttttcgcttcttaatttctctctgattcaaattgtaacaaagacaaagagatggaagtacttatataaagtaggtttacaaatctttcacgtgtttaccaaaaaataaaaaaataggtttacaagaatcccattatttatttatttgggtgtaattatgactataattatttattgattgacgtatatccttgttaatcaataatcacaatacagataagcgtgggaataaattccgaaacccaaaactgctttctcaaaaatccaaacagattgcataaacaacatatacctataaacagatcatacattaatcaatttggttcggattgggatgctaaaattacccaaacagatcatacattaaatttttcggattttggtttggtttggatagaatccaaaaatctttacggatcgaaaatccaaaatttggaacgtatcaataacccaaaacattttgatcctctagctcctgagaaaaaattatgcctagcttgttccggaatgataagctcgtggaaattttactcattttgacaaatcattattaatataaatattgtatagttctcgtaatcctccgcatatcgcatacctgtgactatatcgataaatatatgaaacctaaatatatttgtaaactaaatatacctccatatatttataatgtgtatatatttatgcgtatcaatgttgggttctattctagtaggtctgacccgcgagtcatcgttgcaggcacatgggtcatccatcaccagtaagatcgcactacgtgttattaaaatccgatgtgattttcatcatcgcatcacatcacactcacacacacatcacatatgataacaaaactagttgcagctgcgaatacgaaaacacgtacgaataaatacacgacatgaataaatgaattttgtacaaatagtatgtgtctttgttggcgtctttacatataagttttacttatcaattattatgtctcttaatttaattaggatactattcattttgctatcatggaccaaacataatttagacaaatgtggggaagaaaattcttcttttcgagaacttcttcaaagtatggctggctcacattttcagacgaaaggaatacctaacatatctagctagcgatataccaaatctttgatatgtaggtntgtcaactatttgcatgatatgttcaaattttcttcattaaagatttggtagattgagagagttatagttcctaatttataagccta

SEQ ID NO: 15279 - DNA, 2172 bp, Arabidopsis thaliana landsberg
gggacgcccttgtccatgttcatgcatgtaaccgaggttgaacattgcttgcgcattggactgcgattaaccatgcatgtatgcttctgccgcacgcacaaaatctctctcagttccctatttagagatcaaagaacgagagaagagagagaatcaggcgacacgtatcaagttttttctagctaattcaatcattgttacatgtctcaacgttattaggttcataatctagtttcttatacgaggtaaactcacccggccatagtaatatgcatctccaataagcagagcagcatgttcattgccttgttcagaggcccgccaccacaaagaatgtgcccgctcatgtctctctttgtctgtgcaaaatccagatactcccatgcacatgcttctttcgccgtatttatcgaggatccaggcagcattactttgtgccacttcataacccatctctgccatccttgagtacaagatcaaagctttacccacatcaccttttaagtaagcttcaagagcccatctagagagagaactccacggccccctttctgctactagcttataaaatgaagtcgcctgcaaccaaaatgtgatggaagtgaacaagcaattaaaccacaaattctctcaacaacgctggagatgtctccaaactgctcaaaaaaaattcctaagatataaaaggagttgaagtacgacagtgaaaaataacaaacagactaccatcaacagaaacaagtactatactgcaccctgctgccttaatggatagacgcatagacatcattcatacctcaacattaaaaaaatacaacgtctggccagacattatagtactgataaaaagctattaatagaatagacagtgaaacagagcttcccacattccttgtgcaagtaacctttttaggtaatgagattttacataaccaacaaaacagtgaaataattttctgaactttagaagagcaggaagccaaatttttttaagtttcgttcttttaagactttatgaatgtaaagtcattttttctggcatccatgtttaggcaggaaagtctcagaaatctaaaagtcacttaccatctccagattcttcttaagcccaacaccagtatggaacatcttggcgagttgatagaaagcctttggttgaccagcatttgcagcaacaaagaagtattttgttgcctgcctcacatcccttatgactccgatgcctttaagatacaaaactccaaggttataatgcccactggggtcttcattgtcaacagccttctcaaaatattctcttgcctgcatttgaaggcatacatccatagaatgttagactagcctataaagagtaagcctgggaatgatgaggctacgaatgaacagcctaccttagtatagtttttcttatctactccatagcctttgacatacaagtagccaattccattaaatgctgaatagagaccttcttttgcagcaagtgtaagccattcaagtgccttggtataatttctttcaacaccagctcctctagcatatatctcccccagaagttccattgacctcggctctcctttatctactgctttcaaaaaccaatgcaatgccttggtgtgatcacgccttaatcctcgcaggccaaagtagtagaacagtccaattttgtacattgcattagcattccctttctgtgcctgatattccaatatctggaaatcttcatcctcctcgcctcgagatttccttagagcacctttgttctcttcagttccgctatgaattctagttggttcaaccaccggagaatcctttgagatcagaaaactattgacagccgtctctgctaattcagcatataattgaacagctttatcatgcatctgtaacagaatcgcaaatcaataacaaacactcagatgcaacttcatctattcataaagaaaatcaaaagttccatctttacttacatcttgacgaagatacgtgaacgcaagtgccatcttcgactgcatattcccaccagcagctgcgaaattatggtgaagaaacgacttgcttttgctcttttctcgcatcattcctatcccgtaaacgaatcccattatcgactgcgcgtgtggatctccagctgaagaagccacctctatctcatccactgcttctttcatc

SEQ ID NO: 15280 - DNA, 782 bp, Arabidopsis thaliana landsberg
agcaaaccctagctttttattgtgcaacctagttctttttctttgattaggggtgatttaagagagaagtgaatttgcctaaatcccttagaacaaattcattgtttgattactaaatcaacaattggcgcgccaggtagggggttataaacaaattttctctacgctctttaaattaaagtaagcatggttcaaacaatcatcgaccccatcattcctccagtcaacggcgacggtacggagtcaagcctcctcaatggaggagatccaccttctaccgtggaagtagctgccaaagcaatcacggatcaaccagctcacggggcaacttctgttgatccgccttccttctccttagaagacctcaaagtcatcctcacgaccgtgacaaaagacgtgtctaaatccgtcatggagactaaccgccgactcgatgagctggccaaagggatctcccaacgcccgaactccgaagtgactccgccaagaataatccaaccgcgcggtcttagctttgaccacacggatgcacaatccaacaagatgaatcccaggttcccaggatcacttcatcccatcaatcaagacggcaggccgcttatgcctcctccagcgtcatctggtcatatttccagacccgcaacctaggatcatgactagcagttagacgatatctatttgaaactccgggaaatcggatcccaagtccattgggccagtagcttggccccggaaatcgatcgaatgatagaggaaaccaagaagactcctttcacagattg

SEQ ID NO: 15281 - DNA, 2409 bp, Arabidopsis thaliana landsberg
ggtttaaaaagttatggtcatggaacaaggagaaatatgtacctgtttataacgattaaaggaggttggtttagaaaagttatggatgaaggaatttgtacatgtttataacgatttaaaaaattaatcacaaattcaattcgggtaaatattgaattaaatctatgtcacgtgtaccacaaatgcatatcatatatatatatattacataataaacatttatgtcacgtgtaccacaaatataaatataaggttttgtataaaacaaaacttcgaagttatccattgcaactttactttctatttccaaaaactacaaaataattttatgaagtttaaaataatgtatctcatttttgcaactttacatatattgtaaatgtttcatgatcacatatatttgtttttgaaaatttgaaagatatagttgaacttctcatctcgagggcttcgatttgatatattatttatcaaaattttaaaaatttgacaataacaaaaaaatgctacattgcgtattattgtaggcttcatatgattacatatatcttatattattaataaaatccaacaagtagttgctccaatatgcttaggtgtgtaatcctgtaggatcaaataatattagtaatgaacttctaaaatcatcgattataagaggcttctagcaaaacattataatcatttaatattatccgactatcgaacctcgacaatacaacttaaactagagtaagtacaaatgatttaaggatcccaatgggctcatggagattggaaagcttgatgattttggcgagatcgagatcaagatcaagatcatatacatatatataattacatatatatatacactatcaaagtaaaaatagttttttctttataatacttttccaataatttgcataatgaaatccaacacgtttagagaagaaaagtctattattttacgtttagagaagagtgaacaaatcgcaagataaaaaaaaaccggagactttactcgttttttgaaggacgagatgactgttggtttcaaagatttttgatgaactacggaaacacagattttagatttgttgggtatcaaagtaatgagttttggaagttcacgtatgatgtatatttttttttcttttaggtttgataattatcaaaacttttgtaaaacttatctttgttttttgttatatatttatgttgataattttaatttcttttatttatctaatgaattaaaatttctacagcaaaaaataggggtttaagaatttactctactacagcctcaaaaaaaaaaaaaaaattgggctgtaagtataaaaataaagctacaacacgattggtacgtaatcaacgctttaaaaaaaatgaaggctgtaagtctgacttacatcccaactcaatcatgcacttaatccttcaaaaaagagtctcaaaatgtacaccaaagtaaatggataatcagattaaagattcatcatatgatctataattagcaaattaacaactttaaacaattaatgccctaagcaaagccaagacctccatctaacattcgtcatcttaaattggctagacgacaacttacttgtgtactagggctgaccaacgagttcccttcttcgccactatcggcgtcgctgaacgtggtgagtactcgggcacaacaactccaccagattggataatagcaacatcttgcaccagcttatcatcgtatagtgatacttgatctcttccaccagctttctcatttgcgcggcgataatcttcagctttgccggcgaatccagaactttcacgagtgttatatcaacttgaacctcaaggtatctaggccttaaaaaacccatgtcttctacgttttgtaatcaacaaaaaaatgtaaaaatataaaactacaaataaattaacaaaatatcaaactagccaaatgttatatttcacacatcattgttcattgactttttacatgatttcaaatatttactttgaaacaaaataaataaaatactagtggcgtataaaatatcataaaacacgaactatattaaaggaatattagaaaacttataaaactaaatttttgtaggaagaggaagaagttatcttagaatatatacaagcgttgcgatccatgagagtcccttagaaagacagacaataataattctttattatgttgattatatggtagtgttgttttttgtgctcaaaaataataattatatcttagtttttttgatataaagtgtccactgatacaatctcacgtatatataagtttgtgaggccgtcccttaaatgagtatgttcagagactcgcattatgctctttcctaccttttaaatattaaaaaaatttttaagtgggtgatcctctgtaaaaaaaccaatggaggtggt

SEQ ID NO: 15282 - DNA, 2215 bp, Arabidopsis thaliana landsberg
  unsure (1)..(2215): unsure at all n locations
ctcgttttataccttttgatcacaagataaaaaatttgtcatagatccttgtctttaggattcttttttgaaaccaagtcgtcatattcatgagaattaacaccaactattggtttcacttcaacctgcaaatatagccctcgaaaaattgcgaggtacttgcgaagaatttgcgaaccgaaaaccctagatattgctataatagagaagagattcaacgaaaagaaatatcatcgaacaaaccgaaataccaaactttagtgtcataaatttgttaccttcaattgattcctttgctcgagaaacaaaaattcttcaaattgttatgatgaaagaaacgacaatttctctaaatttttttttttttttactttttgttactttcacggtttcgttttctttttttgttttggtttttagtgaattttgggctttagtgaatttatacgaaaacgatttgctttttcgaaaataagaggtctaggcctaattactaacagttaaagtgttaacattacagtaactttttcaaccctttaaatgttcttttagaaacctttttaatacaagaaaacaagcgatttgcgagaaatatttacgatggaaaaggtccctcgcaaattaggtacataattgcgaggactttgccagcagacaggagaacgtcgctaatttgtcccaaaatttgcgaggaatatatcccccccccccccccaaaaaaaatttctccttcctcttattcttcttcttccctagaagaactagtagaaactctttcgatccataaatactcttccatccttccaattttgtacataagaacttcagagttttcatagaccaatcctattttctcaccaaaggacattaatttcctttttctgttggtgatagacaagtgattcaattgcaggtttcattacatgatcaattctaccttcatttacttgttccacttcaatccatcgctgactctaatccttcttgcttattttataccctttaatcagaagatcaaaaacatgtaacagatccttgtctttagaatttttttgtgaaagcaagtggtcatattcaagagaattaacaccaactataggtttcatttcaacctgcaaatatatccctcccaaaattgcgaggaacttgcgaggacattgcgaaacgaaaaccctagatattttaataccagagaaaatattcgacaaaaagaaataaaatcgaacaaacccaatcaaaatttagtttcataaatttgttaccttcaattgattcctttgttggagaatcaaaaaattttcaaattgttctaaggaagaagacacagtgagagagacgacaatttttctaatttattattttaattntttgtttctttcacgggttctttttcctttttggtttgggctttagtgaattttgggctttagtgaatttttactaaaacggtttgttttttgtaaataagaggcctagacccaattactaacagttaaagtgttaacattataataattttttcaacgctttaaaattcttttaagaagctttttactacaagaaaacaagcgattaacgaggaacatttgcgattaaaaatgtccctcgcaaatttgctacagaattgcgaggactttgcgagcagataggagaacatcgctaagtcgtcgtaaaatttgtgaggaatatatccctcgcaaaattttcttcttcctcttttttttcttcttctctagtagaattggcatgaactctttcgatccntaaatagtcatccatctttccaactttgtacctaagatcttcacagttttcatagacaagtcctatttctcaccaaaggacattgatttcctttttctgctgcgatacacaagtgtttcaatagcaggttttaattacataatcaattctaccttcatgtacttgttccacttcaatacatccgtgcctccaatccttcttgctcattaaataccctttgatcacaagatcaaaaacatgtaacaaatccttgtctttaggattcttttttgaaaccaagtggtcatattcatgagaactaacaccaactattggtttcacttcaacctgcaaatatatccctcgcaaaattacgaggtacttgcgagaaatttgcgaaccgaaaaccctagatattgctataatagagaagagattcgacaaaaagcaataaaatcaaacgaacccaaat

SEQ ID NO: 15283 - DNA, 2191 bp, Arabidopsis thaliana landsberg
cagtgcagagcatctcggcattcacagtatctcaagctattcaggatctccgatcaaccactcagagttcggcaggatcgtgatttcgaccgctatggtggcggatggaacagggttttggtgttaatctatttgcccttgtggcgtggatggactggagggtttctgcgctgcaaggcgtaggaattatcggatatgtcatattcatggtttgggttgtgagaccggccatgttttgggtgatcaaacggacaccacaagagagaccggtgaaggaatgcttcatctacatcatactcattttagccttcggtggttactactttttgaaggaaattcacatgtttccggctgttggacccttccttttgggtttgtgtgtgcctcacggtcctcctctagggtctcaactggtagaaaagtttgaaagctttaacactggaatccttttgccacttttcttgttcttctcaatgctgcaaatcgatggaccttggttagctaaccagatcggtcaactaaggcattttgacggtcagttgtatgaagccttgaccatcatcatcgttgtctttgtcgccaagattatcttctcaatgattcctgcattgctagccaaaatgcctctgaccgactctttcgttatggcactcatcctcagcaacaaaggaattgttgagctgtgttattttctgtatggagttgaaagcaatgtgagttcccatatttaactttatattcaagacaattcaactctccaacacttgatgtttttttttttctttctgtcttataagattattttgttgtgttacaggttcttcatgtgaagtccttcacgattatggcaacgatgattttagtgagctctacgatatcaccagtgttgatacattacctatatgattcgtcaaaacgattcattagtttccagaagcggaatctaatgagcttgaagcttggatcagagctgaagtttctagtgtgcattcacaaagcagaccacatctcagggatgatcaaccttctagcacagtcttttcctctacatgaatccacaataagttgctacgtgattcacctcgtcgagcttgtgggtttagacaatccagtctttatctcccaccaaatgcaaaaagccgaacctggaaaccggtcttattcaaacaacgtcctaatcgcttttgataacttcaaacattactggaaatcgatatcgctggaattgttcacatgcatctcaaaccctaggtacatgcatcaagagatttactcgctcgctctcgacaaacaagcttctttcctcatgctccctttccacattatatggtcccttgaccagacaacggtggtctcagacgatgtcatgcgtaggaacgctaacttaaatgtcttgagacaagcaccttgctccgtggggatctttgtccatcgtcaaaagcttttatctgcgcaaaagagcagtccgtcttttgaggtaacacatatttgaaggtttgattgttccatacgctaatcattagtttccgtgcttgaatttgtgtttacgtgtgaaacttgatttgtctaaaaccaggtctgcgcaattttcgtgggcgggaaagacgacagagaagccttggcattgggaaggcaaatgatgaggaatccgaatgtgaacctgacagtgttgaagctaatcccagcgaaaatggatgggatgactacagggtgggatcagatgctggactcggcagaggttaaggaggttctgaggaacaataacaatactgttggacaacatagttttgtggaatacgtagaggagacagttaacgacggttccgacacatcaacactccttctctcgattgctaattcttttgatttattcgtggtggggaggagcgccggagtagggaccgacgtggtgagtgcattgagtgagtggacggagtttgatgagttaggtgtgattggagatctgttggtgtctcaagattttccccgtagagggtcggtgttggtggtgcaacaacaacagaatgtagcttgtagatgatattacattggcaactactctttattcatttataagatacaaaaaataggaatacacttctcacacgagacacattggtagccccaaatttttaagtgacagttcgtctccgtggccttgagatgataacatttgcaaatatgactttaa

SEQ ID NO: 15284 - DNA, 1976 bp, Arabidopsis thaliana landsberg
tattttcactcgaatcttttaaaacaaaaattgtaaagagttaaagacgattttttttttatttaacgaaaagacaatatagtcatagtcatagaaattcgtaaaatttgaaaattattattatacgagaatcgttgctttcaattattttaagtgaggtccacagcaggagtctcgagaaatctttggtttcatacacatgagtagcttgaatattattggcattcgaatacgactttataatcttaaagttattgtatgttgcgctaattacgtgttgacagttgccaacaagcgcgtggagtggtcacgagatcgatcactgttgagatttgatgggctttcagtgactctgggtaactttgttctatcacgagatcggtcactgttgagatttgatgggctttaacagtgtatttcttgacgtcgactgaagcccaacaaactagactttcaatccctttctttttcaaaagacagtgtggcgggacatatacatgcttaaatgttaggtcataatatccttcaaaatctgtggaaaaaaaaatccttcaaagtcaaaaagtaatatgtatgtatacaaaagagaaatgtgccctttttttgttctataatttaatttttagtgaaaaacggttcggactctcataaattatactccctccgtcccactaagataaattttttttaaatttcacattctttaagaaatattgtataaagacaattttaacttcttaatatactttaaaaataataataaatatttatttaattatttagtaagggtaaaacgggaaaacagttttaaaatttgcattagaaatataaaacttctatctttatgggacaaatatttttcctagaaaatttatggatagagggagtagtttttttctttttccataaaggcaaatagatcataaagctatagtttccatcattaattaagccattattataatacagtatctactaaaagttttggtagttatgtagagattgtgattttgcgtctcacattacacatgtatagattttgtgatttagcattgcttctccaatttaatttgatacaagatcttttggttagattgctgcagtcacaatttgctaatcgaaccgataggttagttgacacgtctgtataatgtcgtgtttcccgccgttctggacaatcaacaaaaaatggaaaaatagaaccgaccactttatagaacatagtaaccctaaacttaaaattttccaattatcctcaattttgcgaattaggacagagatggagcttcggtcccgcaataaggcgattcgtccatcgactgaaggtaatcttcacacgaccctttcgtgatttctcgctgttgattttgggtttgatccctaatcgtcccattgtacccgagaaattgcggatcatagtgaacttgttagtgtctctgtttcagtgcgatctgaactctattaattgatttttttgggtattgtgctctgatgatctctgttaatttgatgatatagttttggtattgtgccctgatgtctttgtgagggtagaaattgaaactttagggccttagatacggtcgagagattaatttataatcttttcttcttctcaagtagttgtggatctcgaggaaggaactggtatcaaccctgatgaagaaccttatgctatatcttcagatgacgattcaatcggctctgaatttcaaggtattatgattcgtcactaaaggtgtctgttttaaagttgattctctttgggttaagctctgactttctcacgattcgtatttgaacataggtgacgaggaggaggaggaggagttagaggaggttgttgctaatgatgatttaccaaatcctgtacctgttttggcaattgtaaacctaccaagagcaagcaagaaaaggaaaaaacctgatgcacgcaaagagaaagtagtgctattgtgggagacttgggaaaaaga

SEQ ID NO: 15285 - DNA, 1518 bp, Arabidopsis thaliana landsberg
atcagaaaacatccaaaaaccaaagccaatttattttctagatggtttcaacgtttaagataagacaattggttgtcgcttaaccttttactagagagtataacatttagcatacttttaaatctgagatatcatctatgtgtcttaaattttgtaaacaaaggcatagacttcccctttttattttaaaaaacaaaaaaaacaaaaaaacaaaagcagagacaagccctcctcatgcatgagaattgagatctgagaatacataaaagcataattttttttttaaaaagttgagtttactgtgagattttatttttatttaagtgaacatcttacgtgaaagtaaaacaaattggtatatttttggaatatatttgttcttaatgtagttaaaattggctatggacttggagcccgcatgcatgagatagtatgtagtaagtaattgggccctttacaagtctggtgtaaatgctaattgggccacctatggaacaattgggtcgggtgtatgtagtaaagcaatttgtgtgtgtgttctttctttggtcatcaatgtttttagttgattctacaaaattggatgcaaattcatagagattggaaaaaaacgtttttttttttttttttttttgaacatctgctatataagataggaaaaaaacgttattgtgaattttcagattttagaaaagaataaataatgaagaattattagtcgttgacaaaacaaaaaagagaattattttagtcacacgacgtcgtttagaatatgttaattttcatcaagtcttggataaaccctagactcgtctctctatttctctatcaaaattcacaccggcgattttgagattgttctctgattggcttaatccgagagaatcaaggaattgaatggccagtgaatcagatgcatcgagcattgctactctttcctgtgctcgctgcgagaagcctgcacatcttcagtacgtatttactcttcttcttccttttctctatttgacttgcatagttggtagtcaatttagctccaaagttcgagtttttaatagatgatttcgataactgttgcttttagtatatgttagaggaatgggatgctgatgttcacatggattcatggctttttaatatgcgtagtttcattatttatggctcttgattcgaattgaactcgcaggtgtccgaaatgcatagacttaaagcttcctcgtgaacaagcctctttctggtacgtgtctggctttaaccttttttgatttggtgagtctttagttcttaagttttgatttttcgttcttatgtctaacacagcactcaagaatgtttcaaggcagcttggagctcgcacaaatcagtacatgtgaaagctcagctgtcttcaatcggtgatcagaactctgatcttatttctcaaggctggctctattgcgtcaagaaaggccaggctagaacacctaagcttccacactttgattggactgggtttgtaaccaatattacctcagtgtt

SEQ ID NO: 15286 - DNA, 2237 bp, Arabidopsis thaliana landsberg
  unsure (1)..(2237): unsure at all n locations
cgaaaaacacctgtaagatccagagcaagatccattctacttcattactaggcaccgagatttccaaaaatattttagtcttgccatcaatgacagtagacnnnnnnnnnnnnnnnnnnnnnaaacatcaatgaaagtagttttgccatcttcaaccaatctagctgccgcgtagaagcttgtcgcgtagacacaaaacagaatgaagaaggagaatccaaaccctaatccgctgatgaaaccttgctttactccatcttttatcggaccttcacattgcttattatacatctgcatcactttctcctccgcgcagaaagatgcaactgttcttatactccccaccgcgtcgttcgctacctgacttgcctcctcatactttgactgcaaagttattcaaaaccagagtaagtttcttgatccacaagaaataaaccctagaaagccatgaacagacctttgcgtcggcgctgaatcctttcataaacttgacttgaagaaagccattgataccaataagaggaagcatcactaagattataagcgccaattcccaactcgcagtgaacgctataatcaatccagacgcagcagatgcagcgttttgaaccgctaaagacaatgcatctcctactagagctctaatcaaagctgcatcagtcgagagccttgcccccattgtaccactcgagttctctggctcatcgaaccagctaacctccatgtgaaccgctttctcaaagcacattgactgaattcgtcgtataagttttcctccagctactgcaaacagatacatttgagacggtgagacaatcaacgaagttactcccagagctacaaatataatcgcccagaatcttgaatctttctttaattggtcagctggtttgaagaacgcttcgatgactcttgaaatcagaatcccgaaaagcgggaaaatcgcgccattgattgctgctactacagttccaagaaggagaaccgggatctcaggtttgtttagagctgcgattcgggtgagtgatacttttcggagcggttcttgactcgtcgttccagtttcctcttggcctactctttggctaccgctaccaaggtctagtccagcgaataaaccaaggacattcaaagaatgatgccgtctgctatttccaaaagacgaggttccaccactgataaccgatccctctcttgatatgttcaaattcgaattccggaaagatgatcccgaagatagctctgatggttttgcatcatgacccttgtttatctcttgacaccgaatgagctgcgaataagctccctcagaatctttcaacaactcagaatgagaacctttttccaccatttttccgcggtgaattaccgcaatcatatccgcatttcggacagtacttaatcgatgagcgactataactgtagtccggttaaccatcactctatctaaagcctcttgaaccactctttcggactccgcatcgagcgcgcttgttgcttcatccagaagcaaaatccgcggatctttaagaatagctctcgcaatagctatcctctgtttctgacctcccgagagctgagtaccgtgctcgcctaccattgtatctaacccctgaggtaacttatcaatgaacttcgccgcattagctagctctgttgcagctttaatctcttcaactgttgcattttcttttccgtaggcgatattctccatgatgctcgacgaaaacagaacaggttcttggctgaccaatcctattttgcttctaatccatttcaactgaaactccttgagattcactccatcaatgagcactgcgccagattttggatcataaaacctctcaatcaaactgatcacggtagattttccacttccactttctcctactaatgctgctgttgcaccactcggaataaacagagagaatccgtcgaatatctcctcgtctggcctcgcggggtaactgaaatgcacatctttcagttcaatgtctcctcggatatcttcaagaacctttccattaacatcataagcatcaatcaagggctttcttttgatcgtctcaaacatcttatatgctgcagcttgacccgctgcaaatgcggttacacatggagatgtttgcccaagcgacctaaacaagaagaaagtagacatacctgttaggattaatctcacatcaaatatataaagttgattgtctaggcttttacttacattgaacccgcaacta

SEQ ID NO: 15287 - DNA, 983 bp, Arabidopsis thaliana landsberg
gtacgttctgtgttgtcacagagttttaagcgctatgtatagaagttgtaacctagtgttcttacttctgccaaagcttgtgattgtttgagttatgtgtgtttgattttttgttttgttggcaaagaacttatgtgtgtgtgtacttttggaatttgttcagaggaactatgttatctgccaagtgatgtataagggtgaagatggagacgtcccatctggtggtaacaactcgagtgagccgagtcaatctttggtctctgattcgaatactgtcagagctacgagtcccacagcgcttgaggtgactccagtttctttatttgataatctcatgtacttgattcgtttactcaacactctcttttacattttcagtttgagaagccaggtcaagaaaatttctttggtatgtctgtggatgatttggggactccaaagaatgaacaagaagatttctctttgtgggatgtactggatccagacatgttattcagtgacaataacaatcctactgtgcatccacaagctcctcacttagccccgaatgatgatgagtttctcggtggattgaggcatgttaaccgagagcaggttgaatatttgtttgccaatgaagaaaacatggatggtttgtctatgaatgacttgagaatcccaatgatcgtccaacaagaggatctctctgagtgggagggatttaacgcagacacctttttcagcgacaacaacaataactataaccttaacgtgcatcatcaactaacgccttacggcgatggctatttgaatgcattttcgggttataacgaagggaatcctcccgatcacgaattagtgatgcaagagaaccgcaacgatcacatgccaaggaaacctgtgacagggaccattgattatagcagcgatagtggcagtgatgctggatccatatctacaacggtaaagcacatctctcattttctttatcattacttccctgg

SEQ ID NO: 15288 - DNA, 1211 bp, Arabidopsis thaliana landsberg
ccaaataataaccattgacacgattgccttggacgccttttgttttgcgtcctttgtcgttttggccgcttttccccggttgatggaaaccttagcatttttttccttcctttcttcggttttttagacagcggaactatcttcaacgcctttacttcatctggtacttcccactgcgacctatccggaacaagataaatagtcctataataggccaatgcccacaactccgcccaataatattttgtaaccaaatcatgtaactccaaacctcttctccgatcttcatcatccataatgttaatgaaagcggctaatgcatgaatataaggatatttttggatatcgaaaaccttgcaactgcaagttttcaaaagcaagctcaccgtataatctattcctttgtcgcatgtgactacatattcacgctcgaatgagtttagctccaccactttcagcttctcggcaaaactccacaaatcatgcaaataattctcgaccaaaggcactatcttattttctaaggatccagacgcggcttccatccgattttcattaaaccaaacggagatttttttgatgatcgcatcaagcattggtattaacgagtatttccttgcgtttttaaacacattgttcaaagattccacacaattgcttgtatctaagttgtatctttctccgggaaaacaacacctagcccatttttctttcatggttgtatcttccaaataataggctgctttaggaaatctcaccttaaaagaatcatactccctctcaaattcagccatggtgtatttccgacttaactccaagaattttttatgcgagtacgtctctgttgatgtcaatggcatgagctttcacattttgggataaatgccaagtacaatacccgtgatgagctgcacaagatacattacgtatgcccttgatgaggcttcaatttctgtcactaataaacaccaattctggagtatcgggtacaacacttagcagcttctcgaagaaccatccccaactagcatcgttctcactgtcgagtacgccaaatcctatgatagaatgatgacgatttggatttggactgaggcaaagactagaacaccaccatatccgttcttaatatgtgttgcatccacaattatcacttttctaatcactttgaagccttaatagtagctcccaaagctatgaatagatacttg

SEQ ID NO: 15289 - DNA, 3178 bp, Arabidopsis thaliana landsberg
  unsure (1)..(3178): unsure at all n locations
aagcattgacgtgggttgcaaccagagaaaagtgatgacgtgtcatgtcgtgattggctgaatattattgacgaaagaagaaaaaaacgctgtgtctatctctcgactctctctctctctggcgatggctatcaaaccggagatttctgtctccacagccgctccatcgtgcgaaccgaggttaacctactcggagatttacgactccgagtcggagagtaatcgttgaagagagcaatgagtgccacggccatatcacttctctcgccgttcaagctcagtctcgccgctcaggctgctatggaacatgttagtcaatctttaaatttcgtatttgtttgcagtcaataagcagaatcatttcgggtctctgattctccatattttgcatatgcagacaccagtcttgtggcctcatggcattgatgaaaaggctgtactattcgaagctggtcaagcagctcttccttttcttcaacaagctggtttgacttatgaattcaaggtatgaaatagttatcaaatcaaatactcatgtttgataatataacagagcagagaattcagatactgatcctcagatttgatgttattagcatactttgtgaatcatttacggatatgcaaaagtcatgtgtttgatctgtcctcagatttgctaatgttacagtttggagttgtgtcctgagctagagaatgtctgtcccggagttgtttcctgtgcttctttgtggactgtatcctacagagacatattgcatttaagactttgataactgcaatgtgtttctctttcactggctgttgaaagcagaaagccaagagttggagctagttggataatgtgttccttattatgttctgcatatgcattttaaccagtgtcctttttgttatatgaaggacttgttgagattaagagaagagtatgtagaagaaggctgaagaaggtgatgaacatgattctccaatagaaagtgtggaggagagccagctggagtgggcgtcgaatcagtgttccccttgtaagtaacttcaagcttgtgcaacgactttaatagcctatctctgtgcaatgttgttcattggttgtaatgtctctagtactctcttgattgattgtacattttcaatgttttgtactgagtaaaagcaaacatatatgcattgttttacaaaatttaaatttgtttaagaaccccaccattggagaagacaaaacttcatgacatcaattcaagttctcaagtttgataaaagcaaaatttaaacttaaaaaatggttagagccctcacgtggttctcaccatttgagatgtatccaatcgagagcaaaatgtttacagattaacaaaaatctgtaaaatcgtgaaatcatttaataaaaatttagtatcaacctgattataattcttgaatgagagtccaatactataaactgaatcaagagcaagaacaatagaaaagagtttgcagaaaactaaactatgattttggaaatcgtaaagctttaaacaaaatttggtgaccttttcgtcttcttcacccttatctttcacatggcaactcgagacgacacaatggacatacatgacttctcacaaaccactctaaaacacactcctcgtcaaactcgtgcccacacggtaaagtcacaatacttcttccatcgtcaaactcttccaaacaaatagtgcacacgtcattctcacatacaacaccactagctttcttgtatgttttcctattcaaagccccgacagtgagcttgctcgcaggttttaacctgacagtgttggtctcattgaacgaaacttgaaaaacttcttcaatctgagaatgagacgcttcttcaagttgatgatcgaagccaaagctagcatggtgctcatcccttaagtgtggcaaccggtggaatagaacatcttctccaagctgagatgaagatgcttcttcgtaaggaaagtaatcattgtagtcatccctacagtatggcaccccgtagaatggaacaacttcttcaaactgagatgaagatgcttctccgtaaacgtcttgctcatcctctaaacatagaacgtcttcttcaatatgttcaggaggaatagcgattgtaagagtcatcaacactcttaaagcacaacctggagtataatcatcagaggaagttatttcatcgacgaatcgaaacaactctagtaacacatggtaagcatcgatgggagtgatttttcctgatcccgtcaagaattcagtaagctctacagcaacacagtcgcgtaaagaaaccgggatacaagagaattctgatgttagttcatcatagagatcataattactgatgatactttgatatattttggtcgtagcaacactgatttgattatgccaacatcttcaggacaggattgtgctcaatttcatgtgcgaaggatgaaatcatgatggcgagaacgatcanagaataaataaattttatcgattatgtttagccgtttagggttctcttgaagtaattcattcatgtatttataacagaggcctagatcgatggtatatatatatatatatatctttagtagaaaatctaatactattgggatttgatatcagtttccatttgtaattgtttttttcctaatttacaaacggtgtatgtttttttcctaagcttttactttcctttttttttctttgggtataatttagcaaacaattaattaattaattgtttttgttaatctgattattgacgtttaaactcaatttccttttaagcttgaaaaactttataaattaagacaaaaaaaaatatatagttgattaaaaaaattagtacttaaaagttggtcacactttcttacatcatcatcatcaaagtaattgggttccagatttaaagtttagtcaaacttcttacaaccaggtttgtaattcatatctccattgaaactatttagctatataatccaccaaactgaataagtctctgtatatttggnnnnnnnnnnnnnnnnnntaactcaggacagaggcacagagctattgcgctataatgtacatagtactcatgcatgggagttttagccttttatgcatttttttttttgaaagaaatgttgtctaggaatcatatattttataagaatgatatagtatataattagtcaatattttc

SEQ ID NO: 15290 - DNA, 1037 bp, Arabidopsis thaliana landsberg
acaatgcccaaatagacaaaatttagtcagctgacttataactagaatacttcagatttttgatcggttctacttaatatttagtattgctgtgttgctgtagtttacaatttagtattgctgtatttacttaccaactcttttgctcccaggaaattttgtctgcaaagccttaatgcaactctacaaaaattcaaagggaagtcatcataagatatcaacatcgatttctcacaagttgaatgaagtgtgtgacacgaaaaaaaattgttcataaggaagaaatcgatgagataacttggcaaattggaatgtgtacttctcaatccttcattcttcggaaacatttatactacttaattcctatcacaatgcattgatgctatgtaataaaaagtatagataacgttaaacaatttggttccaaatgttacatccttcaagtcaactctaagttttgatcttgatataagataatacactataaacgttgcttcacacggtatgtatcagcggaaagcaaatataacgcacctgtgcaacaccgagacattgacagtccatagctgcaattgccacctgctcatttagtgtccattctgaacaaaaagagcaacaagatcaatttacttacattcataaacataagagcagaacaatatcttaatttactcttgattataattgcatagtttacacaaaaatctatagctaaaatgaaccaaaacaaaaacatttcattgagtcaagaaagtttacttttttttttgtttaccgatattaattaagctcaaaagagccattcctgaggaatgttgtttacataagtgatatgatgcggttggacacgaactttatgtgccaaagtatccgccttgacatttgcgttacgaaaaattaaagataaagaaaaagaagtgaactcttccttgtcgctctgaaactcctccaagtatgctgaaaatgctggtcattcggttggagaagacaccatcttcaccaggtctgaacagtctgttaaaaaaactactttttgg

SEQ ID NO: 15291 - DNA, 543 bp, Arabidopsis thaliana landsberg
tggtaagaaaaagtaactaatgtaacttatttttacgttttaaccgttatattctctatataaacgaaggagaaatgaaagtattcatcaagtaaagaaacaaacaaacaaacaaaaaacacacttcactcgctacacaaggaagagagatggcgacgtcaggaacatatgtaacggaggttcctttgaaaggatcggctgagaaacactacaagcggtggaggagtgagaaccacctcttccccgacgccatcggccaccacattcaaggtgtcaccatccacgatggcgaatgggactcccatggagccatcaagatttggaactacacatgcggtaaaaatatacacttattttagttatataactcacgtctgaaaactagagcttggaataatactcgaggttaatcacataaaaatgaatatatagttgtacgactttgtcacaagaatacagagaatccatttttcaaaaggtttcactgcatatatgtaaactcatatctttctaaatttgattcactttattaatttatgaacc

SEQ ID NO: 15292 - DNA, 1330 bp, Arabidopsis thaliana landsberg
  unsure (1)..(1330): unsure at all n locations
tcgaattctgttaattgattttaagttgtgaaattgtttttacgttttaccatttccaatctactggctaacctcggaaaaacggtctagtgagcgagcattgccttgagaaacagtacccgccaaatccagctctcatgtacacagtttgatattatttctttccagtacttttgattcagcaacagagagttcttttcgggctatgtaagaatcaatttgcattgtctgcagcctatccggtggggagctgagccaaggagcaagatttgctccatatccattttcttcaattctagttatgcatgccttgagatccacgtacctaagataaacaaagaatcagtcagaggtgacaaacctaggacaaaagaagttgcggaatcgaacaaattttggcctaaggaacagaagcaaggtccaccaataagtcgaacagtcaatgtcaagattgggaaccaaagcagtttctcgatgtttaatttttaatttggcagctaaaagaagtggatagttgaaggcatcggaaacataccaaacattatctgggtcatcttcagaattgcacaaaggaggactgactccagcaccacgacttaggtaacaagtgttatttacaggcttctgccagatagctatatatccttccttctttacaagaacccagcacagcctagtggtcaggtttagcatctctggaaaaacgaaaagaaaaaaccatcttactaaaccacatacaagcatggtctcaaataagagactcaatatatatccttgcaagaccaaaagaaactttctctaaatgccttctgataggcaaactgaagcaaagatggatgtttttttaattcaacagtatagtgtaggtagtagcttttagagctttctccctagaaaattagagagttttcagcaaaaacgagctttggttggaatgtttgtataggcaaaactgacacttcatgaatgctgaaatgatatattaaggtgcacggatgataccttcccactgttcttccaaggccttttcatgcttatatacaggttgtgctgcccaaacaaaatatcctccggcacgannnnnnnnnnnnnnnnnnnnnnnnnnnnnnnnnnnnncatatcaaaaacaatgacaatgcagaagaatctatcagtagaagcttagaaatacttggtattcagtacgttttttacttaaaagtttggtgttaaatggcaaaacagctaccaaagcacagttttagctctatgtggccacggatcgataactttatttataaaccaaaaataggaaaacgagttaaacatggtggaaggaacggtaaaaagt

SEQ ID NO: 15293 - DNA, 1172 bp, Arabidopsis thaliana landsberg
agcatgcgtggttttgggtaataatgggaattttgaagtgttcgttaaaaaacaagaaggtcaagctcataagggcaaatcaatcccgtggagtagagatagcaagtgggaatgtcttccttttaactggaagacatattggtctagtggagatgatgttacacattttcgatgccgaaactgcgatggcgacaaccataaagaatatgaaaaggctccggttgagatcaaacactctcttcatcggaaacattctcttcagcttgtcttgttggatgagagtagttatacgagggtatgctattgttgcgatgaagatctcaaaaggatgttttattattgtcggacttgcgattttggtcttaatttcgtttgtgcgaagaaagaagcaatcttatatatagaccaaccgaagtggcatgagcatacacttgcgttgtttctaagaaagacttcgttaacttgcaacgcatgtggcttatcacattcaagttgtcctctctatatgtggtcccccttgtgactttgtgatccataagagttgtatcagcttaccacgtctcataaggatatcacgacatttccatcgtatagcttataccccttcttttgatgaaggagattggtcttgtagtgtttgtcgcaagaagatcgacaatgattacggaggctatgtttgtaccaaaggttgttcgtatgcggctcattcaaaatgtgccactcagagcaatgtgtgggatggtatagaacttgagggagagccagaagatattgaagaagaagtgcttcctccgtttttggagataagtgatggaatcatacaacattttagtcatcagcaacatcatatgaaacttgacgagaacacgggcagagattacgacgagaataaggagtgtgaagcatgcatcaggccaatctatttcggcaattactactcttgtttggaatgtggttttattcttcacgaagagtgtgcaaacctttctcgcaagatacatcacccgatacatccacatcttctcaatctaattggaggatttgatggtgttataaactattataacgataaatgctcagcttgtattggattgtgcaaaggtggattcttctatgactgtggtaaacaaggatgtaagtttatgctacatgtgcagtgcgccacaacttct

SEQ ID NO: 15294 - DNA, 4344 bp, Arabidopsis thaliana landsberg
tgacgacttcggcatttactgcttccgcgcggtccggaccaagtttccgatatttttgcttgaccggtttgaaagttgggtcgacgtttaactcatgcgaaatgacttccgtgctgatcccggtcatttcgccaacgctccaggcgaaagttcccttgtttcgcttgaggaaaagaacaagtttgcttcggaaactttcgcctagattagctccgataccgacaagctgatctggatgctcctcgcttattatcacccgctctacgaggtcgtctcctacttttttaattggattcggagcggcctcgagctgtggttgctatttgactttgagcttgtgtccagtcatataacacattctagatgtacgctgacttcccaagatttgctttactccggtgggagttggaaacttgacacattgatggtaagtcgaagggactgctttcatctcgtaaagccaaggtgttccaagtattatattgtaagcggcaggtcgatgaaaaacggggaattcgatcattttcacaatcccttgagcgctgatcgggagtgtaatcgttccaagtgacattgaagtctcgctcgtgaaggaaacgagagggctcggagctcctttgatattcttcttagaaattcccattcgaacgagggtatccagaaaaattaagtcaactgaactcccagtatcaatgaggattctttgtacttcgcagtttcccacgtcgagcgatatcacgagggcgtcgtcatgcggtttatctaactcggaggtttcttcctctgaaaacgaaatttcgagcgaatcggcttgaccgaccttaggtcttttcgccaccggagtgaccaccttcctttcatgctgcttaattgcgctgacagaatcccgaaaaagtttagatcctcccataattactttgaccatcttcttcggaccctttggagtgacgggagttggctcgctcttttgctttttgttgggaggtgaggatttctcggaatccaacacttcgtacgctgtatgagccaagtcgattgttgtgacgtcgatatcgggaatttctcccgaagcaaattttgcagccaacaaccttcccaaagccttacagtcttttgttgcgtgaccgttcattttgtgaatttcacagtaagcgttgggatctcggacccatttgttgctcgggagagctccattcttgccttttggagagaaaggcggtttcgatggtgacgcttttggggaagttttgagcggctccttctcaacggaaaaagttcctgctactggctttcggagctcggagggtttcttcgaggttacaggtggggaggcttttgttatagccttgaactttttagccaaaaaagcacgttcttcttcggcattgatccagttcgttgctcgatgaagggcgtcctgaatcgattcggggcggttgacagttagagactcacggaaacgcgattcatgccacaaaccgtttttgagggcggactgagctgctgaatcagacaggttgggcacttggaccatgatctctttgaaggcagtgatataagtccgaagtggatcgtcagctccttgagagaggttccaaagctgagcctcagtgacgtcacttttgataaagtacccgtactgcttgatgaaagcggtggagagttgcttaaagttatcgatcgagccctcttctaactgggtgaaccaggtaagtgcgggacctgacaaactttctgagaatagcttgcagagccccgcatcttcttcgtgtggctcgagcgggactcgacctgcgatgacctggaaagaagttagatactcttttgggtctcccttaccgttataaccggggagtttgaagtctcggaaatcgcaaatacggagctttgagattctcgaagtgaaaggtgttctccttgttgcttcaataactttttccacttcgggggccgacgtggtagcctgatgaacctttgtgttcattgcctagatttgatcttgaaggttttgcagctccgaattgaccgtgctcggctctggtcgaggattagaattcgggagtctgatggcgggacctaatggagccggagtccgagctattgtctcatctgagactgcaggaagacctgccgacggagattggatgactggattttgtgttgacgttgctccgacgtcaaccggtggcgaaggagattgctgaccagaagcttcctgcgaattctggacgcttgggctcgcggcgccctgaaaattgagtcgtgttcgagctcctgtagtccgtgccgttcctgcagaaagagaatcaacccgctcggcatacgcattgtgtgctgacctgatctcggcgagctgatcggaaagcgtcgttacggcgagctgctgtctgtcggttttctcagaaagttgctgaagcagctgcttgatgtcgtcgagagtggaagcttggccgccggaactctgatcgtcggtgttgctcatggtggattgatcgttgctctgaagtaaaagactaaacccctccttctagcgccaaattgtggatgtcggaatccgcaattagaatcttgtggttggttttacggggatctttggtcttgttaaacgaacaactatcgaatcgaaccaagaagaaagcgtcttttaattttgtgcatagtattagtgtattcttcaccgaccctttacaaatgtcatcgactcatatttatactcaatacatcgaatcaaacgtattaaaatacttgccgacttcacgccgcggatctcgcgttattaacgtcgtacgttacgaatcttcaactcgggactttaatgcgtggtttaagtcgtaacgtcgtattaatgtcgtacgttattaacgtcgtacgttacgtttctgtattaatgacggattattctttaaacggccaggctcacgctgggctgggaattgggcctaattcaccttgaagcccattgaatgcggattagtccgaagtggaccgaatccgacatccacaatttgccccccaagtcctcgaagtgatccagttcggggacttaagaaaatccgaatcgtaatatcccaagaatcacggatcgtcaccttgagaacgaatatcctcgacgtaaaaaaggaaactgaatcgtgcgattaccgagactttcctcgaatagagtgtgacgcttcgagatcctagggttttagttttcccgctcatccgtttcattatataaactgacgacctcttcgccttctgcacaacgattataagtatctggactccattttcgcttcaggtaatcgtctccaatccctcctctgatcttcgttctctctttcaattttcgataggatttagagaacctttgaattctgttaggattagtgaacgcttttagggtttagccggcggtttttaggacggaaatcctcacctatttctcaggttttcaattcagaaaaaacggggattttcagttttcgccacctccgttcacccatctccggtgagatcccgccgcgacctgaattcgccgtcgttaattgtctcgggtcaccggattccggccaagaacattcaaaatcttcaaagtgtccttcgttgccgaggaagatcttcagcaaatcttcaaagtgttcttcgacagaaaaaccccctcagatcttcttttattctcttgggtgacgtcgcgctgtttgtcatgcctccgagacaaatctctcgggaagtgttttcgattgacggtcagttcggaaaatacacgacttcactgtcaactccgagcagactcacattattaagaggagcccaccagatcccccaccaaataaagttgacctctccggacccaaagacttcccctgaatctccgcctccggggcacacctgtgccttcgaaattttcttctcagaatgcgggctcttctttccactccccgacatcctgatcgatctcatgtacgagtttgggatcgctctccctcagctatgcccgaatgtaatacggacagtgttatgccttcttaccctggcggaggaagacggtttccgacttgcgctatccgacctgcttcagctttacgtagtgaagaaaagtcggtctaacaacaacacctttttcctatcacctcggaaaggttttcgagtgtttgacgacttcccggaaaaagatgaacactggaggaagtcctacttcttcttccctgtgaatgaactcacctacggacagaaatctggtttatttgtatctgattggacaactcgggcgggtagctagtttggtcttaggatatcgtttcggactaacactttgtcaataactccgactttagcaaactaaacctttccctgtccctg

SEQ ID NO: 15295 - DNA, 582 bp, Arabidopsis thaliana landsberg
ggcggcggtttcggccatctcgcccaccacctccccctcgaacgcctctccatcgccgcacacgccgtcttagtggcaaactcggtcatcacctccaccgtcgaatgcgtcgacagccgcatcgccttcggccaatccatcgcggacttccaaaacacccgctttcaactcgccgacgtcaccaccgaagtcgaggtcacccgcgccttcgtcgaccaatccatcctggcctggaacaacgaagacctctccgtggtcgacgccgccaaagccaaactctgggcctcagagatgcagaaccgcgtcatcgaccgctgcctacaactccacggcggctacggctacatgctcgaataccccgtcgcccgcgcctaccaagacgcccgcatccaacgcattttcggcggcaccaacgaaatcatgcgccaaatcatcggccaagacataatcggacgacgctgaccctttccgacgacggacttcgccaggtcgccagcaggtcgtctcttcgttacgcatccgacacatagcaatgcagttaggctaaaatctgatacatctgcattactaaccctacgtgga

SEQ ID NO: 15296 - DNA, 3192 bp, Arabidopsis thaliana landsberg
  unsure (1)..(3192): unsure at all n locations
gtaagaccagagagagattgctaccatcaggaggaggaggcggagggaaaggaagaagctcgatacgatctaagaaagcaccaaagtcttcttctctaagggctctaatccgccgcttccgggtctccgccagaatcacgatcccggccaccgtcacgccgatcactacccaaactttgggattcgaggcattgctttgaatcaaagaaagcgttttcgacataacgcgatctcacgagaaagagagagagagagagagagagagacaagggttttaggcgggtttaagagagaaactgggaaagaatcttacgagagagatttggaagaagcaaacacagatgctatcgtgcgcactgtgtctaaacccttttaattacgagtgatgacttggccagccgtgaactcaagtccgtctgcccaaggcgaatcttctctttttgattgattaataattgtctttacgaaatcgataaagaaattaaaaaaaaaaattaaattaagaaaaatggaaattttaattttaattcctttatttattagaattactcgtttcaattttttttaataagcttgtacaaattgatttaggtttataatttcttttgttggccatttcttctcttaatgaacttttccactcgtggaaaaatagattttaagctagtcaagccactaaaaacctcaatataataatgaaaaaattaaaatatatactgctataatttattgttaagtttccattttctgtagccttgcccgtcaatccaattttatcttcagattataggaaaatccaagttaagttttttttatagctttaatggtttaccaatccaaatttggtagataaaatggcatgtcgacccggatttataacctttaaaagttagctcaatatcatactaccattcaaatttaaattatttcaatatgactgatgtatgagtttgggcaagacaaatatgatgtataaattgcagaaaacagctaataaagagaagaatattcaatacgggtacaaatatgaatcagagtaatccaacacttggctatataatattagcagagaaaagccaaatgaacaaataaaaaagttatatattgttaagacgaaagaaaatagtgaataattctatttcaatccaagtaataaattaagcggtaaatatcaactatggtatttacagagaagaaataaagttagaaagtaaaagaaggaaaaatgaatacgagtcagaaagtaaaatcaaggagaaatagacatcatcaatgtgtcatcgttcaaaagagactcaatgtcaataaatcgtcttcttcacagttgactgcttcttcttctttattgtttatagatgcacttgatgaagcctgcaacaacaatttatcacaagaatgctcaacaaaatatgattaactgattatgttatgggtcttgggtacctcattttcacggaagccctcaacaaccgttaggagtctacggtattgatcccgtgcttctgggtattgaaccatcgacttaacacgagtcagagccttctgtagcctttcctctgtttgttttcttccctctttaagataatcatactcatcttcctgtgggatcctaggacatatagctgatacaggcggttccggttccacggttttggcgactgcattgcgtttaaaccctctcaaaccattacctttgcgtctccaacgcaaaatgattttctcgagtaatcccacagaccagatgactgttcggtattgtttccggacctgatgtcctctcacatgagcctaaaggtaaatgtaatatgattccagcaatgagaaaccagacaaaagacttatgcaaagaaataagggggagaaaaaaaaactcaatgaaaggcaaacctgaattttaacgattctttgtcggattaaaagaaactcttttctcttcttccaaccacgatatttcttctggatatgggtagcagcacaactaagagagacatcaccctgtcctggattcttagttntagaagctgcaaaagaaacagctaactggtcggagatatcaatcttttcatcatcgccaatatcacacagctgtttccgttggaatgattgtttcctgaatacttgatggnnnnnntcagccgcttgcgtagcattacggacagcagtaagtgaatccttcaaggaaagtttctctggtacatcgccataggtcataggagcagcggttcgctcagagactgtttgaacagctttttctccacaagagttggcagggctattttcctttgagtccactgttagcttttcaagataactagttaaggaagactctgcaagaaatcccgaaattcccctgtgtccatttgcgtaagccaaatcagctgctgttttacccaatggaagctctggagatggatccgttaatgccccagcatcagcacctagagagacaagcacagcgacagtttcctccctatagttaacaggaaaaggagttagtttgatatggcaatgttgaccaaataatagagttaaagcatcatcaatgtgagcatcttaaacgaaacggctttctcgtttcttcagaaaacaaaaaatcttcggacgcgtggaagtctttttcatgtgtttatacgcgtgttgggttttgtctttcacaatttaacgaaagaagaattatattctagtaactttttgttatatgtctgtgtaacattttacaaaggttttccataactgaaagtactgtttctatttctgtttttttttgaacggttgatccgaaatggagatatcatttatgaaactcacggaaaaaatgttttgaactctggagcaaacaagaccaatgcatacgggacatagaaggtatctttggggctagcgggcggagatggacatgtagaatttcggcaagacgggttgattgtaacacttctgacccgagctagagcctagagtcaaatgtagtgtatatacgaaggaggaatgggaacaaaaggggaaaacggtgatttggtttcatttgagtttcgaaactatacatggtaaatggaaatgtcttgtaataatgccatttaggcgggtatggttaaaggtgataaaagaatggacttggttactgattggaaaagtaaaaatataggatatgacgactgacgtgtgaatgtatgctagttaggggcacttgcatag

SEQ ID NO: 15297 - DNA, 1801 bp, Arabidopsis thaliana landsberg
tctatgtaaaacaaaacgaaaaacttcgataactaatttgttatatgtagaaggatacttttgtcaatttacataaattatggagaaaaaactaataatataaaaactatgcatacatttttaattttgaagtcttctgaacataaatttttaattcaccctaaattcaaaaatttcaaacaagataacttgtgttggccaacactaatgtactctagagccaagaaatgttttcaattcatgtatttgtttgacgatcgacctaattccaaaatcaaatagatcaattacttaagatagtgaccctttttcacttaaataaatgaaaaaatattcaaagaatacacgatttacgacacgattttcatacgcaaaacacacttggaagtttggactatccatcaacttgagactttccctttttgtagtctgtccaattgacttaaatattattattattggaattatactattggtcgaaattttagcctcttaccattacctccacaatatctaatttaactttaaaaaaaaagtttattgacacaattaacttatagtactactgttgaattttttttttttttttttttaaaattagagctactttcttagaaaaatgttattttttacaaaaataaactcattcaattatatatataagaaaatatacattcgtttcagatatgaattggatcttcccaataatagagatacagttaatccaagatgaacaacatttatgaaattttaattttcctacaacatacatatattcagtgtatataacccaatattgacaaatactaaaatagaaaaaacgaataacaataaataaaagaattaaacccagtagagagtggccaacttggaccgagtcaagttacgttacatagtcactcaaaccccaccacttgacgcgtttctcgtccccacttcttcttcctcgcaactctttcactctgtttcacacacacattctcacatatatataacacaaactaactctaatcaccaaatcataaaccaaagcttctaaattcagtttcaatggcgatcattaaaccaaaccgagatctcaaaccggacggtgtcacagtcgtgactcgtgaagtctgggcggagaatctcgaatcagaatttgaattaatcagcgaaatcatcgacgattatccatttatctcaatggacacagaattccccggcgtgattttcaaatccgatctccggtttacgaatcccgacgatctttatactcttcttaaagctaacgttgacgctctcagcttaatccaagtcggtctcactctctctgatgttaacggtaacctcccagacctcggtgacgatctttaccgaggattcatctgggagtttaattttcgtgacttcgacgtggcgcgtgacgcacacgcgcctgattcgatcgagttgcttcgtcggcaagatatcgatttccagcggaatcgtcgcgacggtgttgagtcggagaggtttgcggagctgatgatgtcttcggggcttgtttgtaatgaggaagtgagctgggtgacgtttcatagcgcgtatgattttgggtacttgacgaagattctcacgcgccgagaattgcccggcgcgttgggggagtttaagcgcgtgatgagagtgttgttcaatgagcgtgagtatgctgcgaagcagataacgaaccagtgctacctatgcatagctgatgatttacaccactcaccgagtagatcccaccgcatcctctataagactcaggcttggtccttatattccctaacgatccctacca

SEQ ID NO: 15298 - DNA, 2746 bp, Arabidopsis thaliana landsberg
agggcactctcgctttagatgtccagtctttccgcaatagaaacaagtccttgtctcttcaccgagaaccttggactgtcctggttccattctctggcaactttggatcgcatggtccttgtttccacaccggccacatgcacctatggccttccagcaagttccgctgtggctcttaccacaggtcacgcattccccggtcttagcatcggacgtggtgttatcaaccttgtcaaatttccttttcttatctgcgggtttggtggattgattgttccggatcggtactttctcccggttcaagtacctctcctcctcgatcccttcctcaatcattgttgccctttcaaccaattcggaaaccgagttgaatgtccggaccaaacaatggttgcaccgtgcagttcccttgaactaggtcgaggtacgcacattcaagcctatcccaagcctccggtggaaagtacttcttgttaaactcgtcttcaaaatccgcaaaggaccggacctcgtcccctctgcgtttctcgacggttaaccaccagttatgggcgtctccttcaaggaagtggaccgcaatgtccctttggtaatcctcagggcagcggatagacttgaagttcctcttgagtctactcctccactcatcggccacaatcgggtccgtactgcccatgaagtgtctcgtgcccagccttgagacatgttcgagaagactcagatagtctcccctttttcgcccatgattcggttgcggattcacttccacaacttccgagtcatcgtccttttagttatccactctttggaccaccggatctgctacaatggccttggttaatgtggctagttgcgccatcattcctttcatcaaatcccactgttcttgggctgttggagtattgttccggttatccgtgctgtcccttgcaccgctactctccggtgcttcctcatttatggacttcttcccggcctcgggtccggccaagtctatcccatcgagcatcgtcccgactctcgttttctcgttgatcatcgtttcctcctcaaccaaaatctcctcgacaatgcccttgtccttcttactctttcccgttttgctactcttacccatctgcgaaacctccaaagttaatccacataactcctagtaaaatcgcaaaagagtaaagagcaactaccgcgagattctcaagccgacgagtggtgataccccttaacccaaacacctagtcctagaaccaagcatgctctgataccaacttgaaaggccccgatccggactgcctaaaatccaggcgagttctctcgacccaagccactaagtgactcggccctatccgtttatgaggttctttcctagtctaatccgtttcatatgattccgagattcaatatatgagacgaatagagtaaacaaacaatcggatactttattaattaagcaaaggattcgatacaacctatgagtttgcatataagctattataagtcatataatcgatccctagactatccgaactatcaccacccatcatcccggccttgagtctctcgcgcctaagccaagtccttcccacgatcaccattcgttcctgaaagtcatagagccataagtaatcttatttacttaatcatatgcaagtctatgcaatgctctttatgccatacactactcggatccgtggagagaattcagagaggggaagatcgcgcatcagtccggccgattctcggcaggtcagttaagacccgccggtcctccgccgagccgcgtccccgcctcagccaatccctacccggaccgagtcttgtgtaggatgcacatgacccggattctactcagccctctagtcggtcctttcaaggatccgacttttaactcacatcctagaacccttagactcaaagtctaggatcccttaccttccttctcgaggttaggtcgatccgaccctccttctttattgccggccacagcccggctaccgaatcctaagactatttattctcccaagagggagggagtttttaatggtgagtttcttgtgttttcggtgtgttgtcgtgagtggaatggtcctgggcgcccttccttatatagggggcgaatggatgcttcccgaatcaacacatccgttccttgcacctttccgaagagttgcacctttccgaagagttgcgcccttccgaagagttgcacctttccgaagagttgtatctcttcgcccataaccgcccagttcgtccgtcactcgcccatctacctcgagctcgtccgtcactcgtccagctacctcgagttcaaccgtcactcgtccagctgcctcgagctcgtccgtcactcgtccagctgcccgagctggactgtcactcgacctgagtaaccgtcactccttccagctgagcttgagctttgggcgagctgacccaagtgatttctttacgatcctagcttagcctgcatgatttcccctttgtccgagcttatggccagctccttctcacttgtccgagactccaccttcctctctcggaccaagtcctagccaacgatcctattgaggatcgcgggcgttacaggaactgtgacaggatctttgggtttgctttcttcagaagaagacttaaagatctcttcagaagaactctcaacttcgcttgaagaagcggttgctggactttccaaaggagccattggattttcttctttcagattctcgggtatgagtaccaagtggga

SEQ ID NO: 15299 - DNA, 540 bp, Arabidopsis thaliana landsberg
  unsure (1)..(540): unsure at all n locations
cttgacctgtccggtctgagggattggctaatttctgatattgttttggcttttgttttcagaggaccacctcgctctgatggagaccgtcccagatttggtgaccgtgatggataccgtggaggcccacgaggtggtgatgnnnnnnnnnnnnnnnnnnnnnnnnnnnnnnnnnctttccaagtaaatcttcgacttactaatcactcctagtttactgagcctatatgccttccacttactaatcactcctagttaactgtgccaatatgcttcgtttaaagtcttttagctagttgatgaagagattgtctaacagcgtgttgtatgttggcagggaggtggtggtaggcctggttttggccgtggtgcaggcggttacagtgcagcagcaccatctggttcagggttcccttgaaaaatttgttgtcatattgcgacgatggaaggacagttttgttttttgttctagttctgtttgtgtaatgcaaatctggaatctataatctatctattaccttcaccttggtttaaacgaac

SEQ ID NO: 15300 - DNA, 2448 bp, Arabidopsis thaliana landsberg
  unsure (1)..(2448): unsure at all n locations
gaatgtgctagtgacgaggctcataagacctggtggagagtgcacgacgcaatgcctgaaaacttgcataagttctgtctactaagatcgaaacagaaggcgcaacttgaatgggataggagacaagcagagaaagggaactacaaagatggacattggaagataaagatcaaagacaagagacttaagacttgtttcgaagatttctgcttttgggagagtatgctttggcattggggtgagacgaactctaccaacaattcttccaccaccaccacttcatcaccgccgcataaaaccgctctcccttccctgtgaattcttttggctttctggtttggtacaaattactctgcctttcgccaaccaaatgtgggttggatatgttcttttgtttttttattatcagcttgaaacctgtatacgaatcccagaaacaatgtaatcatgaggggataaaggaatgaaagacaaatgaagaatttacaggaagatgaagctttgcattcaaattttaaaactagagggcttttgttattccgttggacataaaagtcaactttatttatccttgagaaccggaaccgaaccgaaccgataaaattgattttagtgaggagaaccatagttttttagccgcattccattccaaaagatggcatagtaaatccagagaacgtctcttcttcttcttcacttgccggagaagatggatttgttgttctgtttccgaccgaatcagacttgtcggggaatttcagttttgcctgcttttagcataagcaatctttccgccgtcaatcgtttccgttcgacgacgagtcttcgttttggatttccggcgacgccgtttcgtcggactccaaactttaccttcaaaactcacgcgaagaggaagaataaaacgagtactttcgaaccgaaaccgaataaagtcgaagagttgatcattgaagaagaagaagaagaagaagaagaggagatagttcttcccgaagagattcaagagaatcaagacggtgtgttttggttccctttttgtttgtttgaatgtaatctgataattctctgcagcttgagtttgaattcaaccacttttctggtgatgtttggttctacagagttgctactggatgatgaatatgacgaagacgatgacgatgactttgagttcgatgagagcgaggaggagctctatgtaagtctacttatgttaaataacttaaatttgagagatttggaaagataaaacattttgcattctctcatctatggattaattctctctgaaggctggagatggtggtggtggaggaggcatcaaacttgctggaacattatgggacaaagtagcattagcattagctgtgaaagtttgtgagtcttttgatggtgatttaggcatttatgccttcaagactctgccaaattcaaccatacaagtgagaatcgagcggctcactaacaagtttggttcaccaacaatggaagacattgaagcattttcaacaatctaccgagcaaaattggctgaagcagaactcgccaagtcaataccggacaatatctctctagaggttagttaattagttagccttttattattcctgtggattttggttcattgactcaacaaagattgaacctttgtgtacaggtttcatctcctggtgtcgaaagggtagtacgaattccgcaggatcttgatcggtataaggatagaccgatgtacgtgaggtacactaacgaggacactgagaccgaaggtgatggtattttcaggctggtttctttcgatgtggaagctaaaatctgcatttggggcatagcagatataagagtaaaccgagaaaaggccggcaaaggaagacctttgagcaagaagcaaagagaatggcgactcgaaacggctttcgagtcactacggttagtccgtttgcattctgaatgttgagaacacagtaaaatggaatgtgttttagtttatattcaaatctcaatagaagaagagtctattacaatgataagtaatagattagacacgaaaacgactaacttaagacagagaagaaaaccaaaagcgatggagatttctttcttttattgctgtgaatgcataaaggaagtaaaacacaaagtgaacatcatctgcgagagaatggcttcaagcacccatggtgatgatgcaacgaatactctctcccttcagcatgtaatcaaaggccttgttgatttccgagaatggcactgtgtgagtgatgaatttctcaagctccagctcctatgtcataaaaatcatcagaacattgatatatattcaaagttggcatcataagatatcaaagcttctcattaccttgttcatgtacttttccacaaccccgggaatgtcagttttgggtttgtagntcccgcagaatgtaccctcaagagatcctattattcaag

SEQ ID NO: 15301 - DNA, 582 bp, Arabidopsis thaliana landsberg
gagaagcatacaagaacaagaagctcttgcctcttgatttttgtcccaagaaaacacgagctatccgtagacgtctcaccaagcatcaggtctttacccgaattaccatttccaattatataatgttcttttgaattggatagcaaattagcaatcataataacttatggtgtttgtggtaacaggcttcgttgaagacagagcgtgagaagaagaaggagatgtatttcccagtgaggaagtacgctatcaaagtgtagtttcattctcccagctctagcttctagaaatgaatgattcagcctttgattatcggcttatgttatctcctctttttttgtccaaccttattaattttagttgtactgaagttttgttatcacacaacctctctaaaatcattagtatttcataaatattgaatttattctgggttttgttgtctctttggtaaattttgatttttcggttgtttagagttaagggacgattgaatgaaggattgtaaacgaacatggttgatttatacggagaatttctgatacgtatcggccaaaatagattaaatcaggaaaaagaaaa

SEQ ID NO: 15302 - DNA, 1655 bp, Arabidopsis thaliana landsberg
cgctattacgatttattaacagcgacaaggcagagatatagcgtgagagagagagagagagagagagaagagagaattctctttatcttgttttttgctatttttgaaatatttctctaatttttcttctttaattcaaaggatagaaagagagatagagcatgtgatcttctgtatgtggagctgtgaactcaaaaaacatttaaatcttaactttttcagctttttttaaggaattattatttttgtgtatataaatgtaaggaattaaaagttaaaacgtaatttcgtactaattaatttgaattattgacatttaaagtgcttataacaattcccgccccagaatacattattgacaataatttaggataattaaattacgaatttagaaagcagcttttgaatttaaggaagttgtaacggttttaataataatgtgattaaagaagagctcacgcgtctcgctgactctggtcattgggttcactgacaaaatcagtgagattcacaatttatcctgcggtttagattgctcccatctctcactctgctttcaactcttttttttttttttctgttaagtacaatataattaatttatacactaatctccaatttatcttttcttaattgttggtagttggtaagattaactttattttcactccagattacaattaatagtcactttccttttgtcgtttatctcgagtcccaaaaacaaataaactaaaaactatatgcataggcttaatgacgtggtttgataaaggcccattaagttgtatagacatggtctcaaagcctaaaaagattgttgagagtaagagacccattactctgttttttctgtctcgtcctagttcccacacaaattacacgaaaagacagaaacatcaatgagaaaagagataactattcttagaattaagtttttgtgcatctgttaagtctttcgaatgcatcgagacgtaaaaaaaaaaaaagtaaaggaagaagaaaagtttaggcatataacttggtgagatcttcagagaattccctcctaattacatctcttttcagctttagagctgctgtgactaatcctgactctggcgtccatggagatgccaataatttgatctttgctggtatctcaaacttctccaatcgtgattgtttagccgcctgcataacacagatgttataaggaaatgactgggggactcaaatagcttggtaatgagtagcaatgaacataccttcacaagggacgcatacacttctttcacggcttgctctttcgtgcacagttcttcgaagttggcaaagtctattccttgctttgaagcccaaccttcaactgtatgttgggacgcgaccacaagagccacacagtaactgtagaacgaatcagcatgaaccattatgttttcaacatagggacttatacttagagcagcttcaacctgcgaaaaaaaagaatgttttaagaagcttctccggagaattgagtgatgaagacaaaaaagggtattcggattgagaaaactatactttgcccaaggagacatattctccatgctgaagtttaacgatatccttttttcggtctactatctcgaggcagccatcagggtgaaatcgtcctatgtatcctgtgtagggcc

SEQ ID NO: 15303 - DNA, 878 bp, Arabidopsis thaliana landsberg
cagccccataaatcctccctttcttcttaggagcaacctgtcagaaactcacaaccaaaccaagcaaacataatcaaagcaaagtagaaaaactaagacataatggaaaacacgcaagctttagacataatgatcttaggcctaatggaaaacacgcaagcttcagtttgaaacacaatgacacaatgcaagccacaacagacaaacacaaagcaacatacaaaactgaaactatcccattagacagtttttagctttagacatagtcatattaggccgacaatacaatgatttcattcaaaccaacaacaactgaatcaggccaaaaacacaaagacacaacatattcaattcagtttgaaacacaatgacacaatgcaagctactacagacaaacacaaagcaacatacaaaactgaaactatcccattaaacagtttttagcttcagacatagtcatatttggccgacaatacaatgatttcattcaaaccaacaccaactgaataaggccaaaaacacaaagacacaacatattcaattcagtttgaaactgcaactatcccatcaaagacataatgcaagccaaaacaaaccaatccaaagcaacaaaaaaatgttgtcttctatattgggttgaaagggataaattacttgtgcatagatcttgttctttgcctgaacagataacccgcctgaacccgtgctctctgtagtgtcgcctgaacacagaagtgactcttcctcctgaatctttgatgacacttccttatagatttcctcgactttctatcgatgaaactccatcaagttcctgtgtgttcatcgtagaggaggagaaagctggagtctttctcatgcatgcacactgaacaggg

SEQ ID NO: 15304 - DNA, 1315 bp, Arabidopsis thaliana landsberg
ggtctgatcccagatgttttattcgggttgaagaatctcaccgagttttatctcttcgctaatggcttatctggagaaatccccaaatcaatttcggcgacgaacttggtatttcttgatctctctgctaataatttaaccggttcgattccggtatcaatcggaaatctaacgaaattacaagtgttaaacctcttcaacaacaagttaaccggagaaattccaccggttatcggaaaactaccgggattgaaggagtttaaaatcttcaccaacaagttaaccggagaaatacctgcagagattggagttcattcaaagctggagagattcgaagtttcggagaatcagttaaccggaaagttaccgaaaaatttgtgcaaaggtggtaaacttcaaggagtggttgtgtactcaaacaatcttaccggagaaatccctgagtcgctcggagattgtggaacgctcttgactgttcagttacagaacaatgacttctccggcaagtttccttctcggatctggaatgcttcaagtatgtatagtctacaggtgagtaacaactcattcaccggagagttaccggagaatgttgcttggaatatgtcgaggatcgagattgataacaatcgattttccggtgagattccgaagaaaatcggtacttggtcttccttagttgagtttaaggcgggaaacaatcagttttctggtgagtttccgaaggaattgacttctctttcgaatctcatatcgatctttctcgatgagaatgatctcaccggtgaattaccggatgagatcatctcatggaagtcgttgataacgttaagtttatccaagaacaagctttccggggaaattccgagagctttaggatagttgccacgtctgctcaatcttgatctatcggagaatcaattctccggtggaatcccaccggagattgggagcctgaagctgacaacatttaatgtgtcatcaaatagactcactggaggaataccagagcaacttgatactcttgcttacgagagaagtttcttgaacaactctaatctttgtgcagacaacccggttctcagcttaccggattgtcggaatcagcgccggggatcaagagggttctccgggaaaatcctcgcgatgattctagtcatcgcggttctgcttctcaccattactctgtttgttacgttctttgtggttagggactacacaaggaaacaaagaagaagaggtctagagacgtggaaactcacttcatttcatagagtagattatgcggccccagacatcgcgtcgaatctgatgg

SEQ ID NO: 15305 - DNA, 1388 bp, Arabidopsis thaliana landsberg
tcgatcaaccactgacaataataacaaagaagccactaataaatatgcacgatgactattttctaaatcaaacgtcatattttattcagattcgagaaatgactgggaaaaagaaaacacttttgaacaagatagactaatcataatcaggtgagatttgtgactttcacaaaataattctccatcttaattgttcgcatcttcattggatcccttttacactttttttttttttctttcattggatccatctagtttgcactacttatatatgtggtatatataaactttaattttgaaagtgtaataaatttagagtgatatcatttagccccccgatggaggattgaattgtctcgaactaatgcgtaatgcaacactatggttttgaatagtgaaataggaagatgcgaataaaaaatagaaacgtataaacgaaaacaatagtgtatgtaattaggtgaaaccgtgaaagtggcgaacgaatcattagcatataagaagaagattgtgtccaccctgagttagatacgaatactttatgtgtgaaatctaattgttcacgatttgactcttcagagtttaaaggctggctaacaagtttaagctgcgttttagggtttgggccaataaattcagcaatgaaccggttttaatggcattaatagcccatagtgaatgttgcaatcaagaaatagttataaaaccatgtacatgggtgatatttttagattatcacaagtacaaaaattatttttatattagtaaagcaattagaatatgcttatcagtatcagcccactgatatttgtgataccagtatcatctgacgtggcttcttctgattggttacatttgacaaaagcaaaaaatattatatatatttattaaacaaacattataaataatactaaaaaatattcttgatgatattttgtgagtatcacctatgaacatgctctaaagatcaatatcttaaaacaaatttagtgatataattaattgaaaaagtttgtattttctggactgaatcacactagggtttgtgtgatttctggtgtaagaaggtaaaaggaggtagttatcagatgggcccacttgaaatcatttcactgggcctaaacaaatataaagcccatttatcatttatggcctttttcagtctcctcccgagatttaaaaccctagttggttgatcttctccaacggggaatggaatcggagagtgactaaagtcgtgtgtggatcctaaatccttattcgggtctccgaatcggatcctcggagttaagccttacaaaatgaagatgctaatggttctgttttctttatttggaacctgagtattgcatgcacaccaaagtgtttggcaaaatgttagagtgaga

SEQ ID NO: 15306 - DNA, 2026 bp, Arabidopsis thaliana landsberg
tggctgtgttttgtctggtttacttgcagagtttgatatctccaacaccaggaaggtttccattgcaaggctttaatggaacaacaaacaatcactttagattttccctggcagggacaatctcaaccatcaaacgcttcttctgtatgtgtttccttattagcgttttgaaacatcttcacttgctttgtattgatgaatcaaacttagtttcgttttttgttattttccaggctttgcaagaaacatatggtgttcaagatcacgagaagaagcaggagatgattcctaatgagattgaaacacaaaacaacaatcaaagttttggaacagaacgtcagataaagataccagcatacatggtgagtaggaactctaatgatggttatggttggagaaaatacggtcagaaacaagtgaagaagagcgaaaaccctaggagttacttcaagtgtacgtatcctgattgtgtttccaagaagattgttgagacggcttctgatggacagatcactgagatcatttataaaggtggtcataatcatcctaagcctgagttcaccaagagaccatctcaatcttcattaccatcatcggttaatgggaggcgcttgtttaatcctgcttctgttgttagtgaacctcatgatcaatcagagaactcttcgatttcgtttgactatagtgatcttgagcagaaaagttttaaatcagagtatggtgagatagatgaagaggaggaacaacctgagatgaagaggatgtaagtagttttttttaattagtggaagcaaaaggtttcttcttgggttttggaaatgacatgttttgagttttgtgtaacaggaaaagagaaggtgaagatgaagggatgtctatagaagtaagcaaaggagttaaagagccaagagttgtggttcagacaatcagtgatattgatgttcttatagatggctttagatggaggaaatatggtcaaaaagttgtcaaaggaaatactaatccaaggttgtttatacaaaacttagtttctcaaattgttaacatgtttcaagtttctaatcctctctttgttgtaacaggagctactacaagtgcacattccaaggttgtggagtgaagaagcaagtggaaagatccgcagcagacgagagagcagttctcactacctatgaaggaagacacaatcacgatatcccaaccgcgctacgtcgctcgtaaaattattgggacttagtcactagtaatatgatttaggctttctaaaaacaaaaaatcttactatggcttatcttttgtgctcattcacagtttgtttatttgtttgttacacagtcaatactttgttttgtacagagtggtgcttagtagtgtttttattattatcttggccttatagaataacctctcttctcatctgtgtgactttaaacacttgagagtccattttatagttcttgtgtattggtcttttgtttgatttatgtacatttttaatattcaaatttgataaagcaataataatggtttgtaacccactttgcttgattggtgcaacacatctagcattctatctccacattgtgtgagttcattttctttattattagaacttagaagtgaaaccaaaaccacaaatttagaatggttgagattatgaggaaagatgatcaaccaaacataaaaatagcaagaaccaataaatagaaacaacaaatataggctcatctttcttctacattctctcacatacctctctatctctctctctttgatctcaccaaagtcgaagaaccaatctatcttttgtgtatttactgataagaagaagttagccttcatagccacaagtaaaaacagagtcctctgttttcttctctcattctcccttacattttctcatcaaaaatgaaaacataacattgatagtctcccaaaacctagtctctctccctcaatcatctcgctttcttcgttttacagataagcaaaagactatggagctttcgatgttggcagaaaggat

SEQ ID NO: 15307 - DNA, 2482 bp, Arabidopsis thaliana landsberg
tttgtgtctgaacaacgagaggcgggatctttgaggtcttttctcgctgacctaagtagctaaacatcatggaaacttataactttccttctcatcttaccatagcctctctctcacaaaattcacataaagtatactagcaaacccttatgaagcagagtttcttctataactagcacagccaatcgacagaatcaacaataaaaaatttagctaatcttgtgatttcaagtattcataagtcagaacttctcaagtctgagagaaattccacctttacacataaaaatccctaaggtaatgtctttatagatatactcagattctgcttacacataaggttatgttcataaaaagagtgtgcatacataaccacagatgcacaagcataactaataaagttctttctagtcctaaccaatattcccaagacctctatggtcagacacttataaaattcaatttgttaaacgaagagagaaagacttgtaaaaatccaagtatcatgccaatcctagtataattcattaatcgttgtacctggccagcgccgagaagtgaactaggcggaagtggtgatcgattcccaggatcagttcctaaatggcaacaaatctcaacaaatgagcgagagagccacaaagagggaacataaacaaacagaattcaaaacttgaagaagcgatcaaaaacctgaaacttgagcaggcgtgttgctctcaacaactctcaccggcattttcttccgtctcctcctttccgtctgataaaaatccgatctttggtgcgaccaaatcaaatcgtggagcctaatcaataaccacatctcatcatacccggttcggttttcttaaccgaatcaaattatacataaaacggattaggcttctccggttttcgactgcgttttgtataaaacctctcaaaaaccttttcttctctccccgtcagaccgatcttctctctcctcgccgccgcctccaagctttttttccacctctattatcgaacttgctttataaaaatctaacctttggacctgactttccgacttctctctctgtctagctgcttctctcacccaggtttgccttcctctcaagttgaagctgcggctttattagtttagctattgactctaagaatgttacttgaatccattcacatgagcttcttacgtcgttttcattggtttagctattgacgttgacttgggttttgcttgagttcattctctattgtggtctaccatactttttcatgttacttgattgcatatttataaaacggtgctaaaagtattccgttttgtatagcattctagatgttgcttttgaaacaaagctcagctgctgttcttgtcgttggaaatacaactccagtccttcacacttctcgctccacctacagagttggaccttttccagtgaccagaacgcagtcgttccagagtttgactatggcaaatttgcagaagcttcccacttcttcgtctgggaaattgaatacggcttcagctgtgccctgtagctctcacgatgcttctcctatcaggtacctatgtcccctgtattgagtataatggtgtcaaccattcttcttaagtattttctcgattcttattattttcttggctattgtggcgtgttaaaagataaacgagattggatcaattaagctgaaagttgaaagtcgttgtatttaaaccacatatcaattaagcctgcatatattaatctgtgaaaatgaagaaaaatttctcttttcttgtaagtttcatggacatgagaagttgcatagctgttgtggataagattgcatcacaccaattgcaatgacgaataaaatatagaaactagctgtgcttccctgctcgtttctctgttactagacacaaagatttgaaaatagtaagactggggaaggaatttctaatgttatttatctttcctctttgcaagtgagaatcgcgagaataaacatgtccatggagtttctgagaaaattgtgggagttcttgggggtggacaattgggtcgtatgctttgccaagctgcttctcagttggctatcaaagtgatgattttagatccttctaaaaattgttcagcaagtgcattgtcctacggtcacatggttgatagctttgacgacagtgctacagtagaagaatttgcaaaaaggtctcttcttttgtttgtttcttgaatgcttcaggttctcaattcttattttcattacaatattaatggttatttttgtttattgtcgtagttagatgtggagtcttaactgtagaaattgaacatgttgacgtggacacactagagaagcttgagaaacaaggagtggattgccaacccaaagcttctactattaggataatacaggtttcataacctctcaaatatttcatcaaatggagttatgtatagtcaaagtttttcagcaattttatttatatgtggcagtttgatgttcc

SEQ ID NO: 15308 - DNA, 1856 bp, Arabidopsis thaliana landsberg
  unsure (1)..(1856): unsure at all n locations
caaaatataaaaagtttgggtttttagagaagagatgagatggagatacatgagaaactgaggttaaggagaagaagatcccgacgacgaagacaagaagaagtagagtgaaacgaagagtcgccatagttgaaccttagtgttcttcacttgatttcaccactctctgtcctgcgagagagagagagaaacttgaggatttataaattgaaacagttagcacaattgcacaatcaattggtttggttcggttcgattcggtttgcattggtttatccggattgaacatctctaggaattggttttactttagaaatgagaaagaagacatgaagatcatctttctcatttgatctttgataataaaaggggtacacattaagattatgacaatcttcataaatcataatcgaaaacgaaggaacattaatggatcaccagattcttatgtacacttaatcaaaggtctgggatcactctctccctctgtacacccgtatttatgtttcgggataaaatcatatcaagtactcgttgtagactaagaaggccgcttctggataatccttaggaaggctattgatgtggaggtagaaccgaagaagatcctctttggtgaccgtctctggatccaccacatcttcatcgcaagttagcacccacagatcctctgagttcactctcttgatgctgccacgacannnnnnnnnnnnnnnnnnnnnnnnnnnnnagttacggtaacatttgatgcacatggcatgacaaaagtttggcaacaccattttggtgcaaggctctaagcaaatcgcgcattcgtcttctctttccaagtcaatgctattcataaatctgctaccttcaatgtcatactgcttttaggtgatggcttttggattcggataccacaagctttcatccaataagtcaacaaagttgatatgaagtctctcaagtaacggtaatataacacttgcacttagccagccatgttgtaagattaacccactaataaaaaaaaaacacaatggcatcaaaagggcttcttagtcttaccgtaaaacttcctaatcgtatttttccttccgtgcctggatagattctacagcccatcagcacgtacatgtgcgatacaaagaagacacctataaaacaaataaatcaagaggaaaggggaaaaactatcagggaatctaccaatccacacacacaactccagacattgtacacatcatcaaatctaactaatgttgggaatatcctaaaatcgtttgtactttactctagttaaagttataatgtcgaggtttgacatattagatggttataatgttttgctagagaccgcttataatctatgagtttaattttgattaacctaatattagattaaaagattattttatatatatataatatataaattaaagtaaaagtatataatatatatgatatatagatatacttatatttgtatttgagcacttaaataaataatgttatatatgtatataagatatacatatgtgcactaatacgaatatgtggtttattctcgtagagaaagtgacattgcatggattgggcttggcccattgactttataggcattaggttacttgaacctattataaaagtgatgcattatgacttttgagatgcagccgtttttgataaaaccctaaaaacaaagagacaaattgtttttctaagttttgagattagatctggttatgtttatctaatgaaacataaatcggaatcctttgaaaagttcaaggagttctaaaatgaagtacaaaatcaacttggcaaatcaataaaagctctacgatcagatcaaggaggagaatatttga

SEQ ID NO: 15309 - DNA, 3052 bp, Arabidopsis thaliana landsberg
tgagcaggactcagaagttaagaaaacgttctatagtcgtgacatcactaaaaaggttaagtataacactaatttcgatctctatagctctcaagctgcgaattggagagatactttaactatggttatggctcctgatgttccacaagcaggggacttacccgtgatttgtcggtatggttgttttcttctttttgttaaattatattcaaagaaaaaataaacttttttacattttagtgcaaactttttgtgggcaaagtattaagtcctgtgtaattttaattttacctatttgtgggaatagtatgaatggtataatacagcggaattcatatttacaacgtgaaaatgaataccattcatcaccataatgatttgcttttttagctaaatccataatgataccctcatgttattatgttatgttgaaaatcttggttggtgtgatttgctttttaagctaaattcatttacaaaatttcgagtttggaggtttgttcgatttcgaggtgagaaatttcggtctggttcggttataagaaactttccaactaataacgaactctggtggtgaatatttcagagaaatcatgttggagtactccaagcgaatgatgaagttaggggagctaatctttgagcttttatcagaagctcttggtttaaaacctaaccaccttaaagagctaaattgcgcaaagagtttgtcgttgctctcccattactacccgccttgtccagagcctgaccgaacctttggtatcagttcacatacagatatctcttttatcactattcttcttcaagaccacattggaggacttcaagttctccatgatggttactggatcgatgttcctcctaatcccgaagctctaatcgttaaccttggagatcttttacaggcaaatattttttaagaaacttgatacaccaattgaatcttgcatatcttgacaaatctcaaaacgttttttttaatgattgcttgcagcttataacaaacgataagtttgtaagtgtggagcacagggttttggcaaatagaggcgaagaacctcgcatttcaagcgcatctttcttcatgcacaccataccaaatgagcaagtatatggacctatgaaagagcttctatctaaacaaaaccttcccaagtatagagacactaccgtcactgagtacacgagtcattacatggcaagaggactttatggaaattctgtgttgcttgatttcaagatctgataaaataaactttggagtttaccacctcaggtcttctacagtttcacttgattgttccgtaccttatgaaagaaagcttctcgcacactcaaacaaatgtactcatgatgctattaatttaggcaatgagttgggatatgttatacatttggtagtcgggcttattgaataatcttatattactcatgatgctatgtttatttttcaaggaaccctagtaagtaatcccttagccggtgcaaaaatcattacagttaacaatgtcgaacacgagttatcgccataagaacctttattgcaagaccaaagaacgatagcgagatctattactaacaaaagcgatttgcatatattgaatcatttccatttttttagtggtgcattcggagttgccaatggcaagatcaaatagagaataaaggtgatgagcgtcatgttcatcctcatcgatctgaagttggacggtggaggacggccacaagataagaaaatggtcagaaaattagagttgaaatatttgagcttatagcaaaacaaaattgagagttgatatatcaagactcttgattgttgataccataacgaccttatgaaaaatatgatatcaatttcttttctttacgatacgaatccatgcattaacaaatagattttcatttttcaagaccggtgaacacaaaaggatgaagcattttatttggctttagcgtgagcactggtgaagtgttagcaattcaagcccctataatcaaggtgccataattttaagaaaatgcaacaaaatatctctcacagctcaaaaaaaaacagtagtttacaaaatactgtatgcggttctcaaaaattgatatataaaaggacaaaaaataatgtgttacacgaatatattttgttttgctctagagcgaattgtactatactaaaaaaaaacacagaagtatgctagaattattaaaaagggtccaatctagtttttgtttgcttcgtacaaggtcccagaatgttttaggaccgagtgaccgaccaagatggattcaaggacagtattacatggctttatgagatataaacatcattacatcaaccaaaagttgagaaataatatagtattatttcaactttgaaattgtatgattcacatttaacacacacaccaaatacttttgttttgttatatacacggagagctcacgtacctctgattcaacaaaatacattacggagcacacacgtctgtgtagctctttctttcaacattttctaccttcttgtcaaagaaagagagacacaatggcgggcaactatgatcgtgctggtgaggtaaaagcattcgaccagatgaagatcggcgtgaagggtcttgtcgacgccggaatcacaaaagttcctcgcattttccatcaccaagatgtggccgttacaaaccctaaaccttcctcaacgttagaaattccaacaatcgatgttggaggtggcgtgttcgagtccacggtcacgcgaaagagcgtgatcgcgaaagtgagagctgcggttgagaagttcgggttctttcaggtgattaaccatgggattccactcgaggtgatggagagtatgaaagatgggattcgtgggtttcatgagcaggactcagaagttaagaaaacgttctatagtcgtgacatcactaaaaaggttaagtataacactaatttcgatctctatagctctcaagctgcgaattggagagatcctttaactatggttatgctctgatgtataaacaagcaggggacttacccgtgatttgtcggtatggttgtt

SEQ ID NO: 15310 - DNA, 2142 bp, Arabidopsis thaliana landsberg
atggcggaaatgcagaaaaatgtggtggattcgtcgtcggaggtttatacgaatccggcggcaatggtggttttagggattgtggaataataacacctaaggttgagtagttttggtttagggttaaaacttgaatcgattggggattttcaagagcattcatttttggggtttatggtaaaattaaaaacaaaaaaaaaatgtacagaggaattaaaatttctatggaataatcttaaatctcaaatatttgttacttgttttggtgattcataaccaaaatctataacaagtctaaatctaaaaattgaaccttgattagtgagacattatcatacaaagagacatactgagttagtcaacaaaatgtaggataactacattcttacatattgtatagatgaatttcatgttaatcctttcatagagctatacagtaaccatgattagtgagaccttgtaacatgtagtatcaaaatcaacaaaggtatagatttaacatctatttgaaaatcattcgaaccttttatttgaaaatcttttgcttgttgtaagagatttactctatagtctatagatagtaattaaaccttttctataggtttggtagataacttcacttttatataaaattaattactgtcaaatcggatttttgttaacataattatttttcgacaatttagaaattctcgtaaaaattagatcaatctttctacagtcttacaaaaaataaatacattttctagaaaatcagtttttttttttcgttttaaatctataaaaaaactgacaacaacaaaacaatacatactttttaattactatagagtaaaatctcttacaacatgccaaagatttcaaataaattgtaggaagatttttatgttatttaaccattctacagtataaataaacactggtacagcgatgttaaaaagtagaggttaaaaaaacgcgttaaaaacacaaaagctacgtcgtttcaataactgggttttgtctcaaagaaagctgcttttggttcccgtagatctaaagttacgttcgagtctcccctcttctctccactcactcagctcttttgattcccctccaattttctccgacggtacggtcgaaaaatccaaccggagatcaaatggcactgccgtcgatctcatcaatcggcgcgacgttctcactcctaatctatttctctcttccttattcaatcacagctggtgaaaacaaccttctccaccaatcttcaaccgctagatcacgacgtcccatggtgttcccattgttcctctctcaaccaaattcttcttcgagatccatatcaatcccacatcgaaaactccacaaatccgactcaaaatcacttcctcactctcgcatgagactctacgacgatcttcttattaatgggtaatctccttttccatatttcccgatctgggtcatgtaaagatgtctcttttatatactattatatcgtatttgtaggtattacactacgaggctttggattggtacaccaccacaaatgtttgctcttatagttgattctggtagtactgttacttatgttccttgttctgattgtgaacaatgtggcaaacaccaggtaatgatggctctagatatccaaatcttgtgtcttgtctcgtgtaaagttgcaaattttgaaactttcttatggttattgatcaggacccaaaatttcagccagaaatgtctagcacttatcaacctgttaagtgtaacatggattgtaattgtgatgatgatagagaacaatgtgtttacgagagagagtatgctgaacatagtagtagtaaaggtgttcttggagaagatcttatttcatttggcaatgaaagccagctaacacctcaacgagctgttttcggttgtgaaactgttgaaaccggtgatctttatagtcaacgtgctgatgggattattggattaggtcaaggagatcttagtcttgttgatcaattggtggataaaggtttgataagcaactcttttggtttgtgttatggagggatggatgttggtggtggttcgatgattcttggcggttttgattatccatctgatatggtgtttacggactcggaccctgatcgtaggtatgtttccaaggga

SEQ ID NO: 15311 - DNA, 2783 bp, Arabidopsis thaliana landsberg
aagatttaaagaaagatgagactctgaattctctacttcaagggttccgatgttcaaagtgttatttatttatcgaacgcgaagatgaaaagcatttcagaatcatagagactccagagatggtgatattgaaaatggatcatcatcgtgattactttaaccttcaatctttatattttaatcttctctatgatgagtcttctgaagagactcagctagcctgcgtagaagtaataaggagaattcttggccacacatccccagatattctggtaagaacaaggtctcaatggatcaggtgccttcaatatctgttagttcatgtaaatacagacgtaagggaagcattctgtgctcagattggtatcttcgtacagcatcctattgtgagctgtttgtttcttagtgaagatgctacggagaaaagttgcgaaagaaatttttttaatttgattgagcattctctagcagcagctaaggatcttcttgttatccagactctactggaaacgacagctgaagttatggtagctgttgatgttaccagtgagcttttcttgatttgtcttttcctgctgattgatcagcttgatcatccaaacttgatcgtacgaataaatgcgtcaaagttaataaatcggtcatgctacatccacgtgaaagggggatttgcaactctactttccacagcctctcatattcaaaatgagttgtttgataatctatctgtcaggctgaccagccgtccaaatgtggtaagagaatttgcagaagctgttttgggtgttgaaactgaagaacttgtgaggaaaatggtccctgctgttcttcctaagctcttggtgtattggcaggaaaatgctcaagcagccaataccttgaacgaactggccaagttaatagacacagatgtggtacctctaatagtaaattggctacccagagttcttgcatttgctctgaatcaagaagaggacaagaatttgctctcagttttgcaattgtatcactcacagattggttctgacaaccaagaaatttttgctgctgcattacctgcactcttagatgagcttgtatgctttgtggacattgctgatacacctgagacagatagacggtatgtactcacatagcttcatactttttgagcagaaattggtagttggaaatagcatgaaagttttctaaaaattttcttctggtaaattcttcggttcagttgtatctgttggggagcaagccacctatttgctctaagaactagaatttctctgcgtgtgttttgctctttcttgtgctctttcacatttacatgtcaacagaaattgctagaggttgtttgttttttaaagctgcgagaggaaaatgcattcatcatttttaaaaaataactgaacgtcctgatgcttttttgttttgtatgacatttgatttcactattttgcttatgcaggctacagagactgcctgatgcaataaagaagatctcaaaagttttaacaaatgccgaagatcttcctggattcttacaaaaccattttgttggactccttaacagtattgacagaaaaatgcttcatgcagatgacatttttcttcaaaaacaagcactgaagcgtattaagctgctcattgagatgatgggccattatctcagcacatatgttcctaagcttatggttctccttatgcatgccattgaaaaagatgcacttcagagcgagggtctcttggtcttgcatttttttacaagaaagttggctgatgtatcgccatctagcataaagtatgtgatttctcaggtttttgcggcactcatccccttcttagagaaagagaaggaaggtccccatgtatatttagatgaagtggtgaaaattcttgaagaacttgttttgaagaatagagatatagtaaaagagcatatttgtgagtttcccctcttacctagcataccatctttaggagaattaaacaatgctattcaagaagcacgtggattaatgagcctgaaggatcagttgcgggatattgtaaatggtatgaaacacgagaacctgaatgttagatacatggtggcatgtgagctaagcaaactgctgtatcacagaaatgaagatgttgctgcactgattgccggtgaacttgtctcagacatggagatcttgagctctttaatcacatatttactacaggggtgtgcagaagaatctcgaactacagtgggccagaggttgaagttagtctgtgcagattgtcttggagcaataggtgctattgaccctgccaaagtgagagttgcttcatgcagtcgttttaaaatccaatgctcagatgatgatcttatctttgagctcattcacaaacacttggcaagagcttttagagctgcacaggatacaataatacaagactcagctgctcttgccatacaggaactactaaagattgctggttgtgagccatcattagctgggaatgttgttgtgttgaccccccaggagcatgtacaagtcaatgtatctggttctagaagatgtggaggtaacaatgaagtgaaggataggggacaaaaactatgggatcggttctcaaactatgttaaagaactaatagctccctgcttgacttcaaggtttcagcttccaaatgtgtctgaccctggatcagctggaccaatttatcggccttctatgtcattaagaaggcggctatcctactggataaggaaattgacagcaattgcaactggatcccgtgtaagcatatttgctgcttcc

SEQ ID NO: 15312 - DNA, 4005 bp, Arabidopsis thaliana landsberg
  unsure (1)..(4005): unsure at all n locations
aaatagtaaattgaacttagcaaaaaaaaaaaagatgtcttgttggataatccaaggttcttttctatataagggttctttgctcatgatcttagtccctgtgatctatctttgaatctcaaaagcatacttgagagagatctgtttcgataatttgcttcaatcaccgtgttaatggcggccgtaggagtggaggcgagacctcctgtgacagcgatggaggaaacctgcaacgttaagggagcggcggcgaaacaaggagaagggcttaacaagtactacctccagcatctcgatgagctccagcgcctgcaacgcgaaaagtcgtataaccttaatcgtcttgaagctcagaggaatgaactcaattctcgaggtctctttttccttctctaactctaattttcattgaatttctttgcaaaattggatcttttgatcatcttcttaagtttagtaatctcgaattccatattaggactttagatttcgtctgggtgctttaaatttataaattgttgctgtgattgtttggattgagggtttctgatcttttccagaactggatctaaactatgctgcgccttgatttttagcatcactaagttaccctattgagatttcttcttgattctgtttgtgttgagtatgaatcagcttctgtcaatatttgattgtttagcaaagtatgtagtgattgatacaatcgatgtatactgctgaacattttaaaccttgttgtcattgtaaactgaacagtacgaatgctcagagaagagttacagctccttcaagaacctgggtcctatgtgggtgaagtggtaaaagtgatgggaaaaaacaaggtcttggttaaggtatgaatgtttttatcgtattatctagattggtttttgaattgtttgcaatcatatgaacattgatagaataatactttcccatgtttcaggttcatccagaggggaagtatgttgtcgatattgacaaaagtatagacataacgaaactcactccatcaacgagagttgctctccgtaatgatagctatgttctccacctggttctgccaagtaaagtagatcccttggttaaccttatgaaagttgagaaggttccagactccacatatgacatgattggtggtcttgaccagcaaatcaaggaaataaaggaggtatgcatagtgaaagaaacaaacgatactaaaagtcactggtttcatgcttttaaattttatataatatctttactggttnnnnnnnnnnnnnnnnnnccaatcaagcatcctgaattgtttgagtctcttggaattgcgcagccaaaggtacacttgaatttcaaagcttatctatattgtgacgctgctaagtggatttcgaactgattgcttctccctctcttttaagggtgtgttgttgtacggtccacctggaactgggaagacactattggctcgggctgtggcacatcacactgactgtactttcatcagagtttctggttctgagctggtccagaaatacattggagaaggttctagaatggtcagagaactttttgtgatggcaaggtttgtacatgctagtccttatttaatatttcaagcatggtaaaagtggtaggttggaaaagatggaacttttgacacgataaatcttttacatgcccgtgcttagtagctgtagtggacatgtggagtaaaataaattgagtaaattgttctctgttcctgctatgaatatggtttcaacatgtatacgatctcaagcataatgatctttacaagtagtctcgatgcctagcatttaggccacagtaatagtcttttgtaatgagcaaagtatacaccattaatcatcttcattgtgctgaaaaatacttattccagctagcttacctttctagtacctctggcttatggttttcagggagcatgcaccatcaatcatcttcatggatgaaatcgatagtatcgggtctgctcgtatggaatctggtagtggaaatggtgacagtgaggtgcaaaggactatgcttgagcttctcaatcaacttgacggattcgaggcgtcaaacaaaatcaaggtatgccttatgttgtgaatgaaaaaatagtcatgaagctgaaaaggataactctgtgttactctgaatttcgcagacaaagttgttaattctcttaaatgactgttgcaggttttgatggctacaaatcgtattgatattctggatcaagctcttctccggcctggaaggattgataggaaaattgaatttcctaatcctaatgaagaggtaatgcttgtgtttcttaggacatgatattagaaataactttaaacttgaagtagcaactttgctcactccgttgtttttggtaaactatcatttactgcgtaaaatacttttctccatacttattgtacccaaagtgaggcaggacggtttggctaatgtatatttctaatatgtgttgcagtcacgttttgatatcttgaagatacactcaaggaaaatgaatttgatgcgtggaatcgatctgaaaaagattgcagagaagatgaatggtgcttcaggtgctgagctgaaggtaagtgtttctctgtccctgcttctgtcttgttctctccaatctgtctctctctaatgtttttggttattacggtcaggctgtatgcacggaggcgggcatgtttgcacttcgtgagaggagagtacatgtgactcaggaagactttgagatggctgtggcgaaggtaatgaagaaagacacagagaagaacatgtctctgcgtaagctctggaagtaggaatttcagagtcacagattaatttcgattatttcttctctactgtctgtggttctttctgaaaccttttcggctagcgctttaagcttttctaaacaatgtttgtacactagtttctattcattcaaatggttgttcagcataacatcttcgattcaaccaagcttacattttacatcttaagagtatattcttctccaactcagtctcattagcttaaagagaaaaccaactaaaagattgtttgagacaaaataatcgacatagctttgtacctgagatccaccgctgaggtcaatagtgagtgatttgaatttggagtgtacattaatttagaaattcaacccatctggcatgtgtcaagaataatttgaaaactatccgttatgaacaataaaaatccttattgatgaatggtgtctattattaaaaattgaggtataaatatgataaagaaaataaataatttattttgtcaaaaccaacgcgtatatattgtaatgaatttaatttcaaaatttgctaaatgtgaaaaaaggaaagaaaaatcaatgccgatgaatgagtacgcgtggacctaaagctagaaaaagatccaacggtggagaaagctgcgttaaaattgcagaagaaccaaagagaaagaatccaacggccaatagtgtagcgtcaactcaaagccaaaccctcccaaatttctcttttaaaaaccccaatctctctctccctctccatcttcattctccctctcgccgcttccttcttaacaccatcgcctgaattcgctctcctctagctcgcgattgcgaaaacatggtacatgttctcttcgattttaccgatttcttcttcgtgtattatcagattgtataccttgatctaggattatctccgtctcagatctcacgagattgcgtcgatgtttccatgttctagtttctaatttcgtcgtggatatatttttcaggctctacctaaccagcaaaccgtagattatcccagcttcaagcttgtcattgttggtgatggaggcacaggtacggtactcttcgccgtgtttttttttatcgattaatcaatgcttggatttacgttgatggtgattggggtgatagagataggctcatatgctaagcagattttgctagtcgactctttataatccgtactgttgtttccagtggctcaattgatt

SEQ ID NO: 15313 - DNA, 2569 bp, Arabidopsis thaliana landsberg
tagggatgtcgagtataggcttgatattcgccatcttgatacaatttttgggtttccaagtggagaaggaatccgccaagactatgatcaagatgagctaaaatctctttggaaaataatcgccggtccgaagccctactcgccagccaagagcaagagttcttcaattcgaaatcccgtgattagatacgtccaacaatgcatcgccaacaccctctttgcaaagaaagccaccagatttgttggtgaagaggagctatgcatgatagaccaatctttggtcttcattctaagagagacaacagatgggaggaagatggcaggtgatagagcagacacttcgctgagtgttgttcttttggatcacctattaagctacagagagtatgctgcaactatccatcgctcgggaattcgcggaagcctttgtgttggtggtctctaacgccaatactgtgagctgtggggatggaatttggaacccctgacgtgttgcctaagttcattgacctagactatctcaaggggaaggattttcttgagaaaacaactctagcggatcgctatctcttcaagttcaaacactcggagcttggaccttctcttctacccctacaatgcgagaatcggactttggtgaagacaaggcgcaacatcaattttatgccatttccctctgccttgaacatcgacattggaggagctcgagaggatgaaccggaatatagcccagccgactatgagcaacatgagtactttactcaagctaattatgaggagcaaatcgagtttgagcaacatattgatcaaccggagcaagggactagcgaacaagagcaagctcattatgaagaaggtgctaagcaagagggagatgagattgctgaagttcacaagaagcttggtgtgcttgaagagcttggaaacctttacaacaagacaatgaaggtttcaagaagaagatgagaaccatgaagaagtcgctgaagagtattgatgctcaaataaaagacttccagagcaagccaaggcccccgtttcccacccccaaagtaataagaagtggttcaacgagctcacctactaggagggctgacaggatcgatccaccccgagcttcatcatttgagcctcgggaagtgatctccgagttgagagagccaagcagagactgagaagagcatccacacgctcgaccaactactcgaccagaccggatgagcaaaacccttccgcctcaacatcagtccctgcttatactcaagaaagtatggaccatttcgtatccgtctacttcacctgaccgatgaggtgacaccactacctccattgtacataccatagctttttatttgtctttatgtgttttgtgttgtggtcttgaattctttctcagatttttattacacaagggactgtgtaatttaagtttgggggagggttcaagacatgtttgacattgtgttctcttttcttatttcaaattttgcatcatctaaggcacagaaaaaaccataaaaatttgaaattttttcagaaaatgatttcatcaaaaacagagtgtcatgtattttgcatttcattttaggattgtatatagagtgcttgtatttaagattgctcatttgcattggagataatgatgatttcaaaccatgagcatgtaaattcaataaagtaagttcaatgcccaggtagttagttctttgttgcataactgattgtttctctgaagtaagaccgcaccctactttaaatttacaacttgactatactgctttgattcgaaactcgctaatctgatgtcattccctactattagaacctaaccttaatttgcaattatcaggtctatgcattgtttgtgaactcatggctaccatatacatacttggattatcttattcacttcaccaccctttgttaatccaagtagctgactctcatctttaaagcagtttcgcataccctgagtttaaccttatttcaagccaaaatcatctgggtgtgtttgtgaggtctttttctgattgagcttagctaacgcgttatgtatgagccgacaagaacactctttcatgtagacctagcccacgctttttgggttaggtaggacaaggtggggacttgtatttgggaattaggattatgtatgaaatgaaaaaaaagagaacaagagtgaaaaaagaaaaaaagaaaaaagagaaaaaaaaaagagaaagggattatagcttaaggggtgatacaaaagtcttagtgtagtaaagagttttgaattaaaaatgaaaagaaagttaggcattataattcaaagaaaggctaaaacaccctctatgctataagattagaagaaaagcctaaagtttgttaacgtgtaaaccaaaacccgctagactcttgaaaagttttacaaaaacacctctaagaacaaaaactaaagaagtgaaaagattgagaacaagggtagagttagggcatctaaggaactgggatcatcttttgaggtatcatgctatatatctttgggtagatgagtgtctcttcttgcatgtgtctgatggctttaacc

SEQ ID NO: 15314 - DNA, 114 bp, Arabidopsis thaliana landsberg
gtctcgtagagatcgcatagtgtctcgagtttccactcctccttgtctacattgacataaaactgcttgatacctccttgagtcagctcgtctcgcttgacccgaatcctgact

SEQ ID NO: 15315 - DNA, 4099 bp, Arabidopsis thaliana landsberg
cgttggttaagaatgattcattgaatattaaaatttataaatagcagaccccgcctcgtcttctctccgaagattcttatccacgtcacaccttcttcgcctgagaataccacctaacaatgaccaccgtcgtttcctttctcgccctcttcctctttctagtcgccgccgtttctggtgacgtcatcaaacttccttctctagcttctaagttcttccgcccaactgaaaacgacgatgattctactaagtgggctgttctcgtcgccggatccagcggatactggaattatcgtcatcaggtatcgataagattttctcttgatcatatcaaaaaatgttgcggttttcgggttttgaaaatttacagctcatgcaagttttgttttaagtcaatctaatttagttttgtcaatattagttacaattcttgctatagtccaatcttagtttcgttccatgttgtgagtgtttttttagacaatgaagcttttcgtgaaccggtcggatgataacatcgtatttttactatcatttcaatagtttggtagagactaatgtgtttgtaaataatttacttttgtcactttgtgctgtgtgtttttatgaaacagtgaagtttttgtgagcctaagttagagtgtgggctgataatatcgtatttttactatcattttaatagtttggtagagactaatgagttataatattgttcaggcggatgtttgtcatgcttatcagcttttgaagaaaggtggagtgaaagaggagaatattgtggtgtttatgcatgatgacattgcgaagaacgaggagaatccaagacctggagttattatcaatagtcctaatggagaggatgtctataatggagttcccaaggttattttttccgctttctttcgagttttagctgcggtttacggactattgaaacggagttgtgatatggttgtggcaggattacactggagatgaagttaatgttgataacttattagctgtgattcttggaaacaaaacggctcttaaaggaggaagtgggaaagttgtagatagcggtccaaacgatcatatctttatatactatagtgatcacggtggtccgggagtgctcggtgagtgatctcctctattttgttgaagttttcatatatttttttactaaagttttgatgatttgaatctccatgtttattttcagggatgccaacttctccttacctatatgcaaatgatctcaatgatgtcttgaagaagaaacatgctttaggaacatataaaagcttggtataaatcgtgaaggttcctctgaaatacttttgttgttggtgctgcctatgagtaatactaaaaggcaaacctgcaggtgttttatctcgaagcttgcgaatctggaagtatctttgaagggcttcttcctgagggtttgaacatctatgccacaactgcatcaaacgccgaagaaagcagttggggtacctattgccctggagaggaacccagtcctccaccggagtatgaaacttgtttaggtgacttgtacagtgttgcttggatggaagataggtaagctaaagaatccagatacgccaataagagttgcagtgttctgtttctcatgtttatgaatctctatggatgtcccttatattgattctgatttgtttaaaatgcaacagtggtatgcacaatttacagactgagactctgcaccagcaatatgaacttgtaagtttctagtttttgtggtttgcctgtaatgatggagctaaaactttttcaactgtaaattagattgttagcaaagatgtgcatcataaagtgtgtctttgtgttttcaggtgaaaaagagaactgcaggttctggtaagtcttatggttctcatgttatggaatttggagatataggactcagcaaggagaagcttgtcctttatatgggtacaaatccagcagatgaaaacttcacctttgtgaatgagaattcaataaggccgccttcaagagttacaaaccagcgtgatgcggatcttgtccatttctggcataaggtttatcttactttctttgcttcctggtgaaatctaaggactaattttgatattgcttctggttacttaatctgtcaagttgttgttacacgtagtatcaaaaggcaccggaagggtcagcaagaaaagttgaagctcagaagcaagtccttgaagcaatgtctcacagacttcatgttgataatagcattctgttgattgggaaacttttgtttggtttggaaggtcatgcggtgttaaataaagtccggccttctggagaaccgcttgttgacgattgggactgccttaaatctctggtaaccttttgcatcttcttgaaacttggctatttaaaattgttgcatcaaggtttggatcaactctatatggtttgtattaaacaatggtattggccagaggatgcaagactcaggacgttagatacgatatgatatgtcggaaaaaaatcactttcagtcctcattagatgattaagcttcttgtgatgatcactttcttattctcctttatgtggttgttaggtgagagctttcgagaggcactgtggatcgttgtctcagtacggaataaagcacatgaggtcgattgcaaacatgtgcaacgcagggattcagatgaggcaaatggaggaggcagcaatgcaggcttgtcccaccatccctaccagtccttggagctctcttgaccgtggattcagtgcttgatcttcgtctccgccctatattaatcgatgtccattaatatcttactaccaattatactccttcctatgtagacaagatgttgtaaatatgggatgcttaagttcttgatgtcacagacaaaagaaacagtgattgtaagtagttgtttcaaataatctttgttgttcaagtgatttcaaggctttaagacaaattaacacatataaatgaggcttacaccttaatacgtttacatggtacatatattgaggataacatctatcacaatttttctaattttgtaaaatacatatcaagtacaatacgcatagagaggattaaggcttagaggagtcatagcgtttacgttcttcttgtattgactggaaaattctggcagcattctcactcgcgagctttgcgttgtgaggtaccacctttatcactctcgtcactcctcccccatctcttgttgtctgagtaacagttgttcttgtcgtcgttgtggttgttgtcatcatttgctcaggtgcattgttgatgttgctgtcctcatcaacggctgcgaatggccgaaaggacttgctaccagagattccctgtggcccacttggactgcttcctgtgctcccttgcctgctctttcttgctcgcggataagactttgttggctgttgctgttgctgtggagcaggttcattatcagatctctgttgttgttgttgggtgttctgaagatttccaggatgtccaaactggttcatttgctcattgggttgttgttgttgttgttgttgttgttgttgttgttgttgttgttgttgttggcttgaacaatatgggttcattatggtgggcatcattccatatggagggaagtagccattaccaggaggtgggaatcccatgccggggtgatattgaggcattaccattggtgtaggcatataatgaccataatatcctccataatgccccgtgtgtgccatacctgggtgaggcttgtatatcagtccttccgagggagacattacagggatcaaccattgctgatgatttcctgaaggaggaggctgaggaggaaagcaatatccatttggagccggtgaagccggtgggttgtttgcaaaaggcatgtagttggattgttgatgatgaccttgatttgacaacctcccaactacgttctcagctgagctttccattttatgttggtcagtcttctccgagtcacccctttgtttgacgacaacatgtggtagaggaggctttaccagaaattctgatggaaggagcttcttcactggatagcttttagcagaaacttttccaagaaaactgatctcatcgagcaagaga

SEQ ID NO: 15316 - DNA, 3404 bp, Arabidopsis thaliana landsberg
tcttcactcgattgcaacgacgctcgtgttcattcgacgcatactcgatcgccggactttcgccatctccccgtcacctccgttcactcgacctcaccgttccaacttcaccatttctcaccgctcgcgtctcctcttcactcaaccgctacacgaccaattctcccttctcgccattcgccgttcatccgccaaagcttctctctcattctcacgaacactcaaccgctcatctctccaccggagttcgaagactctcgatcatctatgcttactcgacctcaagccgattcactcgagtgagcttagctcgaccgctcttcaaaccgccactgtttcccagagaagtttactcgacctcgccggacgcaccgcaaacactcgaccatagtccttctaggaacaaaagaccgaagccacaatttcactgtactcgaccgtattactcgaccgcgtacttgaccggtttagtgtttgcgttttatttagactaacatattgatatttggctttgagttacattctttttcaggaaatcaatatgagtaactacagtggcgaatcctccatggatgcggattacaacgtcgatgtagctgaattttggtcaactggaccagagagagagcgacaggcttatgagagcttcagagctgagacccaacgctcagtagctcgacgcaatgagaggacaactgagattgctagaggaaagagagcaatgaccagcagataggagttgatcgacgaagatattgacgtcgagtatgagcctaagtcatggcacagagagacgaagctgttgaacaggcctgatgaagttacagtggaggagtacatcaaacttttcggggtgaactacttctggggaacgaggtacccctgttatcagactttagtccagctggggctactggaggacgtacagcacttattcgagaggtgccatctggagacgctgatgtcttacccgtacatcgcttacaagaaggaaacaatagagtttctctccactctgcaagtggagatgtatcagggacttactgcagatgagctggagagtgaagtgttggggttcttgactttttcagttaacgagcagcgttaccagctatctatcaagagcttggaaggattatttggttttcccagtggaaagggaactaaacccaacttcgagagggaagagttgaaggatttgtggttaaccattgggaacgatttggcactcaactctgcaaggtctaagagcaaccagattcgaagccctgtgatccgctactatcagcgctcggtagcgaatgttctgtaccccagggaatctacaggcaccgtgtctaacacagacatggagatgattgattctgcactcaagggcattctccggagaacaaaggggaagaaggtcctaaagggcgaccttaatgatacaccaccggtcatgcttctgttgatccacctgtgcggataggaagtgggcgcacaccaacgagaggaagaaggtgcgaggaaccctttgtgtaggtggcgttgtgacaccgattctgattgcatgtggtgtacctctcacgtctccagggtttgatccgaggatgatggatttagatcacttgcgtcgttgtgagtttctggagtacgacatggttggcgatttctatcgctacaaattcgagcactccctgacccgaacagccaacattttgcttccctgcatcgaggccacaaccatacttcagggtgagaacattgacttcagacctgcgcgtgattacctctactttgagagcgctccaccgactgatgacaatgtccctacgacggaagctacagaggatgatattactgagatggatgaggatagggaggaggagtatgatacgagcatgtatcatttcagtgagcacgtacctccagcgcgggagagcaagagcttgagtgaagctcacagaaacaacagtaagttgcagaggtggtgcaagaaacaagataggctacttatcaagtgcttcaaagccatcacgtttctgacggacaagataagttgtttctcttctaccacagctattccgcagggagagcgtcctcaggacatgccttcgaggagatatgacgcgccagggccaagtcatcacaggcctgagccaagtcaccacaggcctgagcctagtgaccgagtagtcccaccagtccctgcaaggcattcatcattcgagcctcgggagctcgggagaaagaagaaggctgcactcgctcggtctagcagcaggagtacacgacttctccagtcccgtagcttacgcgacggcggtgctggccgcagcagaagaagagaggtcgagtatcatcagagcggtgctggccgcgacgaaggacgagaggtcgagtaccccagggggaagctgagacacaacagggagattcgtctatggcatgggagcaatcacaggcagccattgattaacaacttctttcattcttcgactgaggtaagcgcctcacttcaccattgtattatatcatctcttgggatttgttcttcattttgtttctgtgattggatttgtcctgagtactctcttccaagtttattcacacagtggactgtgtgatttaagtttgggggagggcttagaaagtgtgtgttacattgtgtatatttttgagtctacattcatgtaaggcatagaaaatccaaaaaaaaaaattgaaaaatttcagaaaatgatttcacaaacctagactttctttcaagccctatatcacttgtgagtgtttgtgagatcttattccgataaagcttggtagaaagtgttaggttcgtaacgacagagatagtgtctagtgtctcatgtagttctagttcgcattttttcggactagataggactaggtgggcgcttatactttgggttgggatgtgtttaaaaaaaaaaaaggggttgattcagtgatgagaaaaggtaaaagactctaggtgaagtaagctaaagaagcagaaaaagtctagtaaaggttttaggatttgtaaagaaaagaaagagttcttgttagctattgaagatgggcaaaagccctcggttttacaatgttaaaaataggaaccttagttgttaaagaaatccaaatccgctagatgtatcaaagtgttgaggaagcttctactagagttaagagaaaagaaaagaacgattagaaaaagggcttaaaagattcatgaatgcaaagggtagagtccgagacttcgtcggtgaagtgaagtggtcgagtgagaggcggtgatttgtggtgaagtagaaaaaattggagtgtcggtggcgtagcggtcgagtgattcacggtgaaccagaatcggtggttgagtgaaagttggaactcgattgcggcggctgaggtattctttccaa

SEQ ID NO: 15317 - DNA, 3872 bp, Arabidopsis thaliana landsberg
gagcgattcatgcactttggttatgtttagtattttagttttgaattgctatgttggaatgggtaaggttggtctatgcttttagatttcagcatatgacagatgatgctgataggattgattctgttcaattcgttgatgtatttaactgttcaattttggtgacttattgcagctgaagcgtaagaagatttggtaaccaaatagttgaggtcaatgaattgaataccggtgttcttcaaacacctgtatcaggaaaaggggggaaagccaagaaaacttctaggtctgcgaagtctaataagtctggaacgctagcttctggctctaatgcaggtgagtttggttctaaatgctctgtgttagtatgccaatgagaaatatttcttatgtgctcatctgagctaaatcttctttaaagagtggagatattgcaatgtagtgagaaggatcttttgtgttggcaggttctcctggaaataactttgcacaggccggtacttgtcgatatgatagttcgttaggtaataacttatttcattaactaatgtttaaaaaatgtacttttggataataagtttttttaatgatttaatctacttcaggtcttttgacaaagaaatttatcaatttgataaaacaagcagaggatggtattcttgatctaaacaaagcagctgatactttagaggtgacatatttgaactctagactcccatattgatgtattactttctgtcaaacttagctgtatgttcctgttgatgcaggtacaaaagagaaggatatatgatataaccaatgtgttagaaggaataggtttgatagagaagacgcttaagaacaggattcagtggaagtaagcatgtcttagaactgtcaaatcttggattccttccatttgatgactcatgtgtgagcgacagtactctgaattttcttgtctgtcttaggggtctcgatgtctcaaaaccaggagaaacaatcgaaagcatagctaacctacaggtacagaacatgcctatatattctttaccttttcattgcacatttcactgcgaactctgttatgcaatgctcagtattatcaccagttttattattgttttcacgttaagggtatatcttagcttgcattgtcttcttgaacatcgtatgaatctgcattagtatgattcttgttatgcctgttttctgagagctaaatgtgttaggaggtaactaggatactagtaaatctaccatacacacaaacatcgatgacatgtaaccacaagctctgttttgtatacccgtactggcacctttgaatgatgagtttctgttttatgtttgaacctgttgaataagtggaaattggtactgcagtttttcttcgatctcagtcacttgcattgatttcttgttttgggtttttggttcgaaaaactattcatgttttataattcctgttaccaatcttacaggatgaagtacaaaacctcgcagctgaggaggcaagattagatgaccaaatcaggtattttcgcagataattttccttcccttttctgctgttttgtatcatctttttgagagtcgacctggttgcagagaatcacaagaaagattaacaagcttgagtgaggatgaaaacaacaaaaggtaagcgtcccctgctatttcttctgccgaaaggtacaataaaacatatctgtttgttctgacgctccactttttaggttactgttcgtcactgaaaacgacattaagaacctaccatgcttccaggtctggtctccttctagtaattacgtgtttctctttgccttgcattcttctcactggggaaacatgtttttgtggtgcctattttagaataagacgctgatagctgtaaaggcaccgcatggaacaactcttgaggttccagatcctgatgaggtaagcttaagagcgcacaaaaccaaatgagcgatgcactgtctgtaacgattctcacctcttatcctgccattaatcaggctggtggttatcagaggaggtacagaatcattctgagaagcacaatgggaccaatagacgtgtacctagtcaggtaacactgtcctcaaacgttatgcttgccctggataaatctgtaacatggaagtgagactgacatttatattgtgcttttttagtcaattcgaagagagctttgaggacattcctcgaggctgatgaaccttcaaatgttcctgatgaaccctctaatgtccctgatgtgccttcaaatcttccatcgacatctggtctccctgagacccatgatgtatctatgccgatgaaagaggaaagcaccgaaagaaacatggaaacacaggaagttgatgatacgcaaagagtttactctgacatcgaatctcatgactttgtcgatggtatcatgaagattgttcctccagatttggatgtaagtcccaactgcttcctcagcttaaaattttcaccaatgtacataatcacagtctggaaaagtaaccatatctaaaaaatcatgcttgacttaattcatatttacctgtatgttacattatatacagatgggtgtagattactggtttcgatcagaggtaggcgaagtcagcatcacagacatgtggccagatgaatgtatccttgatttctatcactttctgtgatttaatctaatctctctttgagcttttgagttttttcctccccaaatatgatatctgtttagagctccttgactctttcatcattagctggaccagactggaaccagatgattacatttgatcaagaccacgctggaccgagcgacaacaaaatcttggagcagccacaaactccatcgagcccaacaccagaagaatccactgctacgagatcacctacaggtagctgaagttaccataccacattacaagcaccaccatatatctgtacatagaatctgatttcggtgaaaccagagttaatgttgtacttgtacagtagctgcattgcattatcatagaatagagattgcaaaataaaagtagagaaaccaaccccttcgttgtattcttcaatttttttctttgttagcttctcaggcttaatatagaattagccttagcccattgatttcttaatattggtcttgttcatgtgaaactgcaaaaccttttagagttgtagacgggtgcttagtagttttacatgctccatttccggtttaccaaaaaggtaaccagatcgaaactaaaacatatttccgttcatcaaaaatcttgacgaaaacatattggttcggttgtggtttgagagatttctttttggttcaaatcggtttctatgtccaatcctttgatatcactcgaggtagtttcttacaaatgatattatatataactttgaattcacctcaagatggaattattttccttcaaaaagaaatctatcaaaattgtgcatctccaaagcaatgagcaatgctgaatctccaagctaagttaaatgaaaaaaaggttcctcttttaacaaactttcccacaccaacatcctcactcaataatctcaacttgttttctcttcctctagtaaaaaaaaaaatgtctttcaagaagatgatgaagtatatactcaaaaccatattcaaacccatttttatggcatgcggttgcggctctaccgttccaccttcctctcacagccactacaccccgggaccaccggtttctcccacggttttacgcagcccatgtcctaagatcgatgagagcgtcgcgatggctaaagaatcaatcaatccgttcgaagattacaagaagtcgatgaatcagatgatcgaagagagatatatcgagacggaaagtgatcttaaggagcttctaaggtgtttc

SEQ ID NO: 15318 - DNA, 5447 bp, Arabidopsis thaliana landsberg
agtgcataatggagacgaaccagtatcagaaaaatctgaaaaagattgttgatgattagttatggcgtgagtttaaaaatgataaggtctgccgcatttgattaaagttcgtatactttcgtagatattagtcaataatctactttaacttcgatatactacacaggatgagatatccagggagacctgcaaggattcagtttgttccccacaaaagcatctggtaattgtttattaagttcattcatattttgtgtacttaacatgggtcatatattctcagatggttctttttcaggatgaaactccatccatgaagacttgcaaggattctgttgattccccacagaagcatctggtaattgtttatgaagtgctttcatattttgtttccataacattggttatatattctgagatggttctttttcaggatgaaactccatcagttatattacccaagtttatatatgctgatagcaccgagctccctccctctgatcaaccaatctatgacactaagtcaaaatctagagaaaaggtaaatttttcaatatcggtttcaagtcaaaaatatttaactattatatacctaactacattttcattttacattagcatctaccttctcctcgacctcctgttgttttcgataccgcaacgaaaccatctcctaatgatgttaccgagattttcttcgacctcctgttattttcattttactttgagtttcttagaatggatgttactcatatgctaatgttatacctcttctatcgtatcaaggagattaagattccggacttgtccttggctgaaaatgtagacacattgcttgacacagtgtgcaagaatagaagttcttcagttgctgctcccgattaggtaaggaaagagagtcttgttatgatagaatgagaaccacccatgaacccacaggtaacattatcatccattatccacgtggactacgtattttgtatggattcccaattgtggatatacttaacttcgtggatacttaactttatgccctctttcccttgtaggatgataaaaaagaagatgatcaaaaagatgatgatcaagaagaagatgatgaaattgaaaacgatgatgaagaggtagaattttctgctgctcatttggaatggtggtttatttataacattctcaaaatattaaatttcatttataacatcttaggatgttcccgccaatagtggagcttatgttgaaatcagtgattcatcacctgcaacggaacagttgtcaaccgctttcacttaaaaagaagcccaacttgttttgtttttgcaaaaaaaaacccaaatgctcccccccacggatcagattgatttgtttcctactttggacaaaacaaatttcaaagatttcattgacaccctttggaaggagcctcataagtaatttgattacccttttaacttttctctatctgttgatgctttatcgaaaaactaaaattacttaataattacagggaacacatcactcgtggtgatattgtgatatcccacagattcttgctccagcttgcacaaccgaccaattgggttgataccatggtaaaacaaacttccattaactcattttagttcatgcggatcaatatgctatttacatgattcatgctaaacaacttgcagcacatggaggtactaggaagtttccttaatgaaagtcacaaattgacactctctaaagaacgcgcagtcattatcaaaccttggttgggcaattatctacaaggaaaataccgttcctttcaatctgcaaaaaataagttgcgcgtccaatggaataaccagttcaagcggaccattcctggttccccatcagtttggttgaagaaattgacctcatcgtgatgccaatgatttggaaacctagcattgggtcaggctggcaatcaacttagggaactggtgtgttgacatacttgatccaaactaccagctaaatgatgatcgacaagtcgaggagttcatggcacctattgtggttcaaatcccgtacataattaacaaattttgtcagcctcgtatgtctcaagttcatggattggctcctttcatttggacaagaatcaaagggatttatgtcaacgagaggtctggggactatggaccggtctcaatgaagctcatcgaaatttatgcaactggtggaaatacagagaaaatggcccttatcacagatgaaattgtcaatgaattcaggggtcagtacgctatagatctttttcaagaacttgtcgcaccactttaccaatcgcacaccagcaaatcaactttccattaactaaattttcattaagatattatatttgttctagatattttagttgtttcacagctacctttatttactttttgtctgctcctttatatgtctgacgtataagttgtactgaattttcagtttctcacaattagtccaactaattgtcctcgaagttattaaaggttcaagtggatatgtattcatggacacatgcaatttataccaaatatattcagatttaataacacataaaaagaagctgatgaagacatcaatggagagacagaaaaagaagctgatgaagacatcaatggagagacagaaaacgaagctgaagtgcaagcagcagaagaacctgaaggcgagcttgaattatctggagatgaagatgctgttcaacctaagaccaaaaggcaacgtggaccaactaggatgaaagatattgctaaggatccaaatgccagagtgagagtggagtacaccatgatgggagagcctattggtaaaggctcaattaagttagcatcatatgcaggcgcattggtccgtgaacacgtccctatcacaattgatcggtggacaaaaataggtgaagaaatcaggacacttctctggaaatctgtccaggtaacacttcatttttttttttttttgtaatatttgactatctttccttatcacagcaataatcactttttctgtaattgattgaaggcaaggtttgaactagatgaggagtatcaaaaggttgcagtgcttaagcaaatgggatgtttgtggagatcctggaaatcaaggcaagtaactaagtttagagaagcaaagacaaacaagcagaggatgaatctgagacctaaaaatgtttctccatttgagtggagaaaatttgtgaagagcaaaactagccctgaatttaaggtatgttgagggagaagattaaactaagtatatttactatgtagaaagttactaattaacaatcattgttaggttataagcgatagctataaggagagaaggcgcaaccagattcctcacacttgtagtcgcagagggatggttagacttgcagaagatatggtaatcttatgtgcctgttaggttatgttttttattgctttgaaatttttaaaacacttagcttgctactaatattggcatgttgtgtttttcagaaaactggtagtgcagacccaactgaagtgacgaggctaaaggtttgggttaagtcacggaccaagaaatatggaacaccagtgaatacaaatgcggctgaaaaaattgtgagtatgttatagtttggaagttgtgacagtttggtttgtgatgattgttaggttagtgatggtttgttaaattggataggttagtgatggaacagaaattggactggtttgtgatggttttgaaatgaatgtgataggcaataggttagccagtgattgtgtggactggtttgtgattgtgtgtgatggtttgcagaaaaaggcagctgagattgttagcagtggtcctcaatcaaatgggacgaatgaagcacaagattcacttagggcctgacaatcctggtagactaagggcgatgggaagaaatatgaacaagaccaaactagcttgtttccaagtaaaaagcaaatgtatggctgaaatgcaacagaaacaggaccagctccagcagaaggtcaatgagttacaagaagtaattgacaagataaagaaccatgtaaaaacttgtctacttatacataaagctaatcaatcggttagtacatatatttgactttgttttttttttggtacagagacaatcagctgaagttggtgaaacctcaactgcaagagtaagtcacttttatttgatacttttgacctcttgatacataattagatgataatagcctattgattccttatacagagtgtgaaccaaagatcacaacctaagtgtatcttgatggattgggctggtactgatgcaaccgttgctgagggttgtattatatcttctgatccggatgagatagtcaatggaagtcgcttaggtcctacagatgttaaagtattgattgacactgcgattgtaccagaagcatacctttggagacccgcagataacatggaaattatggagaaagctgttggtcagatgatagcttggcctgttgctatgtgtgttagcctagaggttaagctcaatccagaagacattgcacaagtaaaatgttatatattaagagtcatactaatatattcagagtcatactaagacattggtttaatgtgtttgacagggaccaagacccacttatggaaacaagtgcaaactactggatttgtcttccaatgacgttattgttgcagaaggacgttggcagacaaaagaccaatctgcattagttaatgggcttcctctcggacctgctgcagtgaaagtatttgtggatgtaatacttcaacctgagacgttcatatggaggccaacgatggatgtgacataccttgaggactgtttacagtcttttgtagcatggcctgcccacaaagtttcatatgaaaacaccacagattcagcagttcagaaagctcctcttcagagttctcaatcaacttatccaacagcatcagcctcaaaaggaaagtcagcagcagcaagtcaacaaaatggagcaacagagaaatctcttggtgagaagcaacaaaatggagcaacaaaaggaaagtcaggtcataattcttctattcaggtatctgcagccaagggttcagaatctgcaggaacaattgaaaaatctcttcgtgagaagcaaccaacagtagttccaaagtctcctgtgaagaaaactcagctagcatcacaaacccctctacggagatctccggtaagtttgtctttggtttgacatattgactaataaaatttctacatgcgtttaatcctggtttataatgtaacatgtcagcgccaaaaaacatctgaaggtttgaaggctaatcagaagtgcaagttaatggatataagtggaaagaagcgggtggttggtgcaggacgagtgcattcaatagaccaagatcaaaaggtacaccatgttcgtttggagagaatgcagctagagtttgggttgatgtagtgaatgtagatg

SEQ ID NO: 15319 - DNA, 3843 bp, Arabidopsis thaliana landsberg
ttattcatcttatttgttatgatctggttcaagttaacacatctcttaattagaatcctgccacagtggatgagttggtgaatatacttataaccaaaaagcccttcttcttcacttactggtttctacctttgggatcatctttttcttcaccattcctatttatgtttttctttatcaatttttgtgctaaagaggttggtctttattatagtattaaatgactggtatatctttctcctcttccagataattttttgttcgaattctaacagttttacaaaaacattagcggaattactctatggtataatatagatttggaggtaataactctcttaaatgagtaccaaaaccattgtggatgatatcagttaaaacttgaaagtgttagtttcatttatgaatatctttaagccatgatgcattgatgtggctacatgacccaagtctataaaactgtataacacatgctatatgttacaataaacgaactatgatatgcaatgattattaattcttgaatcagatccatatattcaaatacacaaaaagagctatatgaacaaattagttacatgatatactacttaattacgtacctatctttgattaagagcaaatgtatatatcctttttttgcaacatatatgtattacaagtgttccaatttacaattgtgattgtggcaaaatggtttcacacatatattattattaggcatgcagtgacaatcctatatacatggaagtgaaaatgaagaaaaatcacaagtttaacgtcttcaaatatcaacaactttgaaaagaactaaagtatactataggttaaaagaactaatcacattttcacaattgatagatataaatatctcagtttgaccgtttgactaattttttttttgtcatcacctcaaatttgatcactggtttgaattttgaaattagttattgaaaaagtgaaaagattacaaaactatttaccacaaaagataaaagaaaactggttgtacgtaatgtctctgtgtcctgcaaataccaaacgtataaaaacaaaatagtaaatgctgcagttgtgtagcatgaaataacgagggcgagtttctgagatgtgcagtggatgtttttgtcatcttgtatccttttctattcctattcctatgttcttctctcgctcctttaaatgttttgcaggtcgtcgatttcatgtatataatattaacttctgctttttctcttttattttctttttaaaataacgttattatccgtttataaaaatttctttactctttatatactcctatttcaactcactagtcacaaagactacaccacattgttcgctatgaattgaggcagttgacaaagcggtctaatttgtctgcggtttaatctatttcatttttggggcggacaataaactgctgcggaccaagtttatttgtacgttaaaacggtccgcagatgatccgttgcggttttcttctattttttttggtctgcaccagtacggattataattgatgaatagtaaataaaaaacggtctgatccgttgacggttttgtccgccccaaccgccgtaaccattcaaatccatagatttattttagggttcttgttttagcgtccaaagctgtcgcagttgccgttcagcgacttttccctgtttatgaaataaaaacgctccacttgttcgtttcttctttcaacccactttgttataattaacaaatattgcttggtccaaattttattatactgaattattttagttttttgtatcatcatcctcaaggttagttttgaaatccgaaagtaaataagtcaataacgaaaatgacaagtataattttgtaattgaaacttacatgtcacggtcgttgtttacgatcactgccacgaatagtttagatacttttttttctttctttccgtgtattgaccgggtgatcaatcacgaacacttacataacttataatttttgtaaaataatcttgtgagaaaaaaaaaacacagaacaggaatagaattgcaatactcgagatcttcaaatggtgatattgttaataagattacgtattagattgtggacttctaacctaataccaattgacgataggtggagtgatctatatcttatatatatcacttaatatcctatacaacttccgatgtgggacaatatctctaatacgtcttctcgagataatggcttttctagctattgatctcgatatgttcgagcatggattggcgggccaagtattgggccaaaccgatgtatattgtgttgaatatgtgtggatcggactctgatactatattagattgtgggtttccaatctaaaactaattggcaatagatagaaaaatctatattttatatatattatttaagattatactcaacttccgatgtaagacaatatctctaatattacgaactttaaatcatcatcaaaatctatagaaaaggatacacgtataggaccaaaacaagcgtaaaaccaagtgttataattttggcataaatgcatgtattttattttagttttgttatggattttcatatcaatgcatgcataatgcattctttttccttcaccataaccattaatttttgaatgattttcatagacgaatgatttttttctactttctttgttcttgaacattttaataacgttaatgatttcttaatttatattgttgttttattatttatcaatttatattacaaatgacaatttaataacgtcgaacggttaacagatttaatgttatcttgataataaacattccaatctataaagcacttaaaattcatagcgcacaaaactataaaaactctaatattcggatccaaaattatgaattaattccagatttccataaatgtctttctttgtttatgctgacttttttcttttcttaacttatatagtaagcaaaccagaaaggtggaagatacaaagcaatttcattgcattaaaaacttcaaatgtattatccaataatcaaaatttatctagtaattcacaaaaaaataaataaaaaatctgtctatcattcaaaatttcaccaatttggataaatatctagaaaattttaaaatacaattcaataacactattaacatatcaatcaatatataacattgcaaaagtttacttgatcattagtatattcattttaaggtaaaaagatctttaagaaaaggaaattcaaattatattgttgaaaaaaaatacaaatcaaagacagcaaaaaaagtaacaaaaaaaaaaggtagaagaatctgaaacgcggaaaggaggcaaaatcttctcgtcgtcgttgtcgccgtcttcagagctacaaacgaaaaaactcgcttccgtttcgatttctccattgttattgtttcttcagtcaagcttttttcttcgagatatttctaagatctaccacatgctactatgagcctccgccaccgcaccgtcccgccgcaaaccggacggcagttgccggcggaagctgtcggaatcgaagaggagccgtacaatatcattcccgttaacaatctcctcgccgaccatccttcactccgttttcccgaggttcgtaccgccgctgctgctcttaaaaccgttggagaccttcgtcgtcccccgtatgttcaatggcgttctcactacgatctcctcgactggctcgccttgttcttcggtttccagaaagataacgttcgtaaccagcgtgagcatatggtgcttcatctcgcaaatgctcagatgcgtctctctccgccgccggataatattgattctctcgatcccgcggttgttcgtcggtttcg

SEQ ID NO: 15320 - DNA, 493 bp, Arabidopsis thaliana landsberg
ccaacttaaaagttggagtttatgtttcagttttagttctggattttcgtttatgtttcagactttcagttttagttttattttcagtttcagtttgactttttgtttctattcaagttttgccaattacaacttttttttttttatctcttcttcgattgtaagaaaaggtatgatttgtctctctatacatttcatctttcttattttgacactttgatcgattctctattttttggaatctgattcatatgtttggggtttaatagtttcagctcaaagaaatctgggttaaagtgtgtttgaaattgtggatcgattcatagattctcgataccaataggtacttgtgaatttctaagtttttgggtttttatctttccccttgttgtatatgatgtgttagaattaataagctgcagattctatctttttggttggatatgcccatgtttgaagttatatatttataagttttgaattcataggatgt

SEQ ID NO: 15321 - DNA, 3387 bp, Arabidopsis thaliana landsberg
atcctcttcacactccatatatcagaagagcccctatagcagacaatcacgcatttctattttacttgattaaagtttctatatgatcaaacatctgactacttctcaatacagtatccgtgtgatacgattcgaagcagtaaagacgaatacttacactgatgaaccggaaggaaacggaatctgcagaatatgtggcgacggggatagaagaataacgacgaggagaagagagaaagttaagacgaagacgaacagtggtttcaccggagatccaatcatttgattaggttatgaaattgcaacttcagatttgtaaagtgtctctcagatctatctataaaaagctccacacacactaccgtcgtcggtgccaaaattaactctgtttcaccagagaagaaacaacacagaggaagaaggagaacaatataaaactcggaaccctctgaatcatcgagagggttttgattaaccaaaccggttgaaattattaatttccaattcccagatacacactacattgttcttaaacaaagtaaacattgcacatccaaaatcttgaattcatgtaactctaaatgattcaaatgttaaaatgtatcttctcatatagtgtctctttcaagctcaaaatcatcatcatcatcttcactagtttcacttctacgtcccaatctccttctcttccctctcatctcaaccgccatatcttgaagcgaacaagaactgcttctctccatcttccctgccaaaacatccacaacatccatttgaccccaaccgactaaccgattcctcaacatctcaaccgttgtcgaatacggtggtatcccttcatcaatcatcatctcaaagtatctacaagcttcctctaacttccctttctttctcaccaacccatgaatcatcacagtgtaagtcgcaaccgttggataaaactttctctcactcattccttcccatatctctgtagcacggtcaaatctccctattcttataagcaacttgagaaccatattgtaagtgtgtctatctggtaaacacttggttctatccatcctcgataacagctttgttgctcgatttacttcgcagtgatcgcagtggtacgccattatcgaattgtaagtccaagtatccggattagctcctttttgaatcatctcgtctaacagtaaataagcatcatcaactttctcgttcttgcagagtgttttgatgatatggttaaacgtgtacacattgggtacaagatcgtaccttttcatccgatcaagtaccttataagcagagtgaacatcacccgcatcacagtacgcgtgaatgaatatcgcaaaactatacgcgtccggtttaagtccaagattacccatttcttgaaacatcttataagctccatcaacatcaccagatttacacaaagcatctaacagagcattgtaagcaagcaaatccacaacacagtttctctcaagcatttcatcaaacaccttacgtgcacccgacgcgtctcggattctcgcccaacctctaaccaaaatgctatacgtcttcgcactcggtacaatcccgaatcctttcgctttatcgaaaaaatcctgagcatgattcacatgtttcctatcgcaaagcgaatgcaaaagctgatcaagatcatcaacacaaggcttaatcccaaactcaaccattcgattaaacgctctacaagcttcactaggtaaattagctctactataagctctaaacacaatccaaaacactttagaactaatctcaaagtaattatattctctagcttcgattaaaaagtcccaaagcaaagcgaattgcttactactacccaaaatctcaaccaaaatgtgataactttccaagctatgttcgaaatctgggattcttcttgcccataggaagaatctgtgagcaggaaagccgagatttttgcagcgtttcaatacttgttcgactagatttgacgaaactcggggagagtaagcgacaagagtgtgttcgagatcgtctttagggttccggtggtcgctcaggacgcgggagatctcgtttactagatctggtgatggtggatcgtgtagaagtgtagagaagatgcgaaatgattgagatttaggggtttggtaaagagcgcgaacaagagaagagactgttcgaatcgccattcaacagagcaatggagccaatttgagttttaaacacaaagccattggatttgtatatttataagtgagcccacttaatttatcaggcccacttaatttgttgcaagattagatcaatattcatgggatcggttaagattcggtaaaccgggacggcttgagtaaaaagatcgccagatgcaaataaagagacaagagaagaaagaaaattttgatcgtagctcttctaagaagcatttgcaaaacttgtccaactgaagaaagcttgagacttttcactgggtatttgcagtttctcacttgggtcttgaagtatataggtagatgtaaaagcttttactcattttctttcttttttggtgtttcttacttcaaagtttctatttgcgttgttttgtgttttgcagagaagatggatcatgtcagcaatctaccagagggggttctttgtcatatattgtccttccttaccacaaaggaagctgctttgacttcgattctctgcaagagatggcgcaatctcctcgcgtttgtccctaatctcgttattgatgactctgtctttctccatcccgaagagggtaaggaggaaaggtacgaaattcagcagagcttcatggattttgtagatagagtattggctctgcaggctgagtctcccattaagaaattctccctcaagtttagaactggtgttgcttcacaccgagtggatggttggataagtaatgtgctaaccgtggtgtttcagagcttgatctattaatcattttaggtatgactatggaagatagctatcggctgtctccaaaaggtttcgccagcaagacactagttaagctggaaataggttgtggaattgatattagttgggtagctgggagcattttcttaccaatgcttaagactctcgttcttgactctgtttggttttatgttgataagtttgagactctacttcttgctttgcctgcgcttgaggaattagtcctggttgatgtaaactggttagattcggatgtcaccatctcaaatgcaagcctcaagaccctaacaatagattccgacggtcatttaggcactttttcatttgatacacctagtcttgtttatttctgttactctgattatgctgcggaagactatcccgtagttaaaatggaaaacttacgtgaggctcgaatcttccttttggttactgataatg

SEQ ID NO: 15322 - DNA, 3016 bp, Arabidopsis thaliana landsberg
  unsure (1)..(3016): unsure at all n locations
ttttttttaggaaaaatggccaagatatggaactgaatgttaacctcgacatacgctaatccatccaagtttaaattagtaaatttttgtaattataatagtaatttatttgaaatggttcgatgattgaaatgtaatgttttgcataataatttgtgattttcttcataggaatattagatgcatttaatgctagattagaagtaattaccctagaatccaatacattttcgttgtacctaaatgagtactgactaagatcaagcaaagtttttaatttcttagagaatggaaatcaaaattagagtgaagaaaacgatgaggaaattctattgcgtccccgttgatggctgaagctttggcaactctagctgcggttagagttgcaatagaatcgaactttttcagtgtctctttcgctactgacttattgataccagtcaaacctctaagatcggaccttttcgagatgaagtttcatggaattcttcacgaaatctttcatctatcctccttttttagtcatgttgtttcaatatcatctttggtcataaaatcggtatgctgattctctagcaaaagaggctttacatttttcttgtatgtctttccattcttatattaatgacatcaattctgtgttaaaaaagaaaagcattatatttaaggaaatgaaaattagagtgaaaaaaatgatgaggaaagggagaggaaagggaagctcacgtgaaggagtcaccgaagtccacgaacttcaaatcttccggagatcttatggccggtgtgacggttccttactttatgttctctgtctgcaccaatattatttttattgcatttatgatcattattatgttcttaatctttctatctacaagattaatcatatgttaacgtattggtggtttttataacggcaacatgcttgtaatgcaacaggaaacctccngctctataacttaaacgttgacctcatctgaaatatatggactgttaatatttttatgaaaataatacatttaaaaaactagatagtggacaggtagtttaaaacacacatgtatttaatcgtgttatgacttatatgtgatgatgtgtacatgtaatattaagaaaatttccaagagttaacaattttggtctcgggtgactaatcggccttgcacaattgtagttctacttgggagtataattttgcatggattaacgtaaataccgttatggtaccttgaattcgaattacttagatagattgctaacactacaaaaaaagtcttcattgatagcataccattatagcacggattactcaattgctattgaagatgtcatgtaattttcgttattatattacaacagttgataaacactaagatatagttttaatattacagcactttataaacgctgatataaagttttaatgagcgggaacacaaaatacttattccgccaaataacacttagtcattttcgagaaaaaacccaaacacaaaacaacttttcgaaaaccctaagaaagaaaactctctcagtcctcagccataagtccgacgaactcactattccggccaccgattaaaccctccgttgcctctccgtcgccgtcgtgaaagctctccgtgcaactggaacctccgccggcactcaatccgctctatatttgtccactacgagatcaaatcgaaggcaagtcattttctatgttgtttttttctcctttgacactcaattcgttaccctagatctgtttccatcaatctctgagactcaataaccgatgtttgtgtgattttagaatttgttaccctatatctgttttctttatcgattcttaaaattttgtctactttgcatgcctttgtttattgcgaattcatatgaatttcgtcttagtaatggtaacctgaactgctctaggtgcttgtgaacaattttgcattcgaaattgtgtatttatttgggcattagagttgcaaatattggattttggctctgtaatgtttgattttttattgagtgataaaacttgagaatttcattgtcagattgattaagcttcgtctgttgtctgaatcgtgttgttattgtcacatcgatttagttattttgttatgtcaaactatcattgattcactttcttgaatataaaacattttgctcattctatatattttgtttaatttgtaagcgttgctgagcgaatcaatggacatttggaagcttatcaattctctcttttcacaggaaaggttagtatcattgtctcccttttgtgaattgttttctcttgtcatagttagtatataagtttgagttatttgtgaatgttgtctgcttgttctgtgattgtttacttagaagaattcttttcagtttcatttattttaaaacatgctaatataatctagtaactgtacttatctactgaattgttttgatagagtgattagtaaatgctgtattctgtgtttgtttatattgaagattcttttgagttacatttgtttaaaacctgctactataatcgagtagcatgtacttaaaacctgaattgctttgattgattacgtttataagtttgaatttatttgtgaatgttgtctacttattgtgtgattgattattcaggagattcttttctttacacaatatggtatgctgcttaggttactaaaggtttatgttacggttagcacatagaatggtggtcaaggattgggtgcatcttggcaggtaattataattataattatatttcttaggtttcagtaagggttttggggagtttactttttttttttttttttttttctgtttctacttctgcaacaaagagctgatcctgcttatgagagaagggctatcaagtttgtacgggatgtggctgcggctttgggagatgatatgattgtatgtccttgcattgattgtcgtaacatcgctcgtcactcaggctgtgtagttgttgataatcatgtgacaagaggaatggatgaggcttataagaggcggt

SEQ ID NO: 15323 - DNA, 2701 bp, Arabidopsis thaliana landsberg
ccttagcaaattacacacctgagtcaaaccacaaaataaactcaaacaaacactgcacaaataacctataacactgatctaaagagcttattatcatccggaaccaacagagaatcaataaacgtttgtagaaactaaggatcaaaaatcaaagatcacagagactgttacgatttcagatcaattagtgaggtttaggaagattcatacgaatataatcatagaaatgagggagaaaaacctgagcgcggagcacagtgttgggaacggagagaggaccatgtagcttaaagagatcgtagagagaattagaaatggcgtaacgttcttggatcggaactttagggtttatcttccggacgttcacagctcgttctctggacatgtatctcaccaacaaagagttataacttatctcgttatcgaaaatagccgacgctctgcagagcttcctcagtccaccaccaccgccggcgaaccacatttctcttcttcctcgccgtcactctcactctctttctctctctcttcttcgatttcgttcggccggagtaagttaggtttctcgcgtcgccttgggtattttcaaaataagccgtttagcccattgggctattattcggcccaagaaaagtgtacagaattatctgttaattacccgccaaaaatatctgaaaaggccgaaattagtacatttacccacaactgcttgttcaatgttcatggtagattccatccttcgttttcttcggcttggaagatttcaatacagagacgatgtccacaaaattagatccagaaatagaaatacataaggatataagaaaacaaatattatacaaacaatatctcgctgaagtaactatgtcagaggtaaataatatctacaaaaagcctagacataagacataagatcttatccaacaatagacttctgctcgacctatgctcaatgctgattcacacaaataaaacgactcagcaatgtagagtttctaaaaggagtgaataatcatatcatctatacacacacatatatacacttaaatatttgatgtcgaagagacgaagacggtctagttagatgttaaacatcatatacggggagccgctcttcgatagttatacggcagaaggggcattttttacacttgtctgaacagtttctgcaacaaacatggcaccaaacacgttagcagaaacatcaggcaggtatgatcagagagctctcaataatttcatcacaggctgcaattgcacttggattaataaccgaactaatttagtgctttaaattcagtttcttcctgtgaaaatgcataaacattgaatagtttatgatacctgcagagaacacggtgtctacatggaagcagtacaacactgatttctctttcaaaacataccctacacagcactttctcctggaacagagagaacatcgagatatgaaattcagtccaaaggaaaagcaacaccaaaagagaaacggtgtgaaagctaaaccctgagaagtgtaatttataagaagaagaggtgagagcattacattttgcagtctctcatattcctgctgactgaatttcgtgatttctgtttgttcaccaagtgctgcttgaagtctccacacctgacaccaaattatagatcaaatacaaaaagacatgaacagcactgagtaataatgataccagagatctaagacttaacaaacaaaaaaacgacgacatatttgcatgtaagagaaaaaaggcaaaatacctcctccgcaagctctttcttcggcattttcttgactatttcaggcggatgaccacagaaggtattgtacctgcaccacatatattcatggaagtcttcagcaggtagttataaccattttcgttggaaaatttagaaggtttagttgtactaacccagattcttgatcaaagtatagtcgagcttcctcctcccagcttccttcatcaattgaccaccaacctagtagcctaagcgagcacgtataggatcaaatgtcaggcatcaacttgatgtttgttagtaactcggttgcagctaccaaaatatattttatggttagcctccatacgcattaaaaacagatcaggaagtaactaaacataattatcacctggatccatggtgcaagaaacccaagcaatcatgtgctctggatagaaatctaaaatataatcctgtatcatcttcgccacgcagcagtagaacaaccttctctattagtttagaagcagcaaatagaacaccaacgccttgcaaaaggaaaagtggagaaaacaggacagggacagatatagacttagcagcttcaggagtcccctgaaagttcaaaccacacgattttggtaaatgacctctagatacacaagaaatgtatgatagatagaaatgttgtgtacctctagatgcatgcaaagtaccacttgaaatacaatgagggggattttcattatatgaccaccaatgtcttgcaggccacatgtatcttggttcctatcgtcttctgaaaaaaccccaaggccgctgttccagtcaagatatctaatattggtagaagatgacccagtttgtgttatcacgtgagcttctatcaatcactggattagaccattttgtacaaacaaaaaacgcaaagcactctgcgattctgcaagcggggggggcacaatgattacaatca

SEQ ID NO: 15324 - DNA, 1193 bp, Arabidopsis thaliana landsberg
attatcatcttcaatgattcctacaaaagacacaaatcctttgacatcttcttccgaatcttcatcatcagagtcactgtcactttcagcaatataggatctatcaggtttagacttggacccgatgcaatcaaacttggtatgtccgatacctctacactctgagcacttgagatcttttctctttaaagagggacactcagctttgatatgtccgtacccttgacattcgtgacattgaatttcacttctctttgagttacgatctctgtctctgtctctgtctctgtctgaaccctgatttcttgcaaatcctcttttctcaactcgttttattgctctgctgaagtttttagccatcatactcattgaatcttttaattcctgaatctcgtttttctctgatgatacagctagtgcaactcctttagagtagcctccctttcctgaagtgatttccaactcatatgcttgaagcattcctactacttcttcgaaatctatcgtgtcagtgtccagcgacgtccccatagcagttctcttgctttcgaatctagatggaagacatctcagcagtttcttgaccaatttcttgtctttgtattttttcccaagattatgtgcttcacttgctatagcacttatttttccactaaactcctcaatgttttcagattcgtccatagtgagattttcaaactgagaagctaacatatcgattctggaccgtttgacactgctagtaccttcataagctttagcgagtttatcccacgcttctttagctgactcacagttttgaattcgcttgaactgattctgatttacagagttgaaaatcaaagacagagctcttgagtttgccgtggcctttgtctcttctgcatcagtccactgatcttcagttttcagcacatcctctccgttttcccctttgacaaccggagctttccatccaacactagtggcaatccaggcttcctttcccagaccacgtattagagctctcatctttactttccagtgaccgtaatttcctttttccagcataattgccttaccaaccgcaacgaactctttggggtagtccatcctctccgcagtatctgcacctgttgttaagtacaacttggttcagatgcctgctctgataccaattgaaattccggatgaactaagaactatattcccaa

SEQ ID NO: 15325 - DNA, 1391 bp, Arabidopsis thaliana landsberg
tattccctctagttcttgcatccttcttgttgaagccagctttgctgaagttagaccggttactagcgcaaaatcatcaatgcaaaagcaaattggtttcccaacaaacaaccaccacatctcgtacttcttatctgtcactaactgtgtagatagaatgtaatgcaagaacattatagaaaactgatgcgtccccatttgcaagatactccgaaattgggaaccatccagttgttgcaaatgctcttcatcaagtgcagcctttataatctcaatccaccaaagtgtaaaatatttgtttatcctctttcgaccttcaggttcagccccaagccgaaacaagcgctttggcaactcgtcatcccccatttgacagatactatgaaattcaaaggtaacattatcacttatttgctgcttaccagatgcccaaaacagatttatacaaatcatgtaatctaaattggcaatacatgttcaatagctcaccatataggtggttaaactacacatgcaatatgtaagcatctttcctttagtttcattaagataaactggattacatacacgcttaacttaacactacaatccgaccttaaccacaaatgattgatgtctgctaaaaccaaaaaatcacagaattaaacacacaaatcaattcgggaatcactgaatttcaatactacagttcatcaaatccgagtttctgagatgcatgcatagaactaaaaccaatgatttgtgacaaagacaaaatatttcaactcatacctccgacttgctaaaatttgataagagcaaccacgtttgtcgatggagcacttcgaatccaccaatgtttcctgaaattcgctgttcgtataggagccgccacaaatagaaccaactgtactcgcttctatcaacccaaacagagctaatctctaagtaattagaaaccccctaattcaaaatgcacaaaccctagccgcgactcaaattcgacgcttatatagtccccccccccaaaattgcacaaccgaaggttgcttactcgacttcaccgacatcggccctgtcgccattatgcgaaacccccaaatcgaaaactcggatacccttgcctcgccactctaaccgtgtcggtctatatcactcttcgaaactttctcgggttgctcgctttatgtataccatgctttatatttgggtattgtaaattctctgaaagaagcagaatttaagtttggaattattacagaaattacaccacatatagtttcaggtgttagttttgcaaatataatatttttgttggttagttttgccaatttcctttttttcaaaaatgttgatgagccttaggtccaacatttaagtcctacccaattcagtcgagcctaatcgtcata

SEQ ID NO: 15326 - DNA, 7623 bp, Arabidopsis thaliana landsberg
taagttgccatttccaggccgtgagagagattcagaagcagaaagagtatgcacgttttgatgagatcatgaaacagttgtatgttagactccctttcttatagttggttctccatgttccaagctacagaagttacttgaaggatattttgtctaacaagaggagcattgaggaaagagttaaactgatttccaaaggagaagagtacgctcagctggtcgagtctcagagacgacagaaagaagctcagctcactgatgtagtagaggtgttagcagggaaagagatggtcagcacttttagtgccatccctccagctactattcccgagaaactcggtgatacagggagttttgttttacattgtcggattggaaagtctgtgtttgagagatgtctttgtgatttgggagttggagttaatttgatgcctctttctttgtcaaagcgcctaggcatcacaagtttcaaaccttcaaggatctctttgattctagcggatcgctctatgcgatttctagtgtgtttggcggagaatgtgcatgtcagagttggaaaattttacgttcccattgattttgttgtcttggaacttgataaggaaccacatgatcctctcattctaggtaggccattcttaaatacaacaggatatataattgatgtgagaagaagcatgatcaaccttcaggttgggaactatgctttggagtttgacatgagaaagatgaggaaaaatcccaccattgaaggtcaaccattctctatagacacaaatgatgaggctaatgctgaatgtgtaaaggattacattgacttgagtgatgttgaggaagtcctgaatagagacacaaaagatcctcatgtgactttgataccactacagcgtgtaggagacaccatcgagtataaggtgtagtgtaaaggaacctcaaaacctttttccaaagctagaagcattctcactttggagtggaaagaaaaatgtaggaaatctgtaaaaagagtggtttgtaaggttctaaggatgaagttgacttattggtgaccttgtttcggaacaagttcccgcactcgtgcccattgattctcaagaatccggtcaagctagtgatattaaacaagcacttggtgggaggcaacccactgttggtattggatcccgcaccggaagtccgggaccaactaaaaattgacatatggataggaaagaggcccacaaaagcgtggcccacatgcttctttagtcgaggataagaacgctggcaaagtggtcataccgcaaggtaaaagtaaaatcgagatcagaagtagctggtttaaaaggccgctgggatgaaaaggggaagcccatgatgctcaaagttaattcaaattcgaacgtttgaactgtaaattcaaagactgaaacggatacatttaagagataataattatgagtaaatgagaattaagtatgattcttaggtataagtaatagggccaagggccataaaagggacacgcatttttgtacaacttactatacacattttcttaccaaatttatagcttttccatagttgataattcttaatacatatttttgtcctcaagaataatccttctcacaaaatatataaatacttgagtgtctgaatccgacatccatattttggcgccgcctgtgtggacggaggattcttgaattgttagattttctataccgcgatttcaagataaccagcaatggccggagaagactccatcaacgcatcgttagccgaaactctcaaaaccatgcaacaacccatgtcagaaataacgcaaaaattcttggatgtggaaaaggctgttgaaacactgcaagcaaaccaggtatctcttagtcagaatgtcaatactatacaatctcgtgttcgttctatgaatgtaagaaaccccgtcggagtttggaggactattttcaattcgccaagctcccttgtgcgaaatggaatcagtggataaacaactccagatgccgctaacgcagtggttcaaccggaagattgggaaacacagctcgtaggcgaagatcagttcgcagatcagcacgagcaagaaaacctcgaccagctcgtgaccatgaggaaggtgaggcgggaaatgaaggaaatgaggtcgaagttccatcaggccacgagttcagagctggatatcaaccgggtcatcgaaaaagctaggcgaccacccttcatcccgcaaatcgcgagtttgagaatcagggattctcggaagcttaatctagaactgtacaatggtttggaggatccaaaaagttatctcgcagcttttctaattgttgcaggacgggttgacttggatgaagccgaaaaaaatgcgagatacttcaaactcttttctgaaaatctgagcagacaagcgctaatgtggtttacctagttggaaacagggtcaatcagtaacttcaaagaattgtcaaccatgttcttgaaacagtattccattcttatggataaaagcatttcagacaccgatctttttcacaagggtcgaatgaatcacttcggacttttatcactaagttcaagaatgtactttcgaagctcccaaggatttcgcaacacttagttttgtcagccttacggaaaggtttgtggcacgattcaagattcaaagaggatttaatacttctcaagccggacacaattcaagatgtgcttttccaagcaaacaactagatggaagtagaagatggaaaaaaaagctttgcgaaaaggaataagccaacaaaaccggcggtcaccttccctaccaagaaattcgaaccctcaaaaaatcaaggaccaaggaagttcggatcacaacctttcaacaataacgtcgagaaatagttccaaggaaagggaaaatcaaacacttgggtcagagaagaaagtttatactgcgactatagtgtctttaaaacgcaactcgtgtaactatgggccagcggagacctttccaaattcaacatagattatttcatgaagaaatatcacgaagcaagggataactccaaagttcaaaacaaaaggccgaggtacgtgcgctttggtagtctttctctgtaagccattctacgtgcatttcaccacttggacggccgacgtgcataaatatgttaggtactccagggacatgatatacaggaacttctccttcatcgaatcttgttaacctgattcatgtaattgattttaattctgaagtatagattgcgaatcgtaaaataaatagttatatttaccttgattttgtttgtatatgatcgtcaaagtagtgctttgaaaaataagcaatctcgtcattgatatatgactcaacaattgagcctgccacatatcttttgttctttgcttttcctttcaattttttgaaaaacctctcaaatggatacatccacctatattggacagggccacccaattcagctttgtatgggagatggataggtagatgttccataacatcgaaaaatgatggtggaaagatcttttccaagttacagatgattaaaactatgttctgtttgagaatttgaacgcgacttgtctgtaaagttctcgaacataggtcccggaaaaatgctccaattcctaaaatatatgtggaagttaaataattacataaaaaaaattcttccataaaaaatagttagaattgtacatgataatgcaaggtggacattccggtcaagaagttcagcaaagataaatggaagtagtcgctccataaaaagatgacaatcatgactcttcatgcctgaaaacttaccattctccaaatctacacaactagccaaatctgaagaataaccatctggaaatctaacatcatgtttcacacattgaaataaactctgtttggcttcgtctgttaatgaatacgctggaaaaggagctttaccattactatcaatatgtaagccctggccgtgaacaaaatttctcaatatccattcttgacatgatattgtcttttgatttacccttaacacgcaagagagtgttcatgatgttgtcaagaaaattcttctttgtatgcataacatcaatattatgtcgaagattgaggtccttccagtaagacaactcccacaatatgctttctttgtgccaattatgttccttcccatagcctcgcatcttcttttcatgaccgttcccaccaacatccttccttttgggtgaatttacactagccaaccactcgtaataaacttgctcccctgtcaaagattcgggtggatactcgctagaagcgtctcttcctttgagaaagtcttttttgttcctacgagatggatgaccatgaggaagaaatctacggtgataatcaaaccaacatgtcttccgtccattgggtagataaaaagactttgtactttccatgcaaactggacaagacaatttaccatgagtagtccatcctgataacatgctatacgccggaaagtcgctaatcgtccagagtggtactgcttttagattaaaattttgactcaatgaaacatcgtacgcatcgactccagtacaccacaactcttttagctcctcaataagaggttggaggaagacatcaagactagctcgaggatgatttggtccagaattcagaatggtaagaaataagtactctgtattcatgcacataccaggggtaaattatatggagttaggatcacaggccacaacgaatgattacgagacatgccaaatggattgaacccatcagtacacaacccgagataaacgttacggggttcttcagcaaaccggggatgtaactcttgaaaatatctccactctgccgcatctgaaggatgattcatttctccctcctttgattggtgctcagcatgccatcgcatagccgcagctgtcttatgactctgatacattctcttcaaccggtctgcaataggtagataccacatacgactatatggtactttggttcttcgacggtcgtccttaggcttccatctttgtgcaccacaaaatcgacattgatcttctttttcgtcttctttccaaaataacatacatttgtttttgcaaacatcaatcgtatgatatggaagtcctaaattgcgcatcaacttctcggtctggtaatgtgaagtggtagcctggtttccttctggtaaaaaatctgtaaacatctcgcaaacggagtccaccaacttttcactcatattatactccgctttgttgtgcatgagtcgagatgctaatgataactgcgactgcccttctcgacaaccatcgtacaatggattatttgcaccttctaacaagtcgtagaacttatttgaatggttacggaccggctcttccacattctgataactaccatcatgatgatagttatcatcatgacccacgttatcatcataccccacgttaaaattaaatgcatcgttcaccatatccacatatggatcttctacaacattacccacttcttcatgattctcactaaaatacgtcctatccatgtaactagttccgatatccatattcaattcttctccatgcttataccaaacataataatcaggcataaatccttgactaaacaaatgactactaactcttctacccgagatgatgtgtttttcattcttgcatacactacaaggacaatgaaatttacctcgacaactctgtactataggctgactattaacgaatgtcatgaattcctcaactcctgcgacgtattcggctgacaaattccccgtcacttcatcgaatctcttgtacatccaatctcgatagaaaccgccactaccgccataattgtagtttcccgccattatagaataaactaaatttctatttttttcttttttttttcttttgattgttgttttgatttgtttgcgaaagaagattgtcgtgaattttgattatatagacgaatttttatgactaatttacgactacaacaaacaaattaggtgtaccaacttggcaatgcggaaaacgttttccaacaacttaatgcgactattctgcgactcagttgcgactattttacgattacagatatgtgtcgtatgttagtcgccgattgggcgactaacaaccgcagtcggaaaatgtagtcgtccatttgcgactatgtaacgacaaacgtttttcttctataatataatcgttaaatagtcgttactatacgagtatatgccgactaacatatttagtcgtaaaataacgactaattgactactaatgttcatgttgtcgtatatgcgtcgtaaaacggtcgtgacgtagtcgccaaaaacgacgactacatctgttgtcgctttctgtagtcgttgtttgtctgttttcttgtagtgtgattgttgttgagggtcgttggcagacacaagaagaaactgcgttggttaatggactaccacttggaccaaaggcagtaaaagtatttgtggattcagtgcttcaacaagaaacattcatatggaggccaacaatggatatgacctatcttgaggactgtttgatggcttttgtttcatggcctgtcaataaagtttgctttgagaatccatcttctagacagcattctgcatcaacagatattgggacaaaatctgcagagacaagtgctaaagcagcgtcaactgcctcttaagcctcaggatcaggttctgaatcacctattgagactgcaacacgcccaagctctctccagttaagaaaattatatcagattcacagtctcctatccggaaatcacagtaagtactctattttattttgttctggttatttttgtcaaatcttttgacttttgttttatgttgtaacatggcagcgtatcatgcaaaatggttcaaaggaaaataagaagtgcatgttgatagacattaccgacaagaatcaagttgttgttgaaggccgatgggcaacaaatgatccaaaccagaaggttcactttgtttctttgggttctaatgcagttaaagtgtgggtagacattgtcaaagttagcgatgcagaagtttggaggaaatcagatgaaatagagattatggaagatgcccttagctcctgtattgcttagctagagaacaaggtcattatgtcttaaactgatggttttcttgtgtaatgctaagtacctgaacttatgcacttagctcctgtattgctttactttatgcttgagacttttcttatgtattttggatctaaacttatgtttaatcaatggtcaatgtatgagattttataaaccaggttatgtgttatgtgtactataatcacatctcagaaaatgctataagaatacaggtaatagaatatttaacatatcactaatgctatgttttaatcatctttcgtagcttataaattgatataagagcataacatagcacataatttgactaattattttccaattgaaaaaaggcaaaccacgataaaacaacatttcgcaacagctatattagagatatataacatagcacgaaaaatcaaatattatataatttttttaagaaccctaaacgtgataatacaactgttctttatagaaatgttataaaactataacatagcatactgaactcacgctct

SEQ ID NO: 15327 - DNA, 3964 bp, Arabidopsis thaliana landsberg
  unsure (1)..(3964): unsure at all n locations
agctggagctatcattgatgttaagaagggaaaaatctttctttacctcgggagagatctcaagatgaccgttcggtatcactaacaccatgaagaagcctacgatagaaggaaatgttttctggattgaagagatggatatgttagctcatgaaatgctagaagagctggnnnnnnnnnnnnnnnnnnnnnnnnntctaacaaaggatagcaaggaaggagatttacatttggagactttggggtaccagaagctgttagatgaacacaaagcagttgagaatccaggagagtatgaagatttgggtgaaagagcaaggggggaatatatactcgaccacatcactcgaccaacagcccattcagtctactcgaccgagctactcgaccacaactcctcctctgaagccaacttagtatccgatgactggtctgaactcaaagtgcccaaagtcgatttgaaaccgctaccaaaagggctaaggtacgtttttcttggactaaactctacttatcctgtcatagtgaatgatgagctaattgctgatcaagtaaacctgctgataactgagctcaagaagtataggaaagctataggatactcgttagatgatattaaggggatttcacccaccttatgcacccatagaatccatcttgaaaatgaatcctactctagcattgaacctcaaaggagattaaacccaaatttgaaagaggttgtgaaaaaggagatacttaaactattagatgctggggttatctaccatatctctgatagcatttgggtatctccagttcactgcgttccttaaaaaggaggtataacagttgttaaaaattctaaagatgaactgatacccactaggactataactggacataggatgtgtattgattataggaagttaaatgctgcctctagaaaagaccatttcccattgcccttcattgattagatgctagaaagattagcaaaccatccttactattgcttcttggatggttataccggattttttcaaatccctattcacccaaatgaccaagagaaaactacttttacttgtccttatgggacctttgcttacaagtgtatgcctttcggtctctataatgcacctgctacttttcagcggtgcatgacttccattttctcggatttgatagaggagatggtagaggtattcatggatgatttttctgtttatggctcttccttctcctcgtgtttgttgaacctgtgcagggtacttaaaagatgtgaagagacaaacctggtactaaactgggaaaaatgccatttcatggttagagaaggcatcgttttggggcacaaaatttctgaggaaggaatagaggttgataaggctaaggttgacgtgatgatgcacttgcagccgccaaagactgtcaaggacataaggagttttcttggtcatgcaggattttacagaagattcatcaaggatttctccaagttggcgagaccgctcaccagacttctgtgaaggaaaccgagtttgcatttgatgaagaatgtttgacagcctttaagttaatcaaggaagctttggtcactgccccaatagtccaagcaccaaactgggacttcccattcgaaatcatgtgcgatgcttcagattatgcagtaggagcagttttgggccagcagatcgacaaatagctacatgtgatctactacgcgagcagaacgatggatgatgcacaggtaaggtatgccactatagagaaggaactgctagctgtggtatttgcattcgagaaatttagaagctacctagtgggttctaaggtgacagtttacactgatcatgctgctctgaggcatataaatgcgaagaaggataccaaacctaggctgttgagatggatcttattgctccaatagtttgacatggagatagttgataagaagggaattgaaaacggtgtagctgatcatctgtctaggatgagaattgaagacgaggtccctattgacgactccatgccagaagaacagctaatggcaattcggcaacttaacgagagtgctcaaattcggaaatcactcgatcaagtatgtgcagcagaagacaagcttccatggtatgttgatcacgtcaactacttggttggtggtgaagagcctccaaatctgtcgagctatgagaagaagaatttcttcaaggacattaaccatttctactgggacgaaccttatctttacatactctgtaaagataagatctacaggcgatgcgtctcagaagacgaaaccgaaggcatcctactgcactaccatgggtctgctatggtggccactttgcaacgttcaagacagtgtcaaaaatcctgcaagctggtttttggtggcctattctttttaaggatgctcatagatttgttgcgaagtgtgatgcttgccagcgcaaggggggtataagcaaaaggaatgagatgccttaaaactttattatggaagtagaggtgtttgatgtgtggggaattgacttcatgggaccattcccatcttcatatggaaatgaatacatactggttgctgtagattacgtctataagttggttgaggctatagcatgtcgcaagaatgatgctgcagtggtactcaagttgtttaagaaaatcatcttcccaaggtttggagtcccaagagtggtgataagtgatgggggcagacacttcatcaataaagtttttgcgaacttgttggccaagcaaggtgtcaaccataaggtagcgacaccttatcatccccaaacatgtggacaggttgagctttctaacagagagattaagggaatcttggagaaaactgttggtaaatctagaaaggattgggctgcaaaactagatgatgctctttggacatacagaaccgcctacaagactctaattggaaccacaccattcaaccttatctacgggaagtcttgtcacctaccagttgagttggagtataaggcactatgggctacaaagttgatgaacttcgacatcaagccagcagcagaacgacgtctggttcaactcaatgagttagatgagatccatttgaatgcttatgagagttcccgaatctacaaagagagaaccaaagccattcatgacaagaagatcatcttgaggcagttcacggaaggtgataaggtattcctattcaactcaaggctcaagatttttcctggaaaactccgttcaaagtggtcaggccctttcgtcataaaggaaatgcgtccaaacagatcagcagtactttgggataacaatggagaaccgttttctaccaatggacaaaggctgaaaccataccttgctcattccactcccgaagagggcacggcagtccctctaacggatccagaccaagcctaatcagttcattacggtcaagctaacgaccttaaacaagcgcttcgtgggaggcaacccacatggtattgtacatactttttattctttcttttattttcctttgattttggtttgtttcgctccgctgtggagtttagacttatcggctcaacagtcgatagagtctttatatttgacggtggtgtgagattgtttttgagtgcaggaacccgccaggtttagatcgatcgatcccaacactagatcggtcgatcctgtcgtgacatcgaagctgaaaaaaagtccgccagggtgggatcgatcgatccgatcgtgacgtctagctcagaaacatccgccagaaagggatcgatcgatccagaaatgagtcgtcgggaccaatggcaacagatcgaccgatccaggtagtcgatcgatcggtccgggaagcagctttgcgatttgagcatgcaattgaattggtatcgatcgatcgatccacggtaagtattacaattctgtttaaccgaaaattggcagtgaaccaaactagaccagattgaaccgggtttgccacttaaaaacg

SEQ ID NO: 15328 - DNA, 215 bp, Arabidopsis thaliana landsberg
gagatactttgttggtaacgaaatctgatctttgctgtgctcatcatctaagtttaaactcattcatgggtccactgaaatgaattgtggtccaaaaatcactcctgttattatcgtcatggttttaagaaatctatctgggcagacatattatcgcgaacttgtcgacctatttggctaaggctagacatgattgggaagctctgtttagttat

SEQ ID NO: 15329 - DNA, 712 bp, Arabidopsis thaliana landsberg
catgtcgaaagacatctgtggcggttgatccattcaaaccgaatgtcaaagagaagggtatctatttcgttgtgatctcccattgtatttaccaacggtatgggttccaagatatctccttcaaacacaatacaccggaaaccatgagtccaaatcatctgtaaagcgtggagaaatcacagtgcctccgcgtgtatcgccgaatttgctgcctgaagttttgcacaaccaaatcgaataacttgaccactattgtctctgactatccatccagtatttgtaaatgaacgtccctgcacatagccgctataaaaattacatttaacccattctgggagagggggtatccattgccgactacggaaatgctcatgtgaatgaccaaacggcgagagagaatcatgatttacttcagaacctatcccagtcgtatctatccattcctaaacttcatagaaaccttttcttgcttcacttgcaggatcatagtttttcttttgaaagaggaaagcattccttgatttccatatcctccacatcatccaaaaaggtagtaatcgattgctgagagggatattttgtaccttatgaagttcaaacagcttgttgaaattgtcttccaattctcttggtttgaggtagttatataaaccaaaatcaaccacacatttgagatcgaagggacaacggaaaagagattagacaaacagta

SEQ ID NO: 15330 - DNA, 1702 bp, Arabidopsis thaliana landsberg
agttgaatcaacctgagttttctcctcttaatttccactaggtttaggttgtgtgtagctaaattgcattattctctattccgattatcaaaagtttgttctatgatttgggtcttggagaaaattgaaatagtcagacaaactctttgtatttttccaaggttacaaatctttttcatgtccaagcaaaagttttttagttagagtttggcaaatcataaacataacttattcttttaggtttgagagtatgacaaagaagagtaattacaaaacataaagaagggaaacatgtttcttgctccatattacaattaatattaactaatatttgtaaggaccatatgaaattatgttcttgaagatcacaagttgagtctgaaccatgccataatgagtaatgagcttttatctcttatctaaaagttcagctttattaaatagtcgatggattatggcaatcacgattttcttttgttttgtgaaattctttctgttgtaaaataactaggtttataaattgttgttgtgtataattcatgagtaagaagaagatatatataggagatacatattagggtaaccaagtaatgtaaagatttttagaatatccaaatgggctcttaatgggcatccatataatatctattattcataacactccctctgaagaccattatataaaggaattgtaaatgcacatataataaatgttacctcattaaaaaccttaccaggaaaacccagtggggaaaccatggttaagagaaactgcgtgtaacacgcatttactccccctcatgaatacatcacatatctttgagacgacgcaatccaagattttatactaacttcttgaaagtagcagttggtagcgtcttggtaaataaatctgccaaattctcgcttgaacgaatatgtgtgacatgttcctcaccatccttctgtagatcatgggtgaagaagaattttggtagaatatgcttgattttgtcacctttgatgtatctatccttcagttttgcgatacatgctatattatcctcatgcatgaccatagggacttcctttcatgtaggtaagccacaatctcctcgtatatgatggataattgatcttaaccatacacattcacgactagcttcatagatagccaaaatctctgcatggttagaggaagtagctgaatggtttgcttcatagaacaacaagaaataggagtaccactgtaggtgcacacatgtcctgtttgtgatcgatcgttatgaggatcggatagatatcctgcatctgcaaaaccaatcaagtcttctttggacgagttagagaagaatagacccatatcttttgtaccctacaagtatctaagtagatgtttgatctcattctagtgccttcgaattgggaatgagctaaatcttgctaacaaattcaccgaaattttatatcaggtcttgtatgactagcaaggtacattaatgctcatattgcacttaagtatggtacttcaagaccaagcacttcttcatttttttctcgaggacggaatggatttttatctacatcaagtgctcttacaatcattgggctactcaacagaggtgctctgttctagagagaatcttttaagcacatttttagtgtatgtcgtttgatgcacaaggattccattcttcaggtgctcaatctgtaatcctagaca

SEQ ID NO: 15331 - DNA, 515 bp, Arabidopsis thaliana landsberg
agattattacattagttagcttagtcttgatttcatcctagctagtagagattgactataaacttgaaaatttactaacaagagttttaaggaggtaatctttccaagataatcaggtaagtctcctgtgagattgcagttcctaagaattctacaatgtcacaagaaaaaaaaaaggttgtgaattagctttcaacgtccaaaaaggttccaaatgtagtttaatctataagactcacaatgtctccatcttttttatgttccttaactgtggaaatggagattcgggtccattcaaatcgctgattctcctaagaaatgcatttacaagaataataaagtcaatatacattgaagaaaagttaacaactaacatgacgccaatgtagttagttatacatacaagtcttttaactctacgagagaagcaatggcaatgggaattggtccaactaaaccacttgcttgaataaacctgaggtaaccataacattataattacttaaatcaagaat

SEQ ID NO: 15332 - DNA, 1968 bp, Arabidopsis thaliana landsberg
  unsure (1)..(1968): unsure at all n locations
ttacttttcacttccttgttctcttccttcttcttctcaatgtctgtctctgttttcgacctcttgggtgatttctcaggtgcctgaaagaagaaaagagaagcgaaattgtaaagacctcaaaaagtgatgagaattgaggatacaagaagaggtaatcaaaaacttacggatgtatcaaatagcgactccaaaacatcgtagttgatcaccgaactaagtctctgtaagagtcaacactcaaaatcagaaaaaaggaagaaacacagactctaaagtttcttcaatgctaataatttcgacagccatgttgttgactatgtactnnnnnnnnnnnnnnnnnnnnnatgatacatggcatactcggtttatctttttttgcatattcgttttcaagtatcaaggtatcaaagaagctgacattctaacctttttatcaagcgttcggcgtaccgcctccactgctgtggctggaggagccgcgttctttgcttcctcagcttttttttgttgcttttcctatatgaagagagagaaaaaagaatcagaaattgattgagaaatcatatgtcatcaatgggtatcatgttattctccaaaagtcagatgcttgatcaggaacataatttcaaagttcaaactgagtcacctttctagattttgccgcatcagctttggcagcttcgaaagcctttcttgcatcttctgggcaattagagttgctagcttttaaagcttcactagccgccttcagagctgcttccttagcagcttgctcctacaaacaacataattttgtatgtgatttgatctcctaggtgataaatcaaaaggaattcaagagaagatacatgttatatagcctctgaaatcacctcaagataatctttgttcatttctgtccatgtgatcgtcttatagtgcgtttcctcctcgttgttgatatacccatttacctgagcaacagtaaaatactatgactgacgatcaaatataacaagtgaaactgtagtgagaaaacaagactttgaaactgttgagaattcttctttatttcatgttccatattcgaggttggaaatttgacatagcatttactactaaacaattaccgacctcatcatcactgatgtcagaaaagttgtctgattcatccgaagtatcagcatgttcttcagccccatctttatctttttcacctttctctgcgacacagcccaaatagattctcaagtgctcaaacgatagtgaagaactttaatctgatagaaaacaattgcactcaccagaacattgttttccccttttgctcatactgcaatagtctgactgttaaaagttcggcacaagaaagattttagtataatatcatacaagcagaagtgaacaagctcccaatacaggtgctttgggtagggaggaaaatatctaaactgcaatcctcaaataaaagagcaccaaaacttacatatagttgttcatcgtggtttaggctactaattcctccctcgttttcttctctagctgctttttccattcgctctttctctgcgcgctggaaagcaggaggattggacccaccaacaagtccaccagaaacatttatgaactgcattaaaaattgcaaaagaaaacatttgattgttaactctgggaaccatttgtcaacgactcgcaactacgtaaacagaagacgtgattagaaaaatcaggaaattaaccggtgacctacatctttgtagcagtcttcacatagtccataaccaaaaggtttactatcctgatgcatacagagcaccgcctctttatttgaggttggtttcatggtaaaagatcttttatgcgattctctttctctgagctcattaacctagccgcatatgtcgatccgggtcaaggagggttccccgcagccaagtcgcgaactggcggggaaccaaaacgaaaaccactccgagcgaaaacgct

SEQ ID NO: 15333 - DNA, 3755 bp, Arabidopsis thaliana landsberg
ttcttcgatctctataccatcaaccttgttctaatcagcccaataaaatcaagtaactgctttttaatggaagaaagttaaatcttaaatggatactatatagtgaacccaaaggatccaatcttaaacaatagtcaaatctattaagattccaatggttttccttcttcctcttttaaaataaaacgagagatgatagaattctgattgatatcgagaaattaaaattcagaaaaggtatggatgataatcgcttgcttcgtcaaagaagaagatcaaccatgctagatctgaatcgaaattttggttgaggtgatggagaagcaattgagcatcaatggtgagttcaacagtaggtttcatgtcattgaagagccagcaaaataatcgaaatttctgggatttggctataatgagagggaggcagttggctccgtcaatggcagcggcggaggtggtggtcgcgacggcgagaaaaaaaataaaagagtgagtgtaagctaaaaggggtgaaaattataaaacactatcacctataattacctgtttttgggagtacattgaaatgttcctaaaatcacaaaaacatacactttaaagtgctaattccataattgttccaactttagatatgacaaagaattaggaaaataaaaccaaaaatagtcttaaaatgattcagtagacgtgactcgtaggcttcaaaagaagacagaatcgcaaagtacagtgtggttctaatagtgacgaaaataattatatatatattcgttattattaaaatcacattgcattttattcgcaattaaaccgcatgtctctatccaaagctctagatttcaaatgatgattgttctgtatggtgtggttgcaaccctaatatctatacaaaaccgccctacaattcttcacaattatctagcacgtcttcattggtaagttattttctctttctattcttttcataggtgatgatgttaattcattctgctcaacctgcttatatggctttaaaaacatgtatattactgtttcaggaaaaagacatgttattactattttagttacaactagtaaaaacattgaatttaaggtgatatgtggatgttttaataaggttatcctaattggagtataataggtccaaaaaaaggttccaatggaatttaaaaggtccttttggttaaaaagtttatataatatgccgtcaaccaaatatcatcgattataaatgtaaatgtgaaggaggaggaaaccacccactccaattggcattggcctttacctttacgatttatggaaaatacattcgaaaatactaaaattttatgtactattttatatataaacataaagatatacgagaaaggagaaaagaaaacatgaaagcctatagtgttataaaaatttactatcaatctcagtcaataaatgactaaagttccaaaagtttttctgttgctttattatctttttatcttcttaatatgaaccgatggacaacgagaatgcccccatgagtttctttgactgtgatgatttcacttggatatgcacatgttataataataggttgtctctgaatcgtacgacggtaacattagtagttgtaataattatagtatattatttaaactagaaagcaaaacaaaacagaaaaaaaacaaagaaaaagtaagagtttaaatgccaaatgagtgctaaccgttggatggagaagacggttgtcttctgtgctctgcaactccaattggtaagaatcatttgaaaactactctctttgttttctttttctttgtgtactttgtttattgatatttaggttttatttattgctttcttcaattatttcttgtttgatcaataattgtgagtttaggtttcgtagacatggtcatgaccaggtcaccgtgacctgaagctattggtttggtcgtttctatttcagtcttcttccacatatagctactatatatacatatatatatatatatatataattttgatcaataataaaaaaatacatgttgcattataatgatttaatttctagttaagagaaaaagaagttctatctaagagtgtttaattttttaaagtctttaaaaacaaatgttgcattaatagtaaacgcaagtgacatatgaatttcaacaatatacatatatattatcttgcaaggagagagttggaattttggtatctaaatttgtgtatgaaaattgtcatttcattttgtagaacaacctaattaaaggataataatcgataggttgaactgaaatactgaagatggccaatactttatcaaaacaaatgatggccaaggcaaacctttggtaacaacgtaaagaatatatgatttcgaatgtttgataatgattctacagttataaaatgttcaatagttttcatgttcttaatcaaactaagatagtatatccatgtaaaaataccttaaacttattaacaaaaagggaaatattttttaaaaaaaattacaaaagaaaaccatttcaacaacctgataccaaagtatatttcatgaaatataggagagagactagggtatgcttgtacggataatgaataaagttttatatgcagtttgtctatatgaaatgaatggtgataaatagttgttgaaaactttaacaacaagtacgagaaaacaagacatcatcaccataaatatgcgaaaaaatcgggaaaacgtcttcgatcggaaccagaaaagatttaagctgaaaacaagagtcgagatgaacattagatgacttaaaaaagagagggagatttacataaaaacgacaaaatcaatctcaactatttttacacggttttttccaacccaaattctaatctcttgcatttatcaatccgaactctcatgtaattttcaaataacaaacctaaactatataacagttaaccaatgtaaaatatagccattattaaataatgtaataaacttgaattatgtaaccgttagttaagtgaataaaaagaagaagaagacgtgtttggtctttgagatggtatgtttaatttgtggcctcgaggaggagtaacggttggatggtagcctccaaaccgaggtctcaccagtgtaacctaagccatgaaagtaaagtcagataaaaaaaagaagatgagcgaagacaatattgttcttagtgttcttcaccaatatgccttataataaggaaacacatttgataaggaactcacactcagattctttcaagccaagaatcagttactcaaaaagggttttgacaacactcactaaacgaggtagatcggatataaagaaaaccattagaacttttgtcacaagaaatactagagaaaaaaaaacattctggtcagttctttatgtttacccacttctttgtctcttcttaaacaatcagaacaaagtgtaatgcgagtaagagaacaaacaatcctatgacatatgttgccaaaggaatgaagcatctgttcttctgggtcttattgtttgtattttgacatgaagcaaacaggcaagttctacaggaatccaaatgggtaaggtacaggattcgattctccgcctcttcaaaattctttaaaaataaacgaattgagctaatgaatcaccattttgacatactacatcaatgggaatttttttttaaaatatatacgaattatggattatattaaaaaaatcatttttagtagttatgcaaacattctgctagttaattaggggaaaaaaataatta

SEQ ID NO: 15334 - DNA, 1373 bp, Arabidopsis thaliana landsberg
tctcatttggttccaatcttccatggaagtagatgagcttccacgcagaactgcgcctgagccatttgatgaatctgatatgctgcatgacatggattggttaggttcaacaatactgccactgcatcggattgttggatccattccatctgaaatttccacagagcttaagttgcaaacgctctttattccttcactgccattcaagccagactctttggccatccaagcccatggctgaccactagcattaacctccatgaatgatcctgcaaaaactgaaaatggattaagattctaatcgctccatctatggtttatggatagagaagttcttacctggtcttgcttgattcatggttgtatcctcctctaactgaatggcattgtcgacagatttagcttcctggagcttgaatgaagtatcgtcaggcatatcctcctgacttcttcttgcatgtgcatcattatcaagagacgacagacccttttgggtatcaatttcttgaataaaaggtctaactgcaatgaattcgccagttgctgagtcgaactttagtcctccttctacaccttggaccgagtccagtaccgtctgtattttccttagtgacctgttcactttgttaatcttacgagatggccacctcatgatcccatgttgcctgcatatccgtttcaatgtagttggacaaactgcagaagaaaatccaagtcgagggtcagatagtttgtgtgctaacaaaaataaacccatgcttggaaatatgcggaagtctcaccaccaaggctttttgcagcatcctttagactcccagagaagtgttgttggagagcgcttaagctcacatttttctctgtagtgcttttcttcttctctggtgttcttgctttgctcacatcctatgaaaagttgtaaggaaaaatatcagtgttcagtttaacgaactgtttcacaaaatttacagaataaccaaattgcataaatcacatacctgctccaaagtgccttgagatactgtgatactgttttctttatcagaggacatacccgaaaacatgcttctagtagagttaaactcggaatccaatgatattgtctgaaaattttctgaagacgttgtctgcgggaaattagacatatcactactccgaaatccaggtttagtcccttcttttttagttgaccccacttctgaaacagttctcaaagttcgacaaattctctgcattgtacccgaaaggctgtctaatagaagttgttgttccaagcttcctttcatacttacaggcaagaacagttcaagtatgtaataatcttcaccagtgtaagtgctcctcagttttatagcgacagcagcattcagaccgta

SEQ ID NO: 15335 - DNA, 1210 bp, Arabidopsis thaliana landsberg
cctattttgttttggcaccaactaattgcattggttctcttagttagaagagtgaattattcattcgcggtaccaaatgttagggtccactgctgtttctggacttgcttcaatggtccaagcaaactccagacatatgaagcaatctcaagctgttgtatttaaagacatgaccaaccttccctccatggggctttcgtctgcaactggaaaaggaaaaggttagtgttttgaacagatttttaattaagatacaatgacaaaacctaaatatcaatgtttaaacaaaagtctaacacaattattgcaatctttgttttcaagcgagccaaaacgaaagtactacttcttgcatgttctttcacaaacagactactttgcagacagaaaaagacagattcccaaggaaaaatctccaaaatgactttgaaaatgccttccactctcctattactcaaggtacctatgaagtgcaatttataatgtctaatcacacaatgttagtcatctaatctttacacattctgttttgaattattaggtcaaagttcggccaccatcaataatgactttcattgtgaaatgtctgatgatgaatccatgcctgatttcaactatgatagttcatcaaccaatgcaacagatgaggatcaacactactatcttagtccaacagaagatgatactgatgatgaatctactatttctattccagttgctgacccatcatctgacatctgccagaacaatgcaaacccgacagaacctacaacgcctcatatcgccaaatgtgcagaacatgaaatattcattgctactcttaagaaaacggctgcaaaagcagcagcaaacccgaatttgccgcagccaaagaaaagaggaaggccacgattgaataaagatacaaccaattcggctgagactgcaacaaaatcaggtataatgcggtctttacattacaagaagtatgtataatatttaagagttactatgggtttcctaatgattttctatttacatgtaaagcttaccttgatcatggtgatgcaacatacaagtgcaactactgtggggcgttgatgtggtttgctgagcgtataaataagaagcagaaaaacaaatctcctacgtttacactgtgttgtggaaaaggaagtgttaagttaccacttcttaaagattcgcctgcgcttataaacaagcttcttac

SEQ ID NO: 15336 - DNA, 1985 bp, Arabidopsis thaliana landsberg
tttcccacacggtttgcaaccgacaaagtgagtcaccaatggccatctgtgatctcctagacccgggtggtagttttctatcatttcttcatatctgtccacaagaatcccccagtaaccgtgaagatagtatccactttctaggtacacctataacaacaatgcagtggctcaaatgagtagctcaacaaaatccaaaccaagcaaagatttgagtttacttcaataatagacccttacacagatgtcagaaaccacaagatgcaactcacattgtcatttttgatgatcaagagacatgataaaccacaaaaagcaactcacattgttatttttgatgttcaagagacatgataaaccacaacaagcaaaccacaagtttccaaatttagtttttttttttttccacatcaaaccaatgctgaaatggaatcaagttcatagttatatcccagtcaaaatcagtttgtaccgttattgccccaagcgtctcgctgagtagccaacagataaaccatagcagactgatcatcagcttcgaacaccggtctatccttgagctcacgggtcaaaaccttacccgcttcttcacggatcttccctttaggacccatgggagcccaagtatcaagcaaatcaagtgcccattgattgttcctaagcaagaaactccctgtattcaacccaatccaattcttctgatcataaaccatctcattccatccatgcatcaccagattgtaatctttatacctctcccatggaagctcaaaagccatatctgtaaacatagcatcactatccatccaccaaagaaactcaatctcaggatgtgacaacaaaagcttcctaatcaatggaagctttgcccaaaaaccagccatctctgcatcgagaagagccatgttgtagaagatctcgatcccatgtaacctacagtaatcgatcttgttcttgatcgatttcaagaggtaatgatcaccgacaggattctcacatggttttggcgccgaaccagtcaccaaaagaacacgtggcttgttaggtccgatgaaattagggaagctagggttcttagctaaccaatcagatctctgctcatcccaatctgatatcttgggtccgagagtgtaaggtttattcgggtcgggtttctcttcttcaccttcgtcaacgaaaatcttgttgatgtcaaacgtctcgtagttattactcccaccggaattacctccaccgtcaccggaagaagaatctcctccggtctgaatttcttcgaggacacggtgaggctcacctcgtttgcgtgcgtggaaatgttgacggatctcgtcaagatcttgctccggagttccgaatttaccggcgccgattgtgctacgtaggacaacaacggtaagaagaagacagagaatcgttacctttaattggcgtaaagctctttggattctccggcaccggtaagctcctaaacacctctcaatcatcttctttcttcttacaagattctctgtaaaagatctgtgctttatgtgtttttaaaagaagatctgagtttccattaatgtaagagattcgaatttgataataacactgttaattaccaaagttacttactacaacaagagaagagaagcgaggagagtttttgtgtttttggacacgacagttaagattgtctgatttcacttaattgtcggtggtagtgatgagttagtagcgttgttgacacgtggcgaagttttagagcgtatcatttgcgatcaattatcttgaccgttgatgcagttatagatctatctataaaaaactaaaaatctaacagcgttgaaaagtcaactcgttgttttttttgtacaaactcgtttgtttatttatatatagaaaactagttgaaaagaaaaaggagcataaatagcataatattttaacttgtttgatatagttaaatacttaaattactaattagaggttaggaagttacccac

SEQ ID NO: 15337 - DNA, 1869 bp, Arabidopsis thaliana landsberg
atcagtgattatattgtgctcttcttcttgaataacggtttagggaagaagtcctaaaccggagaaaaccaaagtgaaagttttagtttgatctgttgaaactttcacgtgagttgcaagtaacacacttgtaaatccacttaaaagaagtcattctttttgtatttgatttccttattaagtgtgatatacttaatatttgaaaatatggtatcaattaatttattgatttatttatatttttcaatcataaataaccgacaacatgaattgcaatgatgagaagtggcagcagcaagcaggcacaagggggacttcttccaatcaatagaatcatatgatcttgtttttgtgtgtaagtgtaacccacaataacggtttagggaagaagagctaaaccggtgaaaaccatagtgagattaattagtttgatcatttatgtgttggaaactctctagtcttgtccttggcttcttgtaagttgcaagtaatgcactttcttgtaagatccacttaaaagaagtcactcttttggtatttgtgttccttataaagtgtgttatacttatttttgtaatatggtttcatatacttcggaaataaacagtaagttggtttctcttcgatttaatcttcttaaaaccttaaaccttacagagattcaaatcatggatcatgtttcaggacagcctaacatcgtacaaatcaaaggttcttaggaggataagaattatatacacattgtaatggaattgtgtggtgctgtagagttagaatactatgctttaagctatcaagaaggtgagccaaagagattagtggattgggacatgaacatcaatcctcctcctctttcttggattcactgctttggttacttcctctgctgctttgcttacttccgttgctgctgcttgttttcttcaactacaattgcttgcttttgttcatctgctgctgcttcgttttcttcatcgtcctcatcgtcatcatcatcattgtctaacccgaaatccccaacatcttgtatctcaacagcctcctgatttccgattcccccatttcctcctacattaccctcaccatttcctcctccatcatccccaccatttcctactccattacccccattaccacatccaccatccccaccatttcctcctccattatcacctttgtttgtgtctattaagaaaatccgctgaagcttttcattttgtttccactctgcacaaatagaacatatctccaccatctgtacaccacacctaaagaaagcaacaaccaatacaataaataaactatgtaattcagaatgtgcatagtagaatgtgcatcaaattcagaatcactcaaaataaatatgcaactatttgagaaaaaaaaaactttgggtgttctatcttcattcaagaagttcagctccgagattcctttctttgactgtgtttgataggttttggatctgattatgttagtttgtgtcagtttcatttagtcatgagcaaatttggtgactttttggttcctatgcatagaggttgatctttagtatgatagaattgggtttatgttttatcattgccagaggtttatcttttaattgaatcatcttaggagtttgatagttttggattacataaatgttttgaaaaatgtacaagatttgttttgatgcgaaaatttggttacttttggtcaaatgcgtatacatttggagttatatgtatgttttggagtgtatggattatagtgtacatcctactttgtggcaaactatccctttgttatcgagtaagatttacttgcacaatcaagaagaaaccttcggcttgggggagcatgttcagccaacggtggaagcactga

SEQ ID NO: 15338 - DNA, 3256 bp, Arabidopsis thaliana landsberg
  unsure (1)..(3256): unsure at all n locations
gacactggtaagtttattcctcttcattctctagtgcttatttttctctttattttcagggcacatcagctattgagggcattttcctagacatgttgaatctaaatttgatgcaaatcccaacgtgttcgagaaaatgtgtaaccttagactgttgaaattgtattgctccaaagcggaagagaagcatggagtatcttttccacaaggtcttgaatatttgccgagcaagctaaggcttctccattgggaatattatcctctaagttctttgccgaaaagttttaatccagagaaccttgtcgagcttaacttgccaagtagctgtgcaaagaaactttggaaaggaaaaaaggcaaggttttgtacaaccaattcagtaaaatatggtaaactttgaagttgctcatgattattcctctctttcagagtctggaaaagcttaaaaagatgagacttagctactccgaccagttaactaaaatcccaagactttcaagcgcaacaaatcttgagcatattgatcttgaaggttgcaacagtttgttgagccttagccagtccatttcttatcttaagaagcttgtttttctgaatttaaagggctgctcgaagctggagaatattccatctatggttgatttagaatcgcttgaggttctaaatctttcgggttgttcaaagctagggaacttcccggagatctcaccaaatgtgaaagaactgtacatgggtgggactatgatacaagaaatcccgtcatcgattaannnnnnnnnnnnnnnnnnnnnnnnnnnnnnngaaaacagtagacatctcaagaatcttccaacaagcatctacaagttgaagcatcttgaaactctaaatctttcaggctgcataagcctggagcgatttccagactcgtcgagaaggatgaaatgcttaaggtttttggatttaagcaggacagacattaaagagctgccctcttccatatcgtatctgactgctcttgacgaactattattcgtagactccaggagaaactcgccagttgtaaccaatcccaatgccaattcaactgagttgatgccttctgagtcaagtaagcttgagatcttaggtactccggcagataacgaagtagttgttggtggtacggtagagaaaacccgtggtattgaacgaacgccgactattttggtgaagtcgagagagtatctaattcccgatgatgttgtggcggttggtggtgatattaaggggctaagaccaccagtacttcagctccaaccagcaatgaaactatctcatattcctcgaggatcaacttgggatttcgttacgcatttcgctccacctgaaacagttgcgccgccgagttcctcttcagaagccagggaagaggaagtggaaacggaagagacgggagctatgtttatcccattgggggataaggagacatgctcattcactgtaaacaagggtgactcctcaaggacaatatctaatacgtcgccgatttatgcctccgaaggatctttcatcacgtgttggcagaagggtcaacttctgggacgaggatcattagggtccgtatatgaaggcatttcagcgtaagtcttactggttgataatgtttgttgaacttaaaatcagatttcttagttgcaaagcgatactaagaaagcgagttttcctttatgcctttggctcatgccaaccaaaatgctttatggtggatgtttatgttaaatgtagagatggggacttctttgctgtcaaggaagtttcacttcttgatcagggaattcaggcacaagaatgcattcaacaagtcgagggggtatgaaagtcatatacatcagttattactggcatcaaattttaattcttgtaacattgtgtccttgatctgttggaagtagtttgctaatcctcattacatttgccacatttttcattttttatttttctacaggggattgcgctacttagtcagcttcagcatcagaatattgtgcgatatcgtggcacagccaaggtgtagtcctgttctctctttcttgttctcagttgcattttgttgtgcaattggtaactcctttagctgtttacaggacgtgtcaaaattgaacatctttcttaagcttgtaacccaaggatccgttcaaaaactctacgaaagataccaacttagctacactgtagtctccttgtatacaagacaaattcttgatgggttgaattatctccacgataaaggctttgttcacagctctgactagtaaactctcttgtcatagaaatcttaaaaatctgatttctttcatgtgttacttacttttctcatctgatcgacagagggacattaaatgtgcaatattgttggtggacgctaatggcaccgtcaaacttgcagattttggattggcagaggttcttttccattcatagatgtttgtagttttattactaattaataacatggtacatcgcttatcccactgacattgtacctgtgtcattttgttatataggcgtcaaagttcaacgacattatgtcttgcaagggaacattattttggatggctccggaggtaattgtgttgggatccttctcattgttttggattgtgtgaatacaatgatagacaacatatcatacatcaatagcaatgttctcggctttgataaccttaaaaaaaaccgattatgtttccttcaaagtatttggttaaatttttgtttatggtaagttggtaactgtaagtatgtttatactcgaggctatacttgtatggttatttctaaatagaacataaccatttgatcaggttattaaccgaaaggatagtgatggcaatggaagtccagctgatatatggagccttgggtgcactgtgctggaaatgtgtactggtcagatcccctactccgatctaaaacctgtaagtcttcaagattttcaaacttttgaactgtcttaataatcttaaacgacatttgaagtgtctactttatgggattttatgagttaaaggtcagaatttgtgcaaacgcgcaggttcaagccctgtttaggatcggaaggggtactcttccggaagtacctgatacgttatcactagatgctcggcttttcatacttaagtgtcttaaagtgaacccggaagagcggccaactgcagctgaactgctgcaccatccatttgtgagagggtccttaccatgattgggctagggatcaacatttctgctcttgcaagta

SEQ ID NO: 15339 - DNA, 623 bp, Arabidopsis thaliana landsberg
  unsure (1)..(623): unsure at all n locations
ctgactatatctcttatgatcaactttcaactccatatcgagcttatatctgtttagttacaaagtattcagaaccttcttcctttgttcaagctaagaagtctgatgattggattaaggctatgaatgcagagttgcaggctctagaaggcactgctacatgggagatttgttctttgccttcaaataaaaaggccattggttgcaaatgggtttacaaggttaaactcaatgctgatggaaccttagaacgttataaggctcgtttagtagcaaaaggctacacgcaacaagaaggagttgattttgaagataccttctctnnnnnnnnnnnnnnnnnnncagttaagaccttacttgcagttgcagctgctaagaagtggagtctttatcagctggatatatctaatgcgtttcttaatggggatttgtatgaagagatttacatgaacctaccgccaggatatacaccaaaagaaggagaggaaatacctcctaatgcagtttgcaagctaaagaagtctctttatggactaaaacaagcttcgagacaatggtntttgaacgttcgttctactttgctgtctctaggctntcaacagtctcatgctgatcacactcta

SEQ ID NO: 15340 - DNA, 2956 bp, Arabidopsis thaliana landsberg
atactcgaccccaggccgagtgactttggagccattcttcccgtccactcgaccaccaggtcgagtaacctcagctcaggccactcgacgacgttactcgaccccctggtcgagtgccgcttcgccacgccacctgaccacactcgaccattcactctaccaagttactcgaccccctggtcgagtaccatctctcatcaccatcactcgaccggacactcgatcacgtcttcacagtctactcaaatccgcactcaaccagacaagctgagcacaaggaagaaaagaggagaagacaaagtgtttggaagcggcctgaacctccatcggatcacgaagcccatctcggcccattatcactctatgggccaggcgattaggttattggcccgtctaatatcattttgttttgtttggtataaatagatgttttagggttctgtcctgagacatctagtcgacattgcgtttttgcttcagttttattttcagttttactctgctacgccgctttggcttctgcaacctgtagttcgcgatttttccaagttattcagattccgcatttgatttcacctgtcatctattctttatctcttcacttatgcaatattatcatttacctgcgtttatgtctttgagcatgttgtgtgagtagtgacttagaattcttaaggatgggatagagtagttgtggaatccgtagtctatagaatggttaagtgttagaattgattgaatcccttcaggactagttcctgagatattcgtctctatcccaagggattggccgtttagagcgtttattgactttatcaatctgttcttatttcctgcatagttagattccattgatgggaattagtctgggctagctttgcttgaggatttctatcacgggagtgaattaatctgttgttgaacttgttgtctagggatagcttctgtgaagttttgtcaaccgcctgaatagattaagtagaccacactattcgattaccccatccttaggaatcgtttatccatttgattgcctgttatcatttctgctttgtcattcacttgcctgctattgccattcctgcttttagtttcatttcatttctgttattgcatactaggactgttagaaccaaccaactatctgcttggcttgacttagagctttctgatcatatctcatctgtttgcatcacaccggattggattgacatcctaaaatactacaacgacaagatagtgttttagggattaattgacaaaaatcctactatcactaacgcagcgagtgcgaccgcggttgtattttctccacgaggtatgcgaataagtttaaattttttgaagcttttagtcaggtcttttactacattgagatatgcctccattcttgaaactttggctttataatctccattgaactgattaaataccagttgcgaatcacaataagcgactatctctttggctccaattccttgtgctagcctaagtcctgcgattagagcttcatactctgcctcgttgttaaaagcgttaaataataatcagaaagattgttcaagactttatatgttgtggactccaactttattcccaaaccggattcttgttttgatgaagacctatctacatgcagcttccaagtttgattctccggttgctctagggcgccaagcactggtaattcagtcaagaaatcgtctaaaacttgagccttcatggcaacttggctcttgtactctatatcatactcacttaactcaacaacccacttcgccagtcttccggattgatttggactatgaagaattgttcgaagtggctgattcgttaacacttcgattggatgagactggaaatacggatacagtttccgactggatgttaccactacgagtgcgagtttttccatcattgtatacctggtctctagatccgtcatggacttgcttatgtagtaaatcggattttgttctcccagtcctcccggatcaaaactccgctaactaaatgatttgactccgaaacgtacaaaaagagctattcatttgcttcgtgtttagacaataccggtggcatggttaggtacatcttaagctgttcgaatgcttattcacacttctcatcccaaagaaatcctttgtttctttttagaatttggtacaaaggtaaagaatttgtctgttgatcttgaagtaaaacggtacaaagctacaatccgaccagttaaacgctgtacttctttgaagttttttggagatggcatgttgagaaaggcgttgatttggtttggattggcttcaattcccctttttgtcacaatgtaacctaggaatttcccggacgggactccaaacgtgcatttcgcagggttcaacttcatttggtattgattgagaatttcaaaacattcttttaaatgctcgacgtgatcctttttcttcagcgacttcaccaacatatcatctatgtaaacttccattgtctttccaagatgctcgtggaacattttattgaccaatcactgataagtagtccctgcattttttaaaccaaaaggcattaccttgtaacagtaaatacctctatctgtgataaatgacgtcttctcctggtcttcgggattcatcattatttgattaaaacccgagaaggcgtccatgaaagttagtaactcattcccagcagtggattccacgagacgatctatatgcagaagcgggaaactatccttcgggcatgctttattgaggtgagtgaagtcgatgcatactctatcttttccattcttctttttgaccacaacggtgtttgccacccaatccgggtattgtactttccttatagaccttatccttaaaagtttgtccacttcgtcatttactgccttggctcgttccactccgagatttcttcttttttgttttaccggcttgaagcttggatccacgtt

SEQ ID NO: 15341 - DNA, 2298 bp, Arabidopsis thaliana landsberg
gtttgggactttggctttttgttccttttctcaatttgcttgtctttctggtccaatattatgattgcttgagggcagggacccccttgttcaatttcgttgtcgtctgttctggttcacactcaaagacggttggttttccagcacatccagagaaatatcaacctgtattgtcgaccattgcaaacttgctggcgtttcagtatttggtaggcttttatttgaaagacaagacagcacgcggaacaaaagccaatagactctagtaaagaagaagaagaaatcatgtgaaacaactgcaaaaacctagacacgaaatagcgggaaggagggctttgttaaacgagtaaaccatgaaagacatggaaggcatcgttcatcatgacaaaagctaaagggattactttatttgttgtataacacggtaaatggaaccacatgcagccaatacaattttctccacaaacactgaacttaccttcatgatatgatttatatccttactaccttttccagtacaatgcaaatgggctacattcctacctccattagatccttacgcaaaacacatcttaacttttagatatatgaataggcatacacgtgtattgtcaaaccgttccaaaaccaaccacaacagtcaccaaatcgaattccaaaacgatttacaactatagaaagaagcagagacatttttgctatatcatatgtgatcatttttacataatgatcatttttacataatgatatagacatatttttcccatctcagccgcagcaccctcctccttgcgaggttgatccatctcttccacctgatggtcctggaattcctccatatccaactttgattccatatgactcatttgacacatcaaacacaccatcttgaatcttcttgtatattgttgcagctgtcttaatgaatgcctagcaaaaaatcacaacaccagtcgaaatcatgttaagtaattgggtaattggcaaatataccacattggaacgtatgggggtttacctcctcaacattctgagcagtcttggcagaggcctccatgaatataagaccgtgctcctttgcaaactgctctccttcctctgtactcactgcccttctgtgagcaagatcacacttattcccaatgagcattatcgtcatatttgcatttgcatgctgccttgcatcttctagccagctagctagatggttaaatgtctccctcctgcaaaaaaaacggaggtaaaaaatatcgtaagtgtcttgactgaaacagttataaattcaaaaacacaaatctaattctggttcagatctttaggagtcgaactccaatctagaaaagaagaataacgtctagttactacttacacaaaaaaaataatttgcttccctgatcaactctacttttgataaacatacagaaagaagcaaatgatttaccttgtgatatcatagacaagcaatgcccctgcagctcctctatagtatgaccttgtaatagacctaaaggattcttgaccagccgaccatgcatgccacgtatcacatagaaaaattagtcaatgcaaagtatgggataggaggttcaaacttactttaaagtctaggctagtggctataatcccatgaattgtgggaaataaagacatgaaatcttaacgcataggaaatcaaattgcataatatatggtcaagtcggtggtcaaagaaaatcagagtataaaagatcaaccaaaccagggtatttcatttcaagaaaataagatagatttttgacgtgtataaaaagtcaagaagtaagttgaaagagaccgtatcccagatctgaagtttgatgggtttgttgtcgatagtgatcgtcttggccccaaattcaacaccaatggtgagatcatgcactgcttgaaacctcttgtcggtgaacttaagcagaaggcatgatttccctactcctgaaaccagattcaaaactcaatcaacatcacaagcccctcgagccctaaatgtttcttgtccaccaagaaaggttggatatgaattagattcatatgataaggattgaaaagaaaaagaagcagaaggagttaccagtatcaccgatgatgatatacttaaatctataagcataagacattgaagtggacgaatctgaatccgtaggttcagacaaaaacgaatcccttcttctcctgatgggtaaggtcaagaatccgacaatgtcttcacttttaacgtttttgaaagtgtaaatagagtcaaagaaacttctagattgtgtcacttagagatttggtgtc

SEQ ID NO: 15342 - DNA, 3384 bp, Arabidopsis thaliana landsberg
  unsure (1)..(3384): unsure at all n locations
tttgacgaattgtcagtggagcttaatagatctgtttttgaagctatggaagaccttttcgagttgcctattccgaccaaacagagaaacgtgtcttcaaaacccttccatggatatctttgtcataatctttacgagagtttggggatcgatgatgctaatgttttggagaaagtcaacgactttactcaacaattatggcctgatcatgggaacaagagtattaggtacgaacatgaagtcaatccatttaggccttttaatgtgcattacaaaatttttggttttcacttgattatacgcattacatgttgattatagaacacaagaattttgtgtttgaaacatttttgcatttgaaacagtgagacgatacacctgttttcggagcaattagtggaattggatttgatggtgagaagaatgataatggagagttttgggatagaaaattacattgatgaacatctgaattctacatattaccttacgcgattgatgaaatatacatcacctcctgatgatgatgatgatgatgaggaaactaagttaggtttacgctctcataccgataagaacatcatcacgatccttcatcagtatcaagttgatggtttggaagtgaagactaaagacgataaatggatcaaagtgaaaccatctcaagattctgtccttgtcatggttggagattctctttgtgtaagtcctagataacatttcttacacactttttaagtaaaaggatactcaaatcatacttgttgatgttgcaggcacttttgaatggtcgattgcattctccatatcaccgggtcataatgacaggaaaaaagacaaggtattcgactggactgttctcaattccaaaaacaggagttatcattgattcaccagaagaacttgtcgacaaagaacatccacgtatattcaaaccctttgaatataccgattttcttcacttctttcagacagaagctggacgtatagctcaatcagctctccatgctttcgctgccttctgaaaccttagacttgaatcagaattatgtatgaatgtataacttcatgttgatgtgttgtagttttaacaatccaaaaaataaatttatgtttccacatgcatatacacacgagatgcacagaagaaatataaatcatctctcactaaagagtcttttagaagaaaacaaaaaaaaatagtactataccattctcactctctggtggtatagtgaattatattacacatgtgcggcagagtatatgaacactgcaaattttgaaacataaaatcttactatacttgtataaagttgtaccaaaatccaatattggttgacttcatgagttgcaggcagaaaccgggaatgcaatcagattcagatgtatgcaagcgagcttctgtcaaaatctggttgtggcctgcctcgtgttggagtcggcggtctctggatattcagctcctgcaaaagataaattgtgtactgtcagtgtctggttcgtagccaaaataagatatagctacataaactctcctaggactatccatatcgcataactaccaactaagatcaagttgctcagtttgtggctgaaacaaagacattatgtgcttcactggtatatgctaggaaaatgtcttttattgttcccaaactattatgtgtttccggtttaggccacatgtttctaggaacaagaaaagacaatctcttacactgaggtcaggttatccggtttgtggctgaattaacgtgaaacaaaagaagtaatcaaagtgttgttacctatatacaaagacaaaattcaaacatatatctaaatgtttattacacaacataaacaccttatttcgtaagatagttgttgatactagttgaaacttgaaaccacgtccaaacattttgaagcgcacacctttatttcccagcagagacgccacaaaaagcttggagagtagatggagctctacgaccagcttctgtgtgatagaagttaaaaaggtcgacaaaatcaaagggtttgaaggcacgtggatgcttctcgtccacaagttcttttggtgaatctatgatataaccttcttttggatacgaaaacaatgctgctgcgtatctcgtcttctttctctctgttacccttactcggtgatacggtgaagggattctaccattcataagtgcctgccacaacaacaacatcactaggaatatgaaaattactcttcttcttttgtttttttaccaaaaacatgtagagtaaaatatttaggtcattaaatcttgactatgttgtattctaaaattaaagttatctgacaatccttatctaaatactataagttatagatcaacatatgtcatatacaaacagccaaagaccctcagctatataatactagctagaattgaaccttgacaaagaaagaatgttaatattttcacttgccaaattacgtaaagaaaaattagaacttacacatagagcatctcccgcaataacaatgacggtattaggagctggtttaactctgatccacttcccctctttggtcttcacctccaaaccatcaatttgatgctgataaattattccactaaggcttttatcagtatgactaggtaagcccaactccgcatcaacattagcttcaacaccatgcatcaattacagtaaaaataatattagtattagtaacaatatcattaacataattagaatgaacattaacaccaatattatcatcactcatagtataactttttttttttttttaatatttttttttatctaatagtataattaaacattaagattaataccttctttggcaccaacgctagcattcccactaacagcaccaacgacccaagcagtagcatcaccattagcttcagcatcaagatcaccattaacattggtctcaacgttaatatcaacaccaacaccaatattaacactatcattgtcattaacatcatcaccaacatcgacattaactttaacaccaatactagcaccatcatcgttgacattagcatcaccatcggcattatcgttagcaccattatccacattagcaccaacagcagcagttatatcattatcaggccgtgctatatacttcatcaatcgcatacggtaatacgttgagttcaaatgttcatcaatgaagtattctatcccatagctctccagtattannnnnnnnnnnnnnnnnnnnnnnnnnnctaatttctcagcatacagttggatcatcttactgtttttaaccaaaaaataaaattaaaactcgtaaggaaacaatcaaaacgcatgacgtgtgatagaaaaacaaaatgtagaaaaagggtcacttgttcaagtaacatgctcattaac

SEQ ID NO: 15343 - DNA, 3242 bp, Arabidopsis thaliana landsberg
aatgagcgaatattacattttcatagccatggcatctgctttaaggattttgcaagttcctcatgttggccagagattgtgcacagaatataattgcaagccacgagcatatcttgtactgagagatacacaagccacataaataaagaggatgaatttctcactccacatatgatgatcttttaatccactttcacactgactatctcaatctctcgagctcaaatttcaacaagatctaacattttctctagtcttataatatgatgcaatcacacagtcatgaatctgcctatttggggaagtaagctttaaatcaattcaacattcaaaatcactagcgagtattggaaagatccagtctcaaaacatcacgaactagctagagattgatgttgctaaatcggtgagttcaacttataaaatccgacgatctaagtcaccaaccggagtactagtttctacgactgaattgatttctaacagagcaacgatcagaagaggagaaatgaaaatttaccctgaacataacgccggagacgccgaggataacggcgatgaatccggagtagtcaacgggaagatcctccggcgctacaggccgtggaatgtaaggctttgccgccgaaggctgccgtggatcgttcaccgacgaagcgttcccgtgactgtgagacatcctcaatctctctctttggatctctctgaagctccgattggtaaatatatatctgatctactgtaattcttcttagagattctattgatctattatatagacataattgctaattacaattaaaattaatttaaacaagttcagaagtttatgaaaattacaattgtcaccttttcgtatttcttcataaagccctaagctgggtggaaatagaaaacaaactatcgccggccggtcaattcccggggacgtaacagagtttaggagtgggactcaagctcaaaaaactcgttttgtattcgatgagcatctcgcagtttccgccgcctgcttctccatctccggcgtcttcttcgcgatcgctggcttcttcatctccatctccggggagtttttcgtcatcgatgaggctatggagaccagctgctcagcggaatcttaggaaccagtggtctaacctgtcgaattgtcggcaacagtggatcgtcgcttgttctgcgggaagatctcacgctactttgctagtcaattcgtatctgtcacaaaagtgtggaattttcttaatttgtatttgcaacttactctgtttcactttgatgtccctggtgattcttactgcttttgtgtttccatggcaataggtatatgccaatgatggagcttggtgtgttgagtgacatgtttgatatcgacaagaaagctttgaagaagctgtttacgcaacaggtgaaaatttgcatttcaaatctattttttgtcttctattcattctctctgtttttaattctcatattaagtcttattatgttcagagttcctatcgaatcaagcttttatcttcgtacaaggaaatggtaagtgtgacaatgctaaaatcttgtgaatttgagaaattttattctggtgtaatttggaatctataaacaaaactgtagaaaaatgcaggtagctgttgttgttgagatggtaaatgcaagcagatctctgagatgttacacgaagctgagtaccgggtcacttatacagttctctggcactaaggaagattcaaatgatgctggagattgtggtggcattcctgtgtttaatttttggaatgtctctgcatttggtaagagacccataaaaccaatgttcaatagttattaactacttaccatgttgtctctaaagtttggtacttgccatgttgaaatgatcccagagaagatggctgaggagcttgtggagatgttcaaacgcgaagtaatgctaaaggtattgtctactcctaactcctgcatgtatcttaaactctagatcagcttctgatcttttttttcggggaaattaacagagattgctcataatggaactgatctctttaagcactgaagttcctcaacccatcaacaacagttggtcagatgagctttaccatggagaatttgatcatctcaccaaatgttctttatattctatggaagtagctaagccagttctccccagagtgaaagattataatatcggtagttcttctatatcacataccaaccagccaaccgcagaaattttgcaggtatgtggattttgattccgcacaagtaaaattgtctgttagcattatatcgtaaaacttcaattcttctcgttccacagatttacttgacaacttggcttgcagaagtaaacatcgacactcataggtaaaatattttcaccatcgtcattcccgaattctgggaacaaagtgtattctgattaacctggtgttgcgtatttgttacagggtggatgagatattagctttggttggggaagaaattagagtcaccttctaaatctcgaaaggtgttcacaagttcagcttctggttaagtttcagtgacttttatacaaagcacaactgattctacaaaagtactcaaggacttgagagagaaagaggtggttagaaccgtagctgtgtaaacaaaaattgccacttactgctatattttagcttgtttactggatttcttactggggcactgtactgagcgatatttctttactaaagtatacaaatggatttaacttacaatgtttctgatgatgcatacagtaatgctacatatttagtagaggatctcccgctttttgacaacggaggcctttactatactcaggattccgaccaactaactcatacccacccaaaaatagaaagatttggggaaatagatatgaaagcaaagaatggggaagattggccaaaaagtgaattatatggatccatgaatagttagagagagagacattgtaccctgtctggaatattctgaggcattggagctatggtaacatatctttgtaggtttaacttaagtgaattcacggtccggttcatagatgaagatggcgggtggaacttcgcaaaacgattgatcactgcaaacttctctagatcctggacttcgactctcaagtctggaattgtagttccattttctagcctgcaagaatgaccagagatgttcatgagatcaaccagcccaaatgagtagccattcaaactggaatcgattataatagagagctaggt

SEQ ID NO: 15344 - DNA, 2474 bp, Arabidopsis thaliana landsberg
ctcttttttctcttgtaatttctataatcgaacaaaatataacgaattttccatataaaaacaagtcattggtgatatattaatttgtctataaaacgtatttcattaagatttgtgttttttcaagttacaactgaaaaaataaaaatatagcatccatttgaatttattttataaaaataaataattctttattaaatagcaaataacttttctcatttttttttgtaaatattctcttttctatacactaaagtctttacaatatcacatatttcattgattttatttcattgactatgtaaagatattcatttatatatacaattagtattttttttaattgaaagttagtactagtatgtgactctgtgggtcgatccattggctggcccacgaggtccactacttaaccggtctgaaagttttatgtacataccgcataagagaccggtaaacagagcgctctgtttttgtttcgttcctagggttttaacaaattgaaggattttctagggtttggttccattggtctgtttcaattattctctgcctctacctttgttattttctgtactcaagttacttcggtgggtttgtgtacgtaagatatagacaagatcattgggtattctgatgatgaattgctcgtgaagatcttatcgtttcttccaacaaaagttgctgtaagcacgagtattttgccaaaacttgactacgataacaccgtcaattttgatatggagaaaagcaagaggatggagctttttattgacaggaatctgccagcttgtgtctcaagtctatctgttcatctaatcaacctaaatgtatcaaattttgggttgacattgcagtttcacggtgtttgcgtgagctaagtgttacttattataggagaacattgatcaggaactatgcattactgccgagtagtttgtatacttgcaaatctctagtgacatttttttttttttttttttgaataaaatgtaaaatttattcgaaaaaacacttttttacatcaagtgcaacgtttgtttagaaatttgttatacaagtcagaagataaaaaaaaaacctaagcttttgcaattatctcgaggcaaaccaagcttgcatacatccatcatatcttcggtcaccttgttcacggatcaaggatagccagtttcggacttgtttgtcaagtagtctggtcatttgcgccggtggtaaaggagtttctccatgcctcctgttgttacgctccttccatatagagtagattgcaagctggaaagcataccttgttactatagagtaaactatttttttactatttaaagtatttataaaagttgaatatgtttactatttaaagtatttaagatagctagtcaaataagattaaaatctcaaaaaaaagaaaaggattgagctcatagtcccgtttatatttaaagtttggtaaaaaagtatttttaaaaaatgattgttgatttggaaagccaaagtgacacgaaataagaaaaatatttaaaaaaaaaaaagtgttacaaaaatcattaaatatgtgatattgtaaataaattttattttgtcaacactatagattatactcaatttaaaagatcatatttaactaatatgaatcaaacatatatatatttttttttttaaaagaactctttaataccattgtgtcacaagaaacataataaaatttgagttatgctagaagcctagaatacatatggatttcttcagttcatcaaatattttgtggtcatttttcagttttgaagtgttcataacgaattttcggattctaccagaaattgaatttgttcggttgtgatggattgttactgttgcgtgggatggacaattcagccacactgaagagagaatcaaaataagatccttctaatacgtggtgaaagagtagctccttctgtcttgttccgtgtatgttttcccttttatataaacatactcaggattgcctcccgaaaaaacaaaaattgatttatcctcctgagaaagaacagaatggaacaatgtgactgtataggtatggtagctatagaatcactccaaagaaaaaccatttttacattcgtttgtcacataaattcaaccatcactaaaagctactacaatgtagtatttaatatattaagttattgaacacatatatttatacacacacacacataacaatatatgtatttaagataacaagaaaataataaagaaatgaagctttattatcatatccatggaatttaaaattaaaaacatggcccaacaaaaaaaaagaacgggaaaaatggaccacccgtgtgtgaaccagatatgaaaagtctgaattataaaatcttagtgctcaaactttatcctttacaatctttttgctctttttatggataacctataaggccatacacccatacatacattaagtatgcatatatattgggtggtagcaa

SEQ ID NO: 15345 - DNA, 4973 bp, Arabidopsis thaliana landsberg
  unsure (1)..(4973): unsure at all n locations
cgacaacatagaacctatgaatggagaaagattatggaagagaagaggcaagggacgaattgaagttcctgataagagagggaagcgagggagacctaagaagtttgcaaggattaaggagcctggagaatcatcaactaatccaacaaagcttacaagagaaggtaaaactgtgacatgtagcaattgtaagcaaattggtcacaataagggatcctgcaaaaatccaactgtgcaattagctcctccacgcaaaaggggtagaccaagaaagtgtgttgtaagtattcttaaccattacctatcttactatcatttgcaatattatagcattaataattctgggttttgtataggataatgatgatccatggagcatacacaatgcaccaaggaggtggcagcaagctcaaagtcagtccacaccaacttgttctcaaagtcagtccactcaaattctgcaacattcaagtgctccagcagctaatcaaaagggaagatgacgtgctcgaaggcgtcctctaggaaccaaaaatggtgaaggcaaagatccttctaaagctcgtggcaagggtcgtggcaaaggcaaagaggaagcacccaagcagactgttttcatgatgtctccatggactaacaaagtgtttgatgtttttgcagcctgacaagaactaggatttaagattatgtcttttaagaatgcttatttatgtaggatgttgtttaattatctatataggatggttggatctttgtatgttttggtgagatcctaaacttaaaggttcttttggctaaatggaatgacttttaagcaattttaagcttcaataccattacttcaaacaagagttacatttgattactaagcaattttaagcttccattccatacaaagaagagttacataactaacctaccacaatacaagaaacaaaacattgcaagacaacactaacaacaaccaaacactacttccccatcgcaagtatcatcccaattacaacaatgaagccgccccatgacaacacaataaactgacgaagcagtttttccttctcattagcaaccacaacatcgttttcgagcttctccttctctttctcgttaggcaataacacacggttcattgttgttgaagcacttaaatcttggctactcttggcgcttagagattctttaagtgtctaaatttcctccttgtgctgccgattctcatcccttgctttgaataagctcaccttctgcaaaccatatggcttctcaacatctgcccaatggaagaagccatgaacactacacttgaaaaatcttcttccaggattttcgttagttcaagctttcacaaccgtcgtagccctcccacagttgcaaagaggaccccagttcctgctcaccaaatttgcatctgaccctgagttatggctcaccatcattaaatttttaaggtctcaaagaaggaaatgaaattagggttcaatgggttcaacaattctagatttaaaggaagaaaggaatgagggtactgtaatcttttaattagtctaattaaccacgctttgttaaccatcagaaccggtttaacgattccgtcagagaaattaacgtctgttaaacaccatgttcattattaccattcaaaaatagatcaggttatttgctaacaacaatttattatattgggtatttcattaccaattcaaaacatatggatattaaagtttcaaattaaaattagtttggtttttttttgggatttttcccaaataatatattataactgtgtaattaaattgtggatatgttcagatacccgttcggatatcgggtcggatcgggttcgggttcggtnnnnnnnnnnnnnnnnnnnnnnacctatttgggtattttgagatttcggatttgaatttgaatcgggttttttggatagggtgcttggattcagatattatgccgccctagccacaaataagatcaaatttgtggtgacagatggtgtgaatggatggcggggcagttgcgataattggccaaacgggtggtgtgggcgggtaataagcaaccatctagctgagcaggatagtttgcgagtccaacgaattcattggcaggtcgatcgccttagtgggtggcggagtttttggtcggccgaatccattgaatgcaactttcctatccattcaggggcttgccaagggtggccgagttttggccggccaaattttggatcgactgggccggcacgcagtaagttgtccgggtcggcgggcttgctccaggctgccaggtgggccaggtcccgccaaagattggcacaaccagacaggcttcttcaggcggcgctggtcactcagacgagtgtccgggctaggtgtcatcatgactagtgacgggtctaggtgaatgtacgcccccgagacactctatgatcggacaagtcacggacgccccgaaaatgccatattgagaatgatcatcaacatccaaccgaggttcgggaactaatcctaacccgtggccggcatattgacgaccacactccaaattaaaacatcgtttaggcttgccagcccttataatatttaagtgttgtgccgactcggaataagtcattattagtcattactcgtaaatttgtacaagaaacccgatttatttcacaagtataaatattacacaacatgttaccaaacatttataagttttatggccaaggcatggtacataatagaaacatacttgttttacaaaaggcacaaaactactccgggtttcctattgtccaccacgccctctatttcttactaagggtttcctgcaaaacaagtagaatcatgagtaatctaagattactcagcgagctcgggattccctgcaacacacattagtttaccccaacccaaatacccaacatgaaacacgcaacagagaatggcaacaaaatgtagcttgctgaagcaactacaaaacatgcaaatgcattaagactcctgttttattaagttttaaagggcacgatatgctgccttcaaacccaacaccaaacacacacactcccgtgatctcccgtgctacaaccacaaaggtatgcaaccggagcatcactaccaaatgctacaccgtcgtgtagcactcggccagggtaactagccccgtctctccaagttctccgtacttcatggcgatcaagtaacaacgttacaagaccccacaatagcacagttcactacgaaggtcagacataccatgatcttgatacgcttatggtctctacctcctaccaagagcaccacgtactaagacccaacatttaagatattatgagacatatggttactcaaactcatagaatcatcaatattcttactcatcacaacctcccaaacctaacccttaagcataagaatctaaaagatctcatatgcggcttagtaccatcacactattagttaatactcatataattcatgaaataaatcaatgaatgcaagagtatatgatcatgcaaccaaacaagcaatcaatcacccaaataaacactcaaacctatcatttgccatatcacacgcttcgagactcacagagattcggttgaaggtttaaggttagcttcaacgattctcggacattccatggcttcccaatcttgatcccagctcaatttacctctcttcatcttgatctaacatctcttgatagaagcaaccttgattcatgaagctttactctgaacacacatttatgggacgggttcctcggaaggttctcgattggacaggataacagcatggatttctcgctcatgggcaggaattctcgatcacggacatgatttcttcactcacggtcaaagaatcgcagtcacgggcagagtttttcaattgtgggcaagttttctctcgattacgggcgatttttatgagtcgggcagccattcggatcactctccattctcccatcaaatggctcgagtttggccaagcatttataggtggaacagcttgggctccaagcaaatgcatgtcatctggtggtgacaccttgcgggacacatgtcgcccgcccgtgaagacacatatgctgcaggaatgggacgatgacacgtggaaggggaaacttcggctccaatcctcataattttggctccaagcaactttcttgggctccaagtaagccagtccacgtgtccatggcgcggtcaaagggcggtcaatgcccgacggggcaaattttcgcccgtggaacgcccgtattgcccaatcttgcccaatcttgcccatctttgcccattcttgcccaaataggtatttattttgccctttgatgattgaacatcttttggacacatacagtcaattggccgtgtattcgggacaactttctctcgtttcggcttcgccaagatgaccccattttgaactagacttggcatgttcattttttccttgcccatctctttggctttcgtccctgaactatttctttctctcccgattcttttttagccgttcctcgatgtttcccacttagcagcttaccccttatcgagggtcactacattctaccccctttaaaagaattcgtccccgaattctatctttcggacatctcctttcttcttaggtttctcctgaaacttgttcataagagttttaagtccttctccatgtactactccttctcaccaccttccttataacgattcaaactttttggtaaaacatcactagcctttcttcacatcgtttgccttagttttctattatcttggaaaacttgattatcatcaccatcactcattgcttattattactccaccttctcttgaattcgtctcgccactgtttatttaccaatctcttgtctttcattcggctaaatggctccttacataatttcagctattgaaacttttgttctcgtcttgatggtaatatcttatcccaaggtagaaataactcttcccacaagtt

SEQ ID NO: 15346 - DNA, 2345 bp, Arabidopsis thaliana landsberg
tgcatacacaaacattttgatgtgtaaaatgttttggtttgaaattttctgaagaagatggttggcgcactacttggtgaaacagacttagaactctcggaagaatctattgaagctatcgtggaacaggtcacgcaacattatacctaattttaatctatttatctttcttattatgacattaatattcctatatatttaatatcttttttttgttaaagatgtatatttaatatcttaatgatgttgaatttgtgaatcgatttttacaaacagacgatgctcgaggttgatacaaacaaagatgggaagattgatgaagaagagtggaaagagctcgttgctaagaatccttcaatcctcaagaacatgactctgccttacctcaagtagacttttatttcaaaaatatttctctttcttgtttttattgacatataaagtaagtacgtcgtcgtttctatgatttatagggaagtgactttagcatttccaagctttgtactcgactctgaagttgaagactagaggaaatctttagaagaagctagaggctttttcgaattatacgtttgaggtcttttaatcctttttatgtataattcggaattcattcgacattatatggtacaaggctgaaacaatttgcaattctttttgtttcgattatgtctctcggtcgtttagttacttgttgataatctatttctaagggaatttttttacaatgaaataacaattttctttaaggttttatcatttaaatggctttttagaaaaatggcgttgtggacaataatctcaaaatataaagaaaagtgaactcttaacggtcactggtgccattgcaacggctagaggaggagccactgcagtagcaacgtcgggtccacacgtgtgtcgaactgtcgatatatgtgcggccaattggttttgaattttaaatagttatcctttgatgttgttgtattcatgtaccaacaataatcgtgacaacattaacttatcttcttacaaatattgaaatgtatataaatacgtcaggtcatattattttattgtcagatgaaaaccaccggccataccagatgttatcaactactcttattaaaggttagatgatacttggttgatttcgtataaaatatagtagtaatgtaagatcatctctaatagttaagaaccaattacttcttaaccttgaatcttagccttattttaaattaaaatttcactattttagagctaagaaaagttagagaagatcttaacaaattactactccaatgattaagaatcccttcttaagaagataaaaataaattgttgcaaaacattgttttggttttgtttttgttttctctcattcacatagcgacacatgtgtcattcttaccttaagaaaaacatcttagttaaaatacatatcttaattggtttgattaattataattgcttttaatgctaagatgtttgctaagattaggctaagatatacgctggggatgctctaagatttttaccctattttaattctggttaagctaatttttggtgatgcatatcgatcggagtctaattttgaacacaactcgtttcatcaaataatttataattctatttaatcatatattgacaacaacatcaaaaagatattgtattacttaaaaaaggataagaaatttagctacggatggtagatgcatgaactggtcatgaaatcttgtcgaacgaaacgtttgttgtatctttaatgttatgttatgttatgactcacttttcctttgaaccttctttcgtggtacaactcccttgaaacgttcgcattattgaaagttcataaagcaatttcaaaattctttgtcatcaatggtgaaatgaaaattatatatataattatcatgagattatgtaatatattagtattatgttaatggtgtattaaataattcagagctagaaatgtaaagatttcgtgaatggtacttgttgaatgggggtaatcgtaatacaggaggaggaggattctacgaacgtacatgattcattagtactcataatgcatttagatatttttcaaatcatacaatattataaagatatactaatgtataatgatgatttaggcttttgagatatgaatttttgtagaaagaggacccatccatgtgcaacggcaataatctcggttttcagaccagttcaagtttcctaaatgttagtattttaagtctctgattaatccctccaatctcttttaaagaaaatgattaatcactttaattaatggttagtttttgttcccttacaaagaatccccgtggccccatatcattgcaagaata

SEQ ID NO: 15347 - DNA, 651 bp, Arabidopsis thaliana landsberg
  unsure (1)..(651): unsure at all n locations
tgcgatagacaacttcaaagaggattaaagagttcagttggttccctagaactcaacatttgcattatattcttttaaagtttatgatattatttatattttatatgttttaattcccttaaaactataaatttaaatgtaaatcttttaagttttatcatatttttaatcctgtaaaaagtatttatgggtccgccgtatacacagacccaaagaactctaaagagttcagcttgttcccctaaaactcagcatttgcattatatccttttaaaatttatgatattatttatatttcttaagttttgatcctttaaaatttaaaattgtttgcaaatcttttaatattacaaaattcatgtgtaaaatgcttaaatatttcaaaacaggatcaaagtgaaagttatcaccagatttatttgcaatggtttgttgaatggtggtaaaattagtctttcatcttaaagatttggtcttgaagaatgcacatatatcatttgtacatttatatgggtattaacttttatttntttcgattattccactaaaaggtattaatttagattttttaaaaaacatttggtacctttaagttttatcatatttttcttatactttgtgttttgaacttttagatttttttaatattga

SEQ ID NO: 15348 - DNA, 1902 bp, Arabidopsis thaliana landsberg
aaacatctgattgattgatattttcatctcagagtgtagatgtttaactttctttggttccaaggtcaacttgaatggttgatggggttaaaaggttagacttctccgtgacaaactgaaaacataattaatactatttttatactaataatttgattgtggatgaagtaatgcagaatgttggaacacaactgcggtcaggcagtcagcattgttttaaggtcctcacaagcccctgactttgttattgtgacttactttcttgctaaataaataattctttgttttttaaattaatcttaagaaaatagttcttgtagacacatggggaagaagaggattgtgttctttgcttgtttgctcttgtttaccgtcctattacgttttagctatgcagggataacgacagaaagtcctttgtcagtcgaacaaacactcagctcctctaatggaatttatgaattggggtttttcagtcctaataactcccaaaatctgtatgtgggaatctggttcaagggtatcattccccgggtggttgtgtgggtggcaaatagagaaacacctactacagacacatcggcaaatcttgctatcagcagcaatggtagtcttctattgtttaatggcaaacatggtgttgtgtggtccatcggagaaatttttgcatctaatgggtctcgtgcagagcttacagacaacggaaatctagttgtcatagacaatgcttcgggaagaactttatgggaaagctttgagcactttggtgacactatgctacctttctcaagcctgatgtataatctcgccacaggtgagaagcgggtgttgacttcttggaaaactgacactgatccatcgcctggcgtatttgtgggtcagattacaccacaagtgccatcacaggtgcttattatgagaggctcgatgcgttattatagaaccggtccatgggctaaaacaaggttcacagggataccactaatggatgacacatatgcaagtccattcagccttcagcaggatgctaacgggtcaggattctttacttattttgatagaagtttcaaactttcacgtataattatatcatcagaaggatcaatgaaaaggtttcggcataatggaacggactgggaattaagctacatggctccagccaattcatgcgatatttacggtgtatgtggaccatttgggttgtgtattgtgtcagtacctttaaagtgtaaatgcttgaaaggatttgttcctcattccactgaggaatggaaaagaggaaactggactggtggttgtgcgaggcttacggaactacattgtcaaggaaactctactggcaaagatgtaaatatcttccatcctgttaccaacgtaaagcttccagacttttacgaatatgaaagttctgtggatgctgaagaatgccaccaaagttgcctccacaattgttcttgcttggcctttgcttatatccatggaatagggtgcttaatctggaaccagaacctaatggacgctgtgcaattttctgctggaggagaaattctgtccattcgtcttgcacactctgaactaggtacggcttaaaagataacatagacgatcttgtctgttaattataactttgtcttcaactctagtgttctctttgatagcaatatggtttattgtttaatttatttatgtcttaaatatctcaggtggaaataagcgcaacaaaatcattgttgctagtactgtgagcctttctctgtttgtgatattgacttctgctgcatttggtttctggagatacagagtgaaacataaaggtacacactcattatcatagtatctctttgtcgttacataaattaaaaattactgaaaacttaaattgataaaaagcgaagtttttcc

SEQ ID NO: 15349 - DNA, 1830 bp, Arabidopsis thaliana landsberg
  unsure (1)..(1830): unsure at all n locations
cttgatgaatataatggcaagtctctgcaacatcttttgttagattctcatgaaagaaaggttttttactgtttagttttctttttcattcccaatttattccttaactaatctagacactaggaatctactgaaatttcttcaggtttatggttttaacttctctgagaacatcaaagggcctacaagttctgcatctttcattcacttgcacatgtctttgtatctacgcatttctgtaaaagattcataatcgtatccacatgatcacgccttttccacagaagtttcaatccacaagttgatgagcagcatggttggttagtggttactaactttggaaccctttttaatcacatacaacaaagacaaaagcatgtgttatgtctggtttaggtgctccaattttatctaacttaaaataagtttctccttatatataatgaaacaagcctgtgggaatcttcaccaatcataacttgcattcaaagagttctacaacacaagttacaatctccttctgctttcggatctacaaaatattttcctgaaaagaatgatgaacacaaagaagctaatcaagatgttcaggaaatggcaacagagagcagctctccacaggaaaagaatctcattccaaagaccaagtacccgctcaaccactgtagagaagggatgctttgtcgtttacacggnnnnnnnnnnnnnnnnnnnttttccgataagctacctaagcaactctgtatttcaagagattttggagatatctgaagaagagtttggcctcccaaccggtggaccaatcacattaccattcgattcggtttttttggagtatctcatcaaattgatcaaaagacgaatggatggagatacagaaaaggctttgttaatgtcaatctctagtgctagatgttcttcacaatgctctatgcaacttcaaaaacatactagtactcagcttgtgttttagagaattagtatcaagcaatttctttgtttgtaaagattctactgtattactagattagacagatcatttcagaaatacaaaacatcatttttgtcgtctcttttagaccgtatcatcatatgaaagtaaacttcagtatcacttcttgtcacagttccatctttgtgtcattttactgacacattattccaacttcttttagcacataatatgttctgaaactgtctatcatgtaaaatggtgcagcggcttcaaatttctttaactcaatcgtttcatacatcaaccaactctggaacaagaaatctgtgaaaaaagcaacatatagattacacaagaacatgtcgtttgcacaatctgaacataatcgattgtagcaggaatgtttgactctgatgtctttttccagattttaagcacacaagtgtttgatttatctatttaatctattgattttaaccagatttgtttttccctgaataacttacttgatctattattgatttagctgatggaactagtaaccaacatcatgggacccttaagcaaacatgattttggtttttggctgctcttgtctccaagacttatctgcttgacaagttatcaactacacatattaaaatgtaacaactgtctcttgcattcttcatcaatgtattagtacctaactcttgtcatataaatgtccatatagaattttgatacccacatgatcatgtcttctcagtcctcaaaagaagttgtatagtccaccaattcatttgcagacatgaatgattacttaccaactaacttaggacccctgtgacttatgatcacatacaaaaaagacacataagcatgtgatgtgtcag

SEQ ID NO: 15350 - DNA, 980 bp, Arabidopsis thaliana landsberg
tatatatatatgcataatatttagtaaataacatctctaaatgttagcgaaaatatcatctagcagtgtcccacgaatcaatttctagttctaattaaattttgaatatgtttagttcacaattatagcttagaaagtcttaataatttcacaaaagcttagcattatcaatgtttgatgtgtgttgcttatagcatgaaattgatgctcagacaattgatgtttcgattgatatatgctcaaccaaatcactttcacggactatgcaaaatcgcggcggctcgtctgcctaaccggctgccttggacgatttttagaaccttaaaactatacatccaatcaaatttgaacgcgtgtccatctctctcatattctcaaacctctattcacagagaagcctctctcattttaattcagttttgattaatttttgatccaaaatttcaagagaattaacctaccaaaaattgcattacaacctcccattggaaatgctcttagtgtctgtcatgtcctctcttattttcagtttgctagtcgtttttacgacgtttcttcagatagtcctttcttatcctcggaccatgctcgttatctgagtcttgtgtcaatgaaggtggtctctcgatcggagcccaagactactttccgttccctgttcatccatcataggaccgatagagcctctgcctattatttacaagagagtcacattaaagttttttcatgtgaaggaaaatgagggtagctagcaaactcatctgctaagtaaagagtgtgaaaggacacaccgtgattggagaaaagttttaatgtcatcatttcctaagccttcctcatcttctgaataccatctcttgtttgatgacgcacactgaacctctttctcatcacccgacctgcatctcttatctaaactccttctcatgaaactaccattctgctttatttggctactaccacctttcactggtttctac

SEQ ID NO: 15351 - DNA, 4062 bp, Arabidopsis thaliana landsberg
  unsure (1)..(4062): unsure at all n locations
aatgaattagctatgctctgcgattatagatcatctctgaaacgtcccgtcatacctatcttctatggagtcaatcccgaggatgtccgcaaacagagcggtgatttcgctaaggattttgaagaacacgccaaaacatttagcgaggtggagataaaacgatggaggcgagctatgaatttagtcggaaatatccctggatttgttttcacgtaggactctatatatttaatacatctctggatttgtgaatcagagtagaattgaaattttggatgtggatgcttgcgttttttgtttgaaattctgtggtggtggtttttggaacttttgcagaaaagctactgttgacgatgtcaaagctggcaaagacagaaagaaagtggatgaaatgatagggctggtggtgaaacgcgttttagctcaagtcaggaattcaccagagaatgttgcagactacactgttgggctggaatcatgtgtggaggatttgatgaagctgctcaactttaaacccacttctagtgttcagttcttgggaatttatggtatgggtggtattggcaagacgacccttgctaaatacttttataacaagatcattgtcaacttcgagcatcgagcaatcatctatgacgttagagaacaatcatcaacccaagatggcttagacgatctcaaaagaactttcaaagttgctcgtgagaagaagaatattgtggttttagatgatgttgataacatcgaccaggttaatgcgctcgttggtgaaacaagctggtatggtgaaggaagtctagtagtcattactaccagagatgaagagattctgaataggctctcagtgaacctacgatatnnnnnnnnnnnnnnnnnnnnnnnnnnnnnnnnnnnnttgttctgtttttattcactacgaaaagaaaaaccaccaacagagggtttattggagctgtccaagaagagtgtcgagttaacaggactgttgccattagctcttaaagtctttggttctcatttgtttgacaaggaggaaaacgaatggcaagttcaactagagaagctgaaaactttccaaccagacaagcttcagggtgttctggcgctgagttttgaatctctagatgatgaagaaaagaaagtattcctcgacattgcctgtctctttctcagattgaaaataacaaaagatgaagtcgtcgacatactgaaaggatgtgggtttcaggctgaggctgctctcagtgtcctcagacagaaatctctcattaagattagagacgataataatctttggatgcatgatcatattagagacatgggtaggcatatggttcttaacgaaagcagggaggatcctggaatgcgaagtagactctgggatcatggtgcaattatgaccgtactgaacaatatgaaggtattttatctaccgttatatatcatttgtatttgacttacatactcttcatctgttttttcttctgtaatgggatgacagggaacgccatccatccgaggaatcgtatgtgactttaaaaagaagtctgcagatgatattgcttcgaggagtctactcaacaatcccgcagaggaaaatccaaaaagttctgaaatcatcattcccgtagaaccttttgtactaatgacgaagttgagacttcttcagattaataatgtggaactggaaggaaatcttaaacttctcccatctgaactcaagtggatacagtggaaaggttgcccgttagaaaatctccctctggattttcttgctgggcaacttgctgttcttgatctttcagagagtagaataagacgagtccagagtttgcgcaacgacgaggtaagactttcttatttgccctatactgggtaagtaaatagttttgagtcataaagtctccgtgtgctaaaaatagctatttctgcttttcaggttgatgagaacttgaaggttataaattttcgtggttgccacagcttagaaactattcctgatttatcaaaccataatgccctagagaagcttgttctcgaccgatgcaaacttctggtgaaggttcctagctcagttggtaagataagaacattgcttcagctggacctcagaaactgttcaaatctttctgaatttcttgtggatgtttctggactgaagcgtcttgaaaaacttgttctttctggctgttcaaatctgagtgtgttaccaaaaaacattggtgctatgcaatgtttgaaaaagcttcttcttgatggaactgcgataaagaacgtaccaggagatatttatcgcctccaaaatcttgaaaaacttagtctaagaggttgcagatctattcaagagctaccttcgtgcgtaggaacattgacatcactggagaagctatatcttgataatactgcattgcaaaatcttccgagttctatcaaaaagcttaaaaatctccagaagctgcatttgaggctctgcagatccctttctgagattcctgacactatcaatgagctcatatcattgaaggaattagtcatcaacagaagcggggtaaaaatggtacacctaaaatcaggctcattgccatggttgactgacttttcagcaggagattgcaaaaatctaaaagaagtttcgagttcaattggtggattaaattctcttctccaattgacgctggatgggaccccaattactactctaccagacaatattggtgacttgcaatttattctcaaagttgacttgaggggctgcaaatatctgacagtcctgcctagctcaatcgtagctatggatacactccgtaagttatacctgggaggctctaacattgaggaactaccggaagattttggcaatctcgaaaaccttgtcttactccaaatgaacgagtgtaaaatgctcaagaggcttccttcgtcatttggtaacttgaaatctcttcaccatctatacatggaggaaactttggtcatggagttcccagaaagttttggtaacctctcgaatttaagggtattgaaaatgctgaagaagcctctttttagaatttgtgagagttatcctccaggtaccagcaaagaaactcgttttgtagaattaccaaactctttcgcaaacctcttgaagcttgaggaactcgatgctcgcagtttgggactatcgggtaaaatcccagatgttcttgagaagctttcatctctaatgatactgaacctggggaataattgttttcacagtcttccgtgcagtctaaaggggttgtcaaatctcatagaactttcattgtatgactgccaggagctcacatgtcttccccctcttccatgtcaactaaagcagctaaacctggcaaactgcttttcgttggagagtatatccgacctttcagagctgaccatcttgcacgacctcaatctcacgaactgcgtgaaattggatgatgttccaggtctagacaagttgacggctctgaaacgattatacatgagcgcctgtaactccacctgctaccctgaagtaaagaaaaaactgtccaaggtgattctccaaactccacataatctcagttagttgaatttcaggatgtgataacaacttacttgcaatgtttgtgaacttctcatcacaggtttctttgaaattgttgcggaatctgagcttgcctggcaacagaatcccaggctggttctcacaaggccctgtcacgttctcagttcaactgaacagagagatcaggggcgtaatctttgctgttgttgtggctgttaaccatgaaattaaagataactaccagatgcctgatgtggtggagattcaagttcaaattctggaacttgacctggcgatatacacaaccacattgcacctctctggagtgcctgggacaagtaatgatcagctacacatctgnnnnnnnnnnnnnnnnnnnnnnnnnnnnnnnnnnttaaaagacgggttcaccatacaggtcatcaaccgagaaaagccactcaaacaaggcgtataagctaaaaatgagtgggattcatctgatctacgagggggatgatgagatctca

SEQ ID NO: 15352 - DNA, 563 bp, Arabidopsis thaliana landsberg
  unsure (1)..(563): unsure at all n locations
aacctttgcacatccatctgcctgctctcatcaaccttggcttcattaacccttaagtcatcttcgtcttcttccccatcactatttgcatcatcacctttttcattattgtttttctcctcaagtttcttaagttgctgctccttcaagtacttctttcgtgcatcctcttttgcttcataaagatctatcacacgatggtaggtcgaaggatcataaccattccatctgtccctcttgccatcgtagtcaagttcaaaactttcaattttctcatcaggtgcaatgttcatgtttgtgtacttcgccccaatcttacgaggcctatccatacaagctttagcagtatgcgtcattgcaccacagcttcaaaaagaagatcgcccaagttagataatggaactaacgaaaatcgtttttccactttcaatatagccaaggtttctccaaaatatacaaacattcaagggaatggatagtaaaacaaaaaactgaaggtaaagcatccagcccaggacatacttntgacacgctcccttgcngtattntcagcttgaaagatc

SEQ ID NO: 15353 - DNA, 2024 bp, Arabidopsis thaliana landsberg
tactagtcacagaccaatgaagcagacatacatttggattaaattattgtcaagacagtgataccttctcatccagtccgtggataaagctttctgtaggactcattactcttccaaatggcagaggaaattcaatgtcgccccatctgcaagtttgagggctcaatcatttgtacttaagctcaaagagataggaaatctggcggtcaaacttactttttaaagtttttgaaggcagcagtatcatcaagctcacccctcatatccagaggataaggacttccatcaactagagtgaaaggattcatctccaagaaagtgaaatcaagatctagcacaccaaaagaaataacaaaaatgcttagtttttatcacagtaaaggggattttgatttgtgtgtaggttcagctatccttggcataccttggaatagggtgaaaatgactttgataaattcttcaatttcagctttgatctgtacatgggaaatgttataagtctaagtcacgagtccaatttctaagtcatgttcacatatacaatcctatgatccaattaaaaagagtcgattacctctaagggaagagttgcgacaagaggtgcacatatttcaggtgtcagggaagcacctgttggtaaaaatattgtcttgacctacatagaaagtggagttacgactcaattatcagctttacgcttagaagatagtgaaactgaaaacaaggaagataaatggaaaaagcatccaaaaagaccttgtcccagttctcctcgatgtcaattcctccacactccgaaaagctaatgctgcagccaagtctatcagagacaatattaagatagaactcttcattgcgtgggacaaatggttcaacaatgaatgttgttatgggtcctttgcatccactcatctctacctgtacagtgatagacacacaaagctaaactggaagtagaaggaaggaaactaaaaacaagccaagttcaacaaaagtttacctctttgcctaagcgttctttcacgaaagttgcaacatcagcgaaatctaagttcaatgcaaccaaaccgcttttgccacgctttccgaacaacatatcaggtttcaccacaagcttctcagatgagagccaaggctctctctctactagctcatttagatcagtctcttggttaatctaaaacacatcacatacagatatgaatcaaagccttgttaatgaaactaactgagacatgtcggagaaaccaatgcaatgcacactaaacacaagtttatcaaagaagacaaaatctagagaaatggatctaaacctgaacggatctgataggcaattcttgaccagagagtcttttgaaatgttctttcaccagtctctttgagtcatactctctgatcttcttcctcgccatttcaaaacgaaaactggagaaaacaaaatcaaaatcacagatccagagactgataaacactaatcgaacgcgaaaacactcatttcccgatcaaatccactaacgattcaattccaaaatgagatacgagagagaacgaacaaactctaaaatttccaaagatccaaacgagaagaaacagagatcggtgaaaatggcggatctttaccgttgagagagaatgggggtagcttcacaggttgggtagttagctcaccaacacgactcttctttgtcttctaatcttaaggaccgaatttaccatttatagttgcaacttccaaatttgtaaaatattgttataaactttattatttagtattataaccaacaatcattttacatatgcacataatttaatgtttatttccttctcaaatctttatagtatatacttttgtaggatttagcaaataattgcattagaatttggattatttttctacatactaggatttatttaacaaacattagcaagactttgcagctacgcatctcttgaaaaagctggtggatgttcaattgttcattcaatttagagttgccacctaacttgaaaatgaacgtttaact

SEQ ID NO: 15354 - DNA, 1417 bp, Arabidopsis thaliana landsberg
  unsure (1)..(1417): unsure at all n locations
aaaggatggcgtaagcttgcaggagtcggtcagcttgtgtaccaatggggagctaggtggtcaggaatgagacatgtaggctcgtggcatgacccggatggggaaatatgtcagtttcccgatactgataggcgatgtatgtccgtctataagaacggtaggatcggatacaatgagacttattttggcgagtgggcaaaaagtgttttgggtaagtttaaagaaagaaagatggcaaatgttgtaggacgcaaacacagttatggttcgctagatggatgttggtgttgaaataacagagtatgtatccaactgctctttaatgaaaaaaaaaagctaaaggtaaaatatgaaaagaaaaaaaaaatgttaaatttctagttcaagatccaaaaattattcggtatatagtactttatatctatttcagctactatagatctagcacgaaattcgacaaacatgatcaatgactcatagcacaggaactataacaaagaccagtggcttaaattatataaatagttcgagtagataattgtatgcatctaatctaagtcagagtagtgaacttatctttgagatgagaaaaacttctcgtattaaaaattgtaaaactaagagagaaaaacggagagagcacatgttggttactttcagatcttccacgactatattaaccgttgaccatatatgttcctcacaaatttagttccatcaaactaaacagattctgcctcactctatttgattcacaatgacaactaaagctagtgtttggcgaaggctagttacttgcttatcctctcttaagttctacttgaacgtcttgtgcctcgttgtcactgtttttgttcttctccaaatctgttcatttcaaattactcaacgttctctttcactccctcctgcactcttgacgtatctgaaacacaatcatgaagaagtatcagagaacaagacggcttccttggtggagaagctacgtgaatccgtgacattccttccactcaaagactatcgtttttcgaacaaaccacttgaaggtcatacttggttcatgagctctctctatgataatcaaaccaaaggtgaggctcagtatcaagaatttccttcagattcttcgaaaggaaggcttttgtgtttgaaaggggttgatgaacatgatgggtcatggaactcctacgcgctggcttggcctgaagctcttcctaccaatgccattcttcaggatggcttgacgtttgtctcttacaatcaatatgattatggtaacttgtggcatggactaacggcagtagttccatttattgcttggagcttaagaaatcaatgtgaaaagcctcaaaaatgggttttataccactggggagaactaaggttcgaatggngcattggctgagcgagatagtca

SEQ ID NO: 15355 - DNA, 4467 bp, Arabidopsis thaliana landsberg
gagttctcgacaattctggagttctttcttctgttgttgggaattgcaaattgaaaactgaagatttgtggaagagattgtaccctgatgaaccttatgagcttgacttggataacatagacttagaggacatctctgagaaatcttcagctcttgagaaatgcaccaaatatgatcttgtttcagctgttaagaggcagagcccattttactaccaggttactttaaaatgattgttcttctcatcatcataaccggaaaatacggaattttcttcctgattctgtttctgtgtgttcgttgccacaggtttcgaggtcccatgtaaacagtgacatttttctacaagaagctgttgctagatataaggggtttctctatctgataaagatgaacagagaaaggtctttaaaaaggttttgtgttccgacttacgatgttgaccttatctggcacacacatcagctgcacccagtttcttactgtgatgatatggtgaagctcattggtaaagtgttggagcatgatgacacagattctgaccgaggcaaaggtaagaagctcgataccggtttttctaagactactgcacaatgggaagagacattcggtacaaggtactggaaagccggtgcaatgcatagaggcaagacacctgtacctgtcacaaattctccttatgcttttgatgttttggtcaaagacccaactgcaaaagacgatttccagaatttaatccaattcccagaggtggaagttgttgaggtagttttttatcattttctgtggttgtctcttccatgtattgagtttattgcagttgtgtgatccttttgtatccttcaggttctcttggagattatcggggttagaaacttaccagatggacataagggaaaggtctcggttatgttcagtaaaactcagccggattctcttttcaatgctgaacgtagactgaccattttatccgaggttggggaaaagcaagtagctactttccagtgtgaacctacaggagagcttgttttcaaacttatttcctgttcaccgtctaagataccagtttcaagagagcctaaaaacttgggttttgcttctttatcactaaaggagtttctgtttccagttattactcaactctctgttgagaagtggttggagttaacacccagtaaaggtagtcaaacagatacgaaacccataagcctgcgagtcgctgtctcgtttactccaccagtacgcagtccatcagtcttacacatggttcaatcaagaccatcgtgcaaaggctcttgcttcttttcaatcattggaaagtcccgtcttgctaaaagttcaacacacattgttgatgaaacccaaacagaggtgatcacacttcaaattaggtatgacaatctaaacaacattctctttcgaaaaataaacgcatttattgattctggtatgataaaactcagaccagttatatatatgattttactttcttactttgtcgtgttttaggaactccgctgatggaggaacacttaaagatgatcagagacaagttatgggtgtgacagactctggtgaaactcgcgtgcttgcggtttatactggtagtttctggtctttgctggactcgaaatggtcacttaagcaaataaacgcctccactgcagataatccgctctttgagattttgggccctcgagtggtatattccaccattttattccagtaaaaagagatgaatcttcttgttttaacaatgtaacccagttcaatgatacaatgctttttattggtttgcaggtgaaaattttctcggggagaaagctggattatgaaccaaaacactgcgcaaaccttagaagtgatcaagatttcatgactcttgtggaattttccaagcaacatccatatggaaaaactgtgggattggttgatatgagatttggttccattgaggcaagtctgaaagttcgatttaaccgggaatgttacttcttctatatcttgccatgctcattttgactctgatatttgatatgcaggcgaaagagaattggttgcttttacccggaatcgtatctgctttcatactccatactgttctgaagaaaggaggttctgaaggcttcaatgtcacaaccaaagatataaaagaggaaagcaaacagactaaacttgttgctgcgacagaaaataatgtgaatgcaaactctacgaatgtggagacccaaactgctattacagcccctaaaaaaggcagcggttgcggcggtggctgtagtggtgaatgcggaaacatggtgaaagcagcataatctggtagttgtggtggtgacctagtagagaatgcgaaaatgtggtgaacagtaaggtgcaaatggaggcggttgcggtgaggacgccatcatgtggcttaatatcaaaactgtaaattacaaataaagttgtactttgttgtttgtttatgcaatgaatggtttgtttctgttaattgccaaagactgtgaggatctgatccgaatgacaatttggcatgagctagaaagtaccacacatacgattctcttacaagctacgactatcatgaaaacagaaacaaagaagaaacataagacttacgagattaggtctcaaggctggctctacttacttgagaattcaacaatcatcaagaaatcgaccctatacttagatgattccataaactaagaagaatatgtcatcctaaaagaactcattaccagtccaagactctgtatcacatgccaagatacaatcagtccatctatgagtgttgctatatgacaaagaaataattgattttagtgtgtctcttgctcttgcttgtttttctttattttttgtccaaacaaatttattgatgtaaatgtttggatttaaattaactaacaacacctttgttttggattttaattggtaatttattttttgtcaccggtaatttttttaaattcgggattttaaacctacagattcctttgagtaaagtgctttatatgagagctgtagttactcgacacgtgtctcaatacataggataccacacgtgatcaacgtatgatcgcatgtacacgatctttgacttatctttccttttatccaataaacacatgctctctagagagtgacgttgtacatgtatacacttgtcagttttattatccgtcttgcttaagcagattacttaatcctacggctatggataattagttgttaatttgttattagtttaattaaacttttagttaaaaaacgaatacaacaaaggtgtgaccggcataagcggaagcagtgggtccaattgtcgtcgcactgccccgcaaaatctgttgctcaaagcaaaggttttctctatttgtttatttagttaagtttttttctttctttttactaaatattactcattacggatttataagtttataataatctcttcacgagtataatgattttgttagtgatcactgatcatcggtcatcttttgtaatcatcttgaattattatgatgctgattcattttgattttgctatgttcttttttcaaggttcgtatattttggcttttcagttaaagattttcttaaaaaaagttttgttaaatacacttaaataaagatttacaattagcacttaatttcaatagaaatttgaaagtaccatatttcaatgcaaattatacaaacttactctttttagttattaataagaatataagattacataatctcaaccagagatacaatcacattttataaagtttattcgttgatttattatgacttctaatgttttttcgcagctattcttatttacgaacagaaaaatcccttaccaacttactataatacttaaatggcaaaatcgtagtccttaaatttagctataacgggatgaaaaagtcatgcgtagcttagctttttgttggccacgtctttctttaaagcataatgtgtaaaagatatgattgtgaaagttcacactatattgtgcaatgtgtaagatcattatatactaattaatttacagcaaatgaaagaaaaatgcatggaatcttcttactcttttacctgcgatcatttatgtgcatagatcatttgggttttggtatgttttataatctaaatatctgataaccatcgataacatacaagcatcggcaattcaacatccataagtttcttgattgtcgtcatgccgtccagattgattttagtagacgatcatttcttacgttgactctctgctaacttacctacttgataaaaactacacaacatatacatcataagtaaatttagagaggatctagcatctcttttatttagaaagcaatgaaactctagcatatataaaccaaactcatgatggtatgtatagtggttaaataatttatcatggctgtggagaactaaagttcaaatttcaattatgacgtgaatgtttta

SEQ ID NO: 15356 - DNA, 941 bp, Arabidopsis thaliana landsberg
  unsure (1)..(941): unsure at all n locations
tgaacaatctaattcccctccatgaaaatctcggccaaatgtttcggcaaaatcagcagtagttcgtcagcaagttaacaatggcatgcctgacctggacattgcaacggaaagcaaaacatctattcaaatatctgtaagtactttccagctatcttaagtttattagattcctcattttagttagtttggaatttgaagtaagcatgtatttggggctttcatcttctacatccaagagtgatgcttctctaatctttgagactgtagaaatgatctgtaattgtaaagatattagcatttaattaggagagttcacgcattagatggcttctatctgtaattagttttcatctcgactctgggttgatctttctggctaatatttgcttccatgctttactcttgcatatcttacaatctgtactcaattttttatttttggaatggagcccccatggtatttacattagattgctctttacctttctctatttagaaaaaaagcggttcaaatggccggcctaaatactcgacacttgagaaagccatcaggaatttggagaagttggtcgctgaatgtgagtttcaactgtttcgttgttctctacatgcatgagaagctaaataccatttagtaaactatcatatcnnnnnnnnnnnnnnnnnncctcctgctgccactgagaatcaagatgccgatatctcttcccaagcagtgaagaggggattgccaggagatgtaaaattgcatcttgctaaagttgctagaatcgcggtaatcaaactcttctgtttctaaatatgtatataaaatttaataatctttcagatgtatgaaagagagtagcaattttcttttcttgaagtatgcgagccaaggtgaaatatcaggagagttaatcaatcgtctcatgggcattgtcggtcatctatacaga

SEQ ID NO: 15357 - DNA, 2171 bp, Arabidopsis thaliana landsberg
caatgcagtaatcccgctcgtatgggattattctgtaagtgacttaactttcaatatctagaaattctttgttgctggctactaaggatatttatttcctcacacatttggtctgtcctttatatgcagccacttctcaccattgatacctgggaggtataatatatgctactcatctctctctatctgaatttcacctaaagcgattggtttcttgattgctgatttagttttctttttccctctttgtgccacacagcacgcttactatctggattttgaggtaatgcccgaataaagtttcacgaaatttgaaagcaatggtctcatgcttgttgtgttttatgcagaaccgaagagctgaatacataaatacattcatggaaaagcttgtgtcatgggaaactgtaagcacaaggttggaatccgcaattgctcgagcagtgcagagagaacaagaaggaacagagacagaagatgaagagaatccagatgatgaagtaccagaggtctatttagatagtgacatcgatgtatctgaggttgactaaaacttgtgaagcaataacattagcatcttaaatgttaattacacagagcaaatttttttgcattcttaagccccaaaacattaaaaaaatcactaacttaaacaaaaacaaaaagctttattacaaatttacaaattgattcctggccaccagggaatttacatgcggacttgctctggcgcctcagaccaccagttccagggggccgttaagtggaggctcaaaaatccatggtcgcgggcttcggcccaatgggctagtcagatcactgtgtggtctggacactgagttatcaaaaaaaaaaaaaaagactgcaaaacaaataatgataaaataaatctctgctttgctatgaatgcaagcaccagctcctagcagttgtttccattcgactccacgcatgtagcaaaaggaatacccacatctgtatatatccatcaaccatgaaattacaacattaggcgcaaacataatcaacattccacgacgataaattaattaatgaatagtagctagagtctaaatttagagaatgtgattagaaaccaaatgtcgttagcttaattggtagagaccttaggcaaagcttagaggtcgccggttcgagtgatgcttgggacgaaactaatattacatgctgtgatttcgggcctagggggattacgagcttcggcttactccgtactttccacgtttaatttttgtcacatgttggcacttttcacacatggcatgaacgattagagctttctcttcgatacttatgctcattttagaaactagtgtttctagtgcaagttcattagctaacttattagtttgatttccagtcaccagaagaggtgtgcttgatgtcaattgttgtcttatgcgttgcacatcatacattatcattgcaatgttatctttatcaggcaatgatctccccataacctaaaaacatgatcaaggacaaaacctactcaattaggagattttgctcgtcatcgtaaatttttgttttggttgaaatgttaaatttatttaaaaaacaattttggcaaaactaatcaaaacctaaacaaatgctcaaatgtgtaaatgtttcaagaaaaatttaccagttcaaaaatctgaaaacgatcacagcagattgagatatgagtgatccccaaactcacggcttcggttaatcctcgcttcaatgccataagctcagcctccaaaactgtaactgtggagtcatgaagtgatcctttcatctgaaacaagagatattcatcctcttctctgaaaattgcaacctcaaatcccgccgataattgagctgatgttttctcccttaccaaacccttaaagtaaaggttgtatgtgtcatcagaatggaagtcgcccggtgagggttttccggtggggtttcggccatagtctctttccagggttccttctttctccatgaatctgttgcacatacttgaagatttgtttttcgtaggggtcctaaggtttaatgactcgacacatacaattctaggttttatagattatatatcagaagcggctcctagctcgttcgtgtgattaaactaattaactttataattaaaagggaactaagagaaattaaaaaagaaagagccc

SEQ ID NO: 15358 - DNA, 581 bp, Arabidopsis thaliana landsberg
  unsure (1)..(581): unsure at all n locations
cattgctagattttaattttgaaatccatttttcaaatgaaaccaaacctagctattgggagctcataatgaaataaaactgtatttattatttcatagatcaaaaaaattattgactgttatttctgaattcacacgttgtaaactccaaaacaacaagatctgaaccttattaattattgagctttgattcttttttttttaaatgattacttttattctgattttaaatattttgttcatcaaaaataatcatattaatggtttatgttctataccatttgaaccaacctcttacaaacttgatagccagtagtttattagtaaaaataaaccgtcacgctttaaagccgtaatgtggaaaaatgataccatcatgatataatttagaaagacttggtttattcattaacataagaaaagtatttatacataatgagatttttttatatgatagaatcgtatcacatctcaatattttaaatttatcctaatatatcctaataccctccttcaacttggtgatctgaaatntcgagcaccaatttggacataaattttcaaacatatgtgtagaaaat

SEQ ID NO: 15359 - DNA, 3659 bp, Arabidopsis thaliana landsberg
tcgggtggttcctcaggggattttgtggctgtgtttttccccggtgttttgttcaggcttcccagtcttgcttttcttggtttttcttttccctttgacggaaatagatctattctcagattttatttgtgtgtgtgagtttgggttgagctcgattttgtttttgagatgtttgtacggcgtttaatcttcctgtattggatggatctaggggatagagttcgatcaatcatcttcggtgccttctggaatcaatttgatttgtatgagattcagatgcttatatcgatctctgatcgtgactgtgtggttgctgaaacctgggatttgagttttttttcatattattccgctttcaatcgtcaaaaactgaatccagattcaaacgaggaagaattttgaaaatcacatcgctatatcacgtttcttagatctaagtctctatatcagcgtatcttataattttctctgcaaaatcaggtatgagcaagatatatggacatacatttcaaggtttttggatggtaaatcactggtgaagctgggagcaacaaacaaatggttctataagatcgcaatggaggatactgtttggaggtttgcctgcttgcgtgatcttcaggtccctgtgccgtttcccgtttcttccacctggattaagatttatgcttcagcttttggtaagtttcacatccatttcggacttatgatacattcttctacaatggtaaactaagaaaagatatggaaaactgcagatgggagtcactcttacttgttccgtcagaaggagaagcatattggttagtccttgaattggatccatcatactctcttcttagtcatgttaagatgttgtacagatctttgactttgaagtacttcatttgctgatcacagcctcattttgatctcgttttgacactgtcattatagattggatgcggataggtgcctttgttcttgactctcgaacttcactcctgactgagagtttgagtggtcgtctgaaagtcccaagggaaggaaccatagaacggatgttacaatccagtggttcatgtcttatcaacgacatcaaaagcggtatttggattgcaggcaagaacaatttctttagaaactttatctactgcagaaaaagaaaactgtaacatggcttatctcatgttccagatttacagcttgtacgttgccctgtttgtgacctcagtacctgtgatggtaaaagacactaatcaacttctagtctgtttctattgatgttagtctatgaaataactaaattgcaactaagagagtttctgttttactatgtataggaacaatgcaaactcttgatgctaggcacattgaactcttccttagtgaaggctacaaagatggaagctgggattacaatctgatcggatctcataagttgcagaaaaacgcaagtgcagcttgtggagccatatttgacctcaaacaccttaaagaatcttcatattcaggtaacttcaaatctacattacttttctgttcctttactcctcctctttagatcattctccttgggtctcatacattttcacatgaataataggtattctcaacctcaagtcttggaccggagagtcaaatgattcccaacctaaagcagttatcgcaccccacgctgttgctgttcacacaagactgcaagaaaacgaaggtacatgtccaaatcactttgcataatcaaccatctttatctagcaagtaagaaacacaattacaattcttttacaaatctaaattgcaggaatccttgtgaagtaccacacaatgaaagcaggaacagacggtgacattgtttccatcagaatctcccagcaacttctctgattctttcacagtgcattgtctcatagtcagtatttctggtatacaaatccttctcctcttcagtaaaataaagataaacataagctttactgttctatgactttttccattgtctataagtatgtaaattccaattcccttagtgccttaccacaatatgactttctcaaaacaattccctcttcttctctatttcttcttcttcttctactttcctctcctaaatgcctcaaaaccaaaacgttgctacagttcttcatgtggaggaaacaaccttgacgttagcttccctttctggctatctcctgagcaatcttcgtcatgtgactacccaggattcaacctccattgtgagacagccttaaagcttccaaattccagacgatttctcgtccaagacataaagtcgcagcgtattcaccttagagaccccgataactgcttagccagacggcttctcagcttcgacgcttcaatgtctcctttttctcctcttcaccttgtcaactacactttcttgagctgtcataacgaaaacgtcaaatcctcttctttggaacccatccattgccttactaattccacaccttcagatctcaccggttcaatgccgtcctcttgtcaaaccttgaagacactacttcttccggtctcttcaccactcgcaggtgatctcaacaaacaagacctctggctgaaatgggactcaccggattgcacaggttgtgttgattttagtccgttatgtagtcataaacaataccatcctcaaagtcaaatgcttcacatacgttgattctggtaaccctctcgtcctataagttctcacatatacaccccaacttgaaatcaaaatcttggcttcatcaagaacatatcaaagaacaatttttcttaaaaatgttagacttttttctatctttcaggaaacccttggttaataacgttaaagatattatgcttatgcctatccgtaccattcttcatagtgataactcctgccgtctgtatcatttttatcccaatccaacaacaagccaagagtgtcccttggcgaaatgacactctctgtcccatttgtttatcagaatacacaagtgaagagaccgttaagtgcttacccgaatgtgaacattgcttccacaccgaatgcatcgacccgtggctcaagttgcataactcttgtccggtttgtcggaattcgccttcatctttgccaaataaagctgccacgacgaacgttgtctagatttgattcgagccactattgattgtttatcgtaatttcaatgttgcgcattacgcaatttcagacgaacatttcccaagctttactaataaatggatagatgtgaatttgtctccgatattagctagtagtcgtctcagtccaacctttgaagttcgtgaaacacacgcacgcgtttctaagcgagtgagcgtagtacattgtatagctttagtcttaaacgttattggacttcaaacattattgggcttctaacaaaattcgctagaccacgacaacattttcataaactttggttagaaatccgttcatgaactgtgggactttaattgactatcaccttaaagagtttgttataacgcccgttagctatcgggttcgtatgcacctgtgtttaaccctcggcgtttttggcatccttggattcttaatgagatagggtttttcctggtcccaataattagattttggccggaaaattcgtgagggatttcttattttagtggatatgttggatttccttgtgagtgcagtaaattgtaat

SEQ ID NO: 15360 - DNA, 1174 bp, Arabidopsis thaliana landsberg
tcttcttcctctaaccgcgagaaatcaattgctctttgtccagttacaagctccagaatcataattccgtacccgaaaacatcggttttctctgacgatttccctgtggatatacattctggtgcaatatgacccattgttcctcggacctgagtggttacattagtccttctaacatctaccaacttggctaaaccaaaatcaccaaccactgcttcaaagtcttcatctagtaacacatttgcagctttcacatctctgtgtatgatcttcgggttgcaatgttcatgaagatattcgagtcctcgtgctgcacctaacgcaatctgtttcctcctgaaccaatccagaactggatccccgggtttaatctctgcatagtatatagatcacaaaatcttaaactcctgaaatcaaaagtttatagcttatgttcctttttttacctcttaagcaatatgcaacacttagattctgcatgaaaggatacaccaaaagtcgttcagtttgtgttgtacaaaagccgataaggcgaagcagattcctatgaacagctacacttatcatctcaacttctctctggaaagcttcatctcctcctggacgttcaaaatcagtcaatctttttacagcgattttggtgccatccgaaagcaatcctttgtaaactttcccaaagcctccttgtccaagaacattcttttcactgaactcatctgtagccaactggagctctctccatgcaaatcttctcaactgtccaaaagcaatccttctgtccacttcacctgaaaccaaacctttttaaagttcgttcctgtgtaaccataaagaagaaagattgattattgtcacagacctgcaacatccacaaacacgtctcgtttaaatcctttatgtttatccttgcagaagaaaaagaagaagaatcctagtagaataaccgctattccgctaacaacttcagcgatgattccagtttttctactgcttgaatcacctatacgcgccaaatccataacaactttcaacacttagcatctctgcatatggaagtgggccatagcaaatcatcgtcattttacctgaaggactgcactcgggtacacaaggttgcgggaacgggccaccacagctcaagtggtttgctgcgaaactataactgtgagagact

SEQ ID NO: 15361 - DNA, 2447 bp, Arabidopsis thaliana landsberg
gccaaaacaatctcgaggatgatacccggttttccgaagtgttgaagatgtcctatttccttctcccaccaagactcccaactcttttctggaggaacaccaattccccctcggttatatatccatttattccaatctgtccaatcatctacgatcttttgccactcgaaaccagagggattgaacaggaaaggagcaaagagccaagtcaccaccatgaaccatatcgaaacagtgatcagaatatatgtaacaactcctctataggcatggccaaatatctgatacactagcaggagtatcatcagctcaatacccttcacaaaatgactgcgcgagtagaatctgtagttttcagcaaatttggcatggaacaccacaaaaccacgcccagtgcctctgtattctgcgccgccatgaaacaatgttcgaccatagtaatgagtttttgtccccagttggaacgtgaaaaacacggaagcgagttgtaactgcatcagtacaaaatcaattagggcgttatggaatcccctctcaagacctatctccatcatcataggtaaggccatcaagaaaccaatctgcacaaatgattgagaagcaagtgcagcttgaagaggcatgttggatcgaaaagctttctggttgctcaatccttcttcaagaccactaagaacgagatacagccgtccatatagaaatacatagaccgtaagcacggttaactgtaagaaagacacagataatgtttcagactgagataaacttcccatgtatcatactgatcgtgagataagataaagaaaaaggaatatgacctaccatagtactgaagtagaacccaattgtagtgaaataacaagaaagcatgcggaagaaatcaaatcggtgccccagcctatataggtcacggcttagagtttgctccccatttccgttagcgatctttgcctcaaacattgaaatctggttgagtcctacatctctccctttaccaacttgtatgtattcatgatgagtcacattgccttcacgaagagtagagttgaaacctgaaaatagcgaaggtatgagagaacgaaacaaaaacgtatggaaacagatcataatatgtgtcaccggagaaaaggcgatgaagcaagtaccagcaaatatgtcttcacttagattgatgactttagaagctttgcagataccacctctggtaaggtgaaacagacgatcaaaaatatctggatgtccgtaatggaatcgtactctggagcagcaacagaaagagcacatcaattttgacaactacaataccctgacaagatttcagaacagggaagaaacttacttgaagggactagctagcactctgtgcccaatcgttacaaaactgttctcttgatttgacataaaccatgcacgagaagacacacttcacaagaaaccacaaacataggagatcagtatgcacacagaaactaaaaatctagaagacagaaataggatcattctgttagtaccttccagtgaaaatatgctctctaagaccaagaatcgtaggacatcttacgcctccatgcttttcaagaaactcttgcagcaagttcctcattttgaaagcttcctccatgtagttgtcctaaggtcaaatatttagaggttaagagtctcctgcggtgattattctttgaacaattttaagcatattatatgtgattcattagcgacacatgttagacaaaagaaaactacgcatcgcacctgattcatgtctatcgtctgcaacccttctccacgggtaaatatgatagcatggttctgattttccggctttccctctcctagtatagctggtcccggaagcttaatccgataaatgagctgacagaaaataaatataactcagtctctcttgaacagcagcatctatatcctctgacctcactgcataggattaaactcatcctcgtattttgggaaaaaaaggagcaccaaaatgttaagtattttacttagttttctcaacttatacctgatctagtgtttgaacagattcagaagaatccattggtttggtctgtggagcagcttttacaagcgctgagtaataaattttctcctctgtccccttataactttctttatgtgtttgctctacctcatcgatataggcgacacgaatagacggatacctgccatgaggaaatagcaagcttaactaatgaggctaagaactaaataacaaaccaactggaaagataaaggatgaaagaatgaagatattacgtcgtcataagtctcaatatgtctttagcacgttggtcgccagatctcttatgaatactgtattgttgacaagaaaccacaaaggtgaacttcatatctgcaagtgcttgacactgcgcccaaagtgaccctccgctctttgatgcttcttcactggttaactcgagagc

SEQ ID NO: 15362 - DNA, 2280 bp, Arabidopsis thaliana landsberg
tcagattcttctttagttgatggctccttactatcatcttcattcttattctgagaatcagaatggtcttctccatcaaaataagttgttcttatcagctcataagctccaaattcactactaggctgaacttctaacttatcagctcgtatctccccatgcttactccagcatccatttctcttgtatttatgatccattcccttaataaccagatgctccaaaacagtatcatttggttgatgacacagattccggcaatccgtacatggacaaaacatttcagaaggatctcccaaacgtctcgatgatgcgtaaacaaatgttgttgctcctttctcgtactcaatgctattccttggcagccatacccaactcttatgcatttttaaaacaccaacgagctccaaccccatatatatgataatatatatatatatatatatattagttaacagagatacaagaacaaagacacaaagggaaattttaaaaacacaaattcaatactatcaaagctatattgaatacaagaaccacataaactcaaagctacacgcaaactaagaaccacttaaataaactcaattcgatacaagtgaatcacataaatagtcaagttcaattggatacaagtgaaaagtcacagaaatagtcaagttcaattggatacaagtgaaaagtcacagaaatagtcaagttataatcgatacaagtcaatagtcactgaaaatagtcaagttctaatcgatacaagtgaatacaagctatcgaagctatttgaaactcaattcgatacaaatgaatgctcactatcaaagctatatgaaactcaatttgatacatgagaatagtcaagttcaaagctatatgaaactcaaaatcgatctaagaaccacaaaaatcgatctaaataacatacctgtcaaaaagaagccactgaaatcttcgagaaacggatagcgaaagccccaaatcaaaacccctaaatctgagaaacctgaaaatcaaaccctaaatgtgattaaaaccccaaatcgaccctcaaaccagacaaatttgacaatgcaaaccctaaatcgattacaaaaggaacataaccttctcaaattagaaccagatctgtgactgagaagctgaagagtaccaacctaaagagtccataaaatttgatgttttgggtttttcacacaaattaaaaaaagtaacttttgtattatttgtattatttttttataaatttaatattataagttttacttctctcctctctatttgttattattaaaaataataataatattaacttaaaacatcaatctttatggaacaaaaaaaaacccccaaaatatcaaattttatggaacagaaggagtaattaataataatgtcgatcggacgatccctgtcttgttttaatgctacaaggacctttggaaaaataaaatgtggtagagatttcagatggctctttaatatggtggaaatttcaaatggctctttaatgtggtggagatttaagatagctctttaacttaatgtgatgaaaaatataatatttggatcattataccaccaaagtccacacacgagttctctatttttgtttcatcctcttttagtcgctggtttggcctcaatgaataatgtagtggagacttttacacaatgcgtacaacgtgaagaagacttggtagaaatactggtttaatttatctctattttgtatataaagacatgaatatgaaaccatgttatcatcacaatctccttttcttgctttttcattattgatattcaagaaactaagaaaaagaagaaaaacaacacttcgaaaaaatgatgaaaggctatattactctttcttttcttatcattgtcatttttaattttctttacgagtttgcagcttctactagacacttgtgtgatcctgatcaaagggatgcgatttttgagttcaagaacgagtttgagactttggaggaattttgttttgacagcaatattcctccgaagacggagtcatggacgaataacagcgactgttgttattgggacggtatcaaatgtgatgccaagttcggggatgtgatcgagctagatcttagctttagctgcctccgtggccagctcaattccaacagtagtctttttaggcttccacaacttcgttttctaaccattcttgacctttctaataatgattttattggtcaaatcccatcttcacttgaaaccctctctaatctcaccactctagacctttctagaaatcat

SEQ ID NO: 15363 - DNA, 650 bp, Arabidopsis thaliana landsberg
taattagtatatattcacggcttaaatttaaaattacaaattggttaatgaattttataaacccaatgtcaaatttgtaaaacaacttttaatatttctaaatttaataatgtatatgtgtgagctgtatatttccttatatgctatgtgtgtaatcagctaatttcaagatagaaatcagattatccagtttcacctatagtgtggtggactaatggattttgagagttaccataaaataaatctcgtcgctctaataatatagggaaaaaatcaagtgatagttaagacctttgtcgattcataggctgtgaatagtgaccaaaatcgcacccaaaatcgcaccgcaacagtgttataacaatatcaaaatctctacatatatatatgtatttatgtatttttgttaatatttgaaccgcaccgcactcctcccgcaccgcaaaacgcagtcaccattcagagccataattttttatccatttatctatagattcgatagactcgatttgtcagaaaagtattatgaccgacatgaaaacacggctcgagccgtgttttaattttatatgttcagtctacttcgaaagggaaacgaaaagaaaacacggcttgagcttttcattttacactttacattttcatatatt

SEQ ID NO: 15364 - DNA, 896 bp, Arabidopsis thaliana landsberg
tatattttcggcaaaaggttataatgggactccaattttttacatatcactgatattagtactcttagggggcgacactatcatgcggttgagatgaattgagatgaatttgaatcaaacaggaagcttctacagtaatggacgaccatattggacatggttatccttcatgaatttggacaagtttttggaccataaaccattatggaccgtccattaaaccccaaaaaaaaaatggtccaaatggtcaagcctattgggcgttaaacggaccacttgacaccttattagtcactttatcatactcttacatatatatatatatatatatatatatatatatatatatatatatatatatatatatttatttatttcgacttcaaacatgcttgtcttgcttgacccatggccgcctcttcctgtatgcctatatctagttttaacatccaatgtttatggttgagagttttcttctataggtaagtaaatagtgattggtctatgaccaactctatcatcgagggccggtccttaactttaagtggcctcaaacataactaaaatatgtggattggagaaagaaaaaaaggatgaaaaggaatgcaaaaacaaatagagcaaataatattagtaaaagctcgaacttgtgaatcgggactaagttatagaaagtctaaccactagactacattgtgtggtttaaaacagatgctttcctgctttattggcgggccaggcctgccatatctattgattaacctagaatttgatggtacgttgttttgtgatagcacatgagttttgctggtatggggtaattcttaacggtttttagttttcaagttagattctctatttggcctaggttcgaggatccagtgagtttcggctga

SEQ ID NO: 15365 - DNA, 3582 bp, Arabidopsis thaliana landsberg
aaatggtattggcgggaaccagaacaagggaagcttaattaccaagacgcagatgatatgctcaacttgtgcagtagcaacaacatagaaacaagaggacattgtatcttttgggaagttcaagcaactgttcagcaatggatccaaaatatgaaccaaaccgacttaaacaacgcggtgcaaaaccgcctaaccgatcttctaaaccggtacaagggaaaattcaaacattacgacgtgaacaatgagatgttacatggatcattctaccaagataagctaggcaaagacattagagtcaacatgttcaaaaccgcgcaccaactagacccatctgcgacattgtttgtgaacgactaccacatagaagacgggtgtgatccaaaatcctgccctgaaaagtacacggaacagattcttgacctgcaagaaaagggtgcgccggtaggaggaatcgggattcaaggccatattgatagtccggtgggtccaatcgtatgttcagccctagacaaactaggaatcctcggtttaccaatatggttcacagaattggatgtctcctcggtcaatgagcacataagggcagatgatttggaagtaatgatgtgggaagctttcggacatcccgcggtggaaggtataatgttatggggattttgggagttgtttatgagcagagacaactctcatttggtgaatgcagaaggagatgttaatgaagctggtaaaaggtttttggctgtgaaaaaagattggctctctcatgctaatggacatattgatcaaaccggtgcgtttccgtttagagggtatagtggaaattatgccattgaagtgattactacttcatctagtaaggttctgaaaacgtttgttgttgataaggaagattcgtctcaggttattactgttgatcttcaaggtttgtgattgtgacgcttatacatgtgctgaaactgtggtgtttatttattgaaaacaaaataaaagtctctcttgtagtttcattgtactaaatagaaaacaagaagcgtttttttctttaatcctctacattgataatattggatcaaaggattgtttctgcaagacacaacacaaacatacttatactagtttacttctactaagtactaactacatacccatacacacacttgcacctagactttacttctagacatcattaccctaaggtagaaccaagcttacaagcaagttttaccgacaactcttacattacaactctagtctgtagtctttaacgtagacttactaactagtcattagtggtttaattttttaaattttcatccatatgtttttgttgtagatataaactaaagtcggtcacatttaataattgtcattatgtccgcgtaaaagtcaattcagctattggacatttatgaaatgtaagattttctctctcatttccccgtgcgtgaaaacatgcattggtttttctgtaataatcaacaaatccaaaccccttttcgatctttatttggacattgttagagacaaaatttctctatagtctttttcctaatttgataccatgtttttgtttctgcacaaatttactcactggtttaactaactatccacttatttatgattttaccatcagctagccctagtcaaatttgtaaacaagccaagctatctacataaatagagatgtcattaacgttaatcgtcgttaattcgaatttgaaaacatagatagcttagcagtccaatggcactggtgagaataatagctaaaggcccaataattggtttgcagaaactaaagccttaaaaaaaagcccacagatatttgtcaaagaaccctaataacctattcggtgctcaagcgccgtttctagggtttttctctgaggaagaaagcgtttcatttgtctgaatttcatcgaaaatggcggaaagaggaggagaaggcggcacagagcgtggcggtgaccgtggtgacttcggacgtggattcggcggtggacgtggcggtggccgtggccgtgatcgtggtccaagaggccgtggacgacgtggaggccgtgcctcggaagaaacgaaatgggttccagtgaccaaactaggtcgtctagtggctgacaataaaataacgaagctagagcagatctatctccattctctccccgtgaaggagtaccaaatcatagatcatcttgttggacctacgttgaaagacgaggttatgaagatcatgcctgttcagaaacaaaccagagctggtcaaagaactagattcaaggcctttgttgttgttggtgatggaaatggtcatgttggtttgggtgtcaagtgttctaaggaagttgcaactgccattagaggagctattattcttgctaagctttctgttgtcccggtgaggagaggttactgggggaataagattgggaagccacacactgtgccttgtaaggttactgggaagtgtggttctgttactgtgagaatggttcctgctccgagaggttctggtattgttgctgctagggttcctaagaaggttcttcagttcgctggtattgatgatgtctttacttcttctagaggatctaccaaaacactcggaaactttgtcaaggtctgattttgatccttcttttggcagattcattgatgtgtttgattatgtttagctgaagaattctgtgatttatctttaaccatagtgttgatgttgttggtgttatgatgcaggcgacatttgactgcttacagaagacatatgggttccttacaccagagttctggaaagagactagattctccagatcgccctaccaagagcacactgatttcttgtcgactaaggctgtttctgcaaccaaggttatcactgagggtgaagaccaagcttaagaccttcatgagatgagtttggttttataggttctggttgtggcaaatatctttatctttttccggtcttgtttcttggttgtcttatcagtttttgatattggagatttaattacaaggataatcatatttagttatgtttgggttttgttagatgtttgcttccatgaaatgacattttgcaataatgcatgtctatttctaagttcttgcaattaatcagtttaacatgtataaattgttcaaggaaccttatcaattatgaatgatctagtataataattgttgatatcgacattgcatcagcagtaaaaacagaagaacgaattaataaagtcaaacaaattcagtagaatgatattttttctcaacttattttataataaccattttaaaaacaaacatattacatagtacatacatgtattcccctttccttggatttgttaacatgatgctttaatgcttagattgagtcttatgaattgatacaagtgaaaacagtaggaaattgttacgaaacataaaatactcttatgagatatgaaatctgattcttatagctttgtagttctagaagcgccgaggttgatctcctttcttcttcttgagcatttcctgggatgtttttgggatcttcttggctgattcgggataggcttccattcttttttaagggctcat

SEQ ID NO: 15366 - DNA, 1890 bp, Arabidopsis thaliana landsberg
acccccgaaggggatgtgtttacctttatcttaacagctaaagtagttgacttgttggcatttaaaatctcttttagaagattatgttgaatagtcattggcgtgcgattattcttgctttgaaaaatgaacagttgactatagaaaatgatctcatttggaagattgtgagattttagttatttctttggatcacgtataggattcagagacaagagaagagaaaagaggagagaaatggagaaaagggcagagaagagaaggattgtgttagttccggttgctgcacaaggacatgtaaccccaatgatgcagcttgggaaagcccttcaatcaaagggcttcttaattactgttgctcagagacagttcaatcaaataggctcatcattgcaacactttcctggttttgactttgtcaccataccagaaagcttacctcagtctgaatctaagaaactaggaccagctgagtatcttatgaatctcaacaaaacaagcgaggcaagcttcaaggagtgtataagtcagttatcgatgcaacaaggcaatgatatagcatgtatcatctatgacaagcttatgtacttctgtgaagcagcagctaaggagtttaagattcctagtgttatcttcagcactagcagtgctacaattcaagtttgctactgtgttttaagtgaactcaatgcagagaagttcttgatcgacatggaattgtttacaaaaactagcttattacccattatgcttacactccttatgttcaacataattttgttttgactttgcagagcatgacgtgcaaaacaaggtagtggaaaatatgcatccattaagatacaaagacttaccaactgcaacatttggagaactagaaccttttttggagctctgtagagatgtagtcaacaaaagaacagcctctgctgttatcatcaacaccgtgacctgtctagagagctcgtctctcacaaggctgcaacaagaactccaaattccggtgtatccattaggccctcttcacattacagcttcatcgacaggatttactgtgctgcaagaggataggagctgcgttgaatggctgaacaagcagaaaccaaggtctgtcatatacataagtttaggaagcatggttctcatggaaaccaaggagatgttagagatggcttggggaatgttgaatagcaaccaacctttcttatgggtcatccgacctggatctgtctcaggctccgaggggatagagtcattgccagaggaagtcagtaagatggttttagagaaaggatacattgtcaaatgggcaccacaaatagaagtactaggacatccctcagtgggaggcttttggagccactgtggatggaactcgacactcgagagcattgtggaaggagttccaatgatttgccggccttatcaaggcgagcagatgttaaatgcaatatatctagagagtgtatggagaatagggattcaggtaggaggtgaactggaaagaggagccgtcgagagagctgtgaagaggttgattgtggataaagaaggtgcaagcatgagggagagaacccttgttttaaaagagaagctcaaagcctctattagaggtggaggctcctcatacaatgtattagatgagcttgtcaagcacttgaagacagagtgaagaattagaatgcaatgatttttttgttaaatggtttttttaaagagttaatgcgcaaataaaaaagttattggaaccagaggaaatatccaagcttttataaattcaaggaacgtcattattctaattcgtatttaacattcccaattatgtatagatcatcacacaaattctatattgaccaaaatatgcgtttactcttttcgaaaatgttagtt

SEQ ID NO: 15367 - DNA, 557 bp, Arabidopsis thaliana landsberg
cgtttcttgtaatggcgacggagcaacaagattcgcaactttgtttggcgacgattctggaggtatttcttttacaacgaaacattcaagttagcgttggtgtggattcttcgagcttgaaaaaaggcaatgaaacttgtacgttcctcaatattcctctgttctttctttttctatttgtcctttttggtccatttttgagattagggtttgtaattgataatcgaattagggaatataagatggattacataaaaaatttaggatgatccatcgcatttttttaatccatataccgcgtgagcttcttgcttcaccaatgattttctgaaattttgttgatacgatctttatatttgtttccctagatcatcatgaaacatatatcatatttttaagtgcttattttaatcatcacaattggtgtagttggaggaagggatttgccagtagatccttcagacttgagaaggtatgaagcagcaaggtgggtaaggaacacacttggtgtagttggaggaagagatttgccagcacatccttcagaggaagatttc

SEQ ID NO: 15368 - DNA, 2899 bp, Arabidopsis thaliana landsberg
accatgtccctcgcaaacccctagcaatttgcgaggatttacgcggatacacgcaacttcctgcaagcggtaaccttacagcttggcgtggatttactacggccccacgcaagtccctcgcaatttgcggggatttactagggacctcgcaacctcctcgcaaacttatctgaaaaccctaatcgaatctctgtgtaaccctaaaactttgcgagggatttactacggtccctcgcaagtccctcgcaaaattgaagcgattttattggttatttagtcggttcctcacaaagccctagcaactttgcgagggatttgcgaggcgatttaagtttatatataaaatgcgagcgagtttgagcgaagctcaaacccagccgtctctcatccaaaccctaattttctttcttcttcgcctattctctctcgatccgacgactgccgaagctgctcgccgccggcttgaacttcttcagcgactcattgccgtcgtgtctacatcttcttcgccgccgtctggagcttctcatccacgcttgttcttcgtcgccgccgtctggagcttcttcatcgacgcgtgttcatcctctcttccgtgtctacctgttcgtcgccgccgtctggaaccaaaggtaatgtttcaaacctagagtgtatcttcattctataataaggattatcgattagttttttgtgttggtctttcaaaacctagtgttgaatcggttttaatctgtcttattcgagtttatatttggagatctaattaggtttctagttgcatgttgattttcattgtagatcttattagggtttcttgtttccctttgatttcattgtagatctaattagggtttcttgtttccggtcgatttttattgtagatctaattaggatttcgtgtttccggttgattttcattgtatatctgtttagggttttctatttgttgattttcgttgtatttcgaattaacctttactaatgttctcttttttttgcaagatgtcattcactggcaatgattattcccggcttcgatctcagcaacaaaatcatcggctctttcctagtgaaagaaacggttcatccactcagggtaatctccaaaccccaatcaattccaacaatcaagccaatggtgcttctcctccgcctgtcaatcaatctcctaccggttctgccaatcaatctcctcgcggttctgccaatcacactactccactagctgctcggctcaatgacctgactatagaagagttgcttgctagccctggtcgtgcagggttgcctaaattagatcccaatcgacctcctggtactctctgttaagccactagggtctgttctcttcactatttagtttgtagacacatttagttttgtctgtctgatggagtctcgatttgtaggtttgacgatgacacctcagttgcagccactgtccgaagcatttttgaaaaagatttcaaagagcctcatgcaaatgggtcacagacatcagaagcagtggtcgatagatggtttgaaacatttgctgtaagtgaaataattttgtgttttgtttggtacagcttttggtcttgtctatttctaatgtgtcttgtctttgttttgtagcaagtatataactgggaccctgcaataaaccagagagttagattggagtttgaggcaaagatgaaggataggatgtctgatcaagttggtcgttggaagggaaagtggaaggagaagggaaatgaggcaaaaccgcggtggatagatccagaagtttggaaaggtctggttagcttttggatggatccaaagtcggaaagaaagagtctcaacagtaggaatgtaaggtatcatgatccggaaggcctcgggatacataaacaccggtctggacagacctcatacaaagccagagcccgcaaacgtgtaagttaattaaatttcatactttaaaaagcttgtatttcaaacaattgacctatatgtttatgtgttttagtgtgagatgacaggagaaagtactccagattttctcctcctcttagatgaaacacataggaaacctgatgggagtttcatcgatagaaagtcagaggagatctataaggaagtgtcatcgaagattcaagaggaagagtcacttctgtgtttaggcgacactacagagagcacgggttcaggcgggttatctgttcaggcaaagaacaagatctatgcacatgtatcttatctctttcaactcaatatagtgtcggacatatggcatcgacttaatatagttgcaacatttttttgttgctttggatttgtctgttgtggcttgcattatgtctttgatgggataattgcagttttttgtgttgctttgtatttctctgttgtggcttccattgtgtcattgtgttttacactgaattgattatgttgtgtttttagtttgcaaaatgtcaatgtgtgtaaactgatatgattatgttgtgaaagaagtttgcataatgtcattgtatttttggcctgattcagttgtgtttttggtttgaataatatcattgtattttcggcctaatatgattatgtctgaagctataagttttgcattatgtctatgtgtttcgaatttgctttgattatgtttgctcggtttggttgtgagtttctgacaggttgctcctaagaagaaaggcgggatttatggggccagttcattgcagcaagaggcgtcttcagcttatgccggtccggtgcttcctcaagatgatccggttgtgctctcccaaaagctggctgttgctgaagcccttattgcaaaccaggctgaaaagatcaccaattttgatgcatactttgactaccttgccgagaaggatccagagttcggtgcactgtttcgatccaggtc

SEQ ID NO: 15369 - DNA, 2572 bp, Arabidopsis thaliana landsberg
cccactcctctgttaaaacattatcctgaaatatgatttcttcctgcacaatataaagtgtcatcatatgcatatgcataaccttcttcagctcctcgagcttcgcaacataaacacctttggtctcatcttccccatcttcatacaaccaatcctccacttcctgcagattcgccaggaatgcttccctctccgagtcagtgatatattcctggtatttgtcactcagctgaaaacaagacacgttagtacccaatactcaaaactttacatatgcatactgccaatgaaaagacgaaataaagatttctcactttgtttcgcatatcataaacataagactcaacagcattcttccggtccttggtctcttccataactctgtcttgcagagccatctcaaattccttctccactgccttttcgacttccacagttttcaaggcaccatagaccaattctgacagtggtacatttgttttcttcaccttcttctttggagcctctgcctgcacaatccaataataaagtatccataattatttattgttcacaagcgaatagcaaacagtatgagttaagagagaaactagcctttgaatcagtttccatttgcaccggcttctcagcagactctggaacaccattgtcagtactagttgcatcactggtgtctttggcgtcctgcatgtttacatcacagtctccagaagcaggagctgcctcagcagaagctttgtcagagtccatcttagtagtttcctctgaatgttcttttgtgaccggaacttcaacttcttcctcttccaaaagctgcaattaggggggagaaaacaattaacataaattaaaggattcccaagttcataaggggaaggcacgactctggatgatcaatttgtaatcagttactagagagaatgagcctttacatagttcatgtagcgaaacttacagttgcagattcaactgagacgattccatgaaggttcaatctcactttcactttaagctttgccctctcaccttttgatgactggaacggaccaatctacaaaaaggagatcaaccattagaaacaagagcactacagtcatacatagtcatgacattgggagaaagatcaaaccgtgtatgtgctgatttttggaggtgcttgcaaatcgttcacatcactgtactgcacatcaacagagaatgttccagaacgataaaacgttagagccttgacactaggaatgggatttcctttgggaaaaacaatggtgctctgctgattctcagctcctccattttgagcttcagaagctgctcctttccaagcgagagaaattgagaaagggaagctctcatgaacctaagagaacaaaaaataaatcacaatatgactagtcagataatctagagtataaaagttctcgagttgcttacaagtacatgaaaataacgacatttacttaagcgtagatatgcaccaattacctgaaattcgcgaactttaaaggtcggactgagaatggcacactgcaaggcacatcccctcgacacacactcacttgcattcattgtacgcctgggctccttaccaaaaaactcagttagaatcttgatcatagcagggacacgagagccagagccgacaacctcgaccatatgtacatcttcaacagtgaggcccgcatcagagagagctttctctaaaggcctctttacacgctccaaaatcgggatgctgatctcttcaaactcttccctcttgatgacacccctaacatctttctcatccatcaaacactcgatattcaacggtgccagaggattagcgcttagaacctttttcagtttctcgcatgtagcacggagcctgagagaagccttagcattctgggagacgtcaatcttgtactcgtccttgaacttagcagcaaaatgattgaaaagaacttcatcaaagtcccttcccccaagggagcgatcgaaagcgtgagacaagattttgagctgtccttttttgaagcctgcaatacagacttgcatgcttgcgtgtccaatgtcaatgaatgcaacattgagctggtcactctctggcaaatctgtcttataaataccatatgccaaagccgtagctgtagtctcgtggatcaagcgcaagggatgcaagccagcaatagtggcagcatcgagaacagccctacgctggaggtcggtaaagtaaacaggaataccaatacagcagtcgacaacagctgtattcaaattcttctcggcaatacctttcaggttagacaacatcatgcccatgacttgagtcggggtaaaggctcgcttctctcccaaataattagcatgtatcaaaggatagccatcagggccttcggtgacagaaaagggaaaggatttgatatccctttgaagctcagggtcggaaaactggcgaccaattaagcgcttaatttgagagatggagtttttggggttcatcatggtagaagcagctccagcagtgccgatgaagcgctgcttgtcaccgaagcagacaatagcaggcgtctcacgattggactcatcatta

SEQ ID NO: 15370 - DNA, 2617 bp, Arabidopsis thaliana landsberg
tctcagaaccttcctgtgacgcttggctcctcctttacccatgccttttcctccctttccactttccagactttttctcgagagaattagatttctttttttcgctactgtgtgaagaagaattgcttttgattttcagatattgactggacgtgttcgtttatatataagagggcttttgttttcaaccatccgatttaataacccatctaacggctgttaagctcaatccttgtcaatactgatatgacatgatagccgtcgattgattttaatcaacggttattaattgtgatccgcatgataactacataagtgttcttcagagcttcgctttgtagttactagtttgcatgggctggcttactttttaatgggccggttatggatcgaaaccaaacttctcttattttcgaatacgcaggcgtttcggtaactgcctcatacgtcgtcggttgcatagtaaaataaatttatttctttttcttctctttttttttttttggtcgtatttatatttcttctcctaaaatcggtgaagtatctaaaaacccgttatttaatgcttaaaccctaatcggaaaatctctccgccactgttctctccgactcactaatgggattcttcgatcttagcattccgtacaatgagccgccacgatcaggtggtaaggaaatcgccggcgggaaaaccttacgattaaagctcgccacgaaagccatggagctaggctatgttgggatcgcacataaccgttcgatcaaaggcgtaatgtctgacaaagactcttgtacgatccctcttctcactcttgggtctctaatcaaagtcgctccgcggttagcttcttctgtcggattccatcgcgatttactcggtgttccgcgaactactccgtttcggcagtacacgcgtctcacagttcatgtggagagtaatgctcagtgtcagagtttgaattctgggaatccgattctaaagagttatgatattattgctgttaggccgatgaatcagaacgctttcgattatgcctgtgagaaagctgaggtttgaatttctctctttttctgttaaaaattcaatctttagtttttgtagctcaattggagtttttttagttaggatttaactcttagcttgtttgttttcataggttgatcttatttcgatagattttacggacaagatgttattccgattaaagcatcccatggttaaagctgctattcaggtttgtgatttcactgttagaagaatctgtgtgtatcttattctttttatttgcttcaccttaatgaattttcttatctgcagcgagggatttactttgagattaagtactctgatatccttatggatgcacaaacgaggagacaagttatatcaaatgctaaggtgagattctgtggaaaattttattgtcaattagttgatcatgtgaaagttttatgagaacttgcttatactgtcttgtgatatggtgtatctagttactggtggattggactagggggaagaatctaattatatcaagtggtgctccttcagtcacagaacttagaggtccaaatgatgtcataaatctcatgttcttacttggactctctgctgaaagagctagagctgccatttcaaaaaattgtaggtatgtatcaaattcgtctagcaattgtgttatttgatgcggctaagcgtcattgagaatggattttaaattgctttcaggaatatgatagccaaggttttaaagaaaaaacggtttcacaaagaagctgtcagggttgaattactttctgctggtgatacttttagcctcgaacagcctctgtctgaagattgcatgaaatgggatcgcctttcgagcggtgaaggtgacatgcttttggatgatcttgcaaaggcttttgatgccacaaatgttgtggcgcacaaatcctcgaaggcgattgatttcacctctgttcttgatggcttgccaaaacatggtttccgggttaaggatattgtaggaactgaatcagtgactcagccttctgcagctaaggtgattgacactcaggtgcacagtagtaatcaagtttctgaactacgtatggccacagcttcatctgatgataaccttcgggaaattgaaaccataagccaaattgacatgctgatgtctgaagatgacaataaggtggaacctactacaaatgtcctcaaagaagaagcatttgccctaaggaaatgcagtgccagccatggccaggggattttggtgcaaaatcagacggctactccctttacactgacaagatgtacaaagtcagaagcagcgtcggatgttagcatgaatattgagtcgacttccgaaggtggatcaatgtcaccgtcaaaaagcgatcatgggatcccacaaagtcctgttgaagtgaataacatgggaaatgctgcttttgaagaagaagcctcagtggacgaaaacagcaaagaaagagctactactggtcatgctagtaatgatgagatgcatatcactgagtctggacaccacgcatccattgatgatgagaagcatatccctgagcaagaacacctcacatccattgctgatgagatgaaaattgattg

SEQ ID NO: 15371 - DNA, 3991 bp, Arabidopsis thaliana landsberg
ttttgtttcttgataatagttgaaattagaggaaagattcatgtctaatgattgactttcttggttgagttacactgtccattaattgacacgattattcagttgcagaaatggcgaaaaccacagaaagactattaactcaatacacttcaacatgccactgcttgttcttcctgagctgagtaagtttctgctcccagctttcgcctcgctcttcagcgactctcttaagcgtatcttgaatcccgggcatcattcctttaagtccgcaaaagtaaatatgagctccattgtccagaagtttgaagatttcatcgctgtattcttcaatcttgtcctgcacatacattttccctcctttcttgtttttctcttctctgctcagcgctttgtcgtacctgaaattttctggatagtccttgcggtacccggcaaattcttcatcatagagaagactgtctgagttagccacaccaaggaagagccaagcaagtccgtcaaacttgaaattgggaacattctccataaacatacgccgtaggtatcctctgtacggagcaactccggttccagtagcaatcattatgtgagtagctttcgggtcatcttcaggtaaaagcattacctttccagatggacctgtcaataatatcgaacattttagaccatacaaattcaacaaaaagaagaggttctatatctgcaaaacacataaacttaccggtgattttaactttatcgccgggtttggcattgcacaagaagttactgcatacaccagctttggaaggatcttcttttcctgtctccggatcatagtaaatagctcgacggacacatagactagctgttttgccatcaaaagaatctccataccgtgttgatgcaatcgaataaaggcgaacgttatgaggtgcaccaggtttcttgggattctcaccctacgagtcaagaatagagcacatataatcagatatgttaccaaatctgagagaccaaatcatttatcagcaaaaggcaatgcgttatgagcaatagagttaaaatcacttacaggaggaatgactccatagctttgtccttcccagtaaggaacattaccatcatgatcaataacaatgtggcaagtctctccaggtgcttgtggaccaacaattctctcaaccgaaacaatagttgcagtataaggctccttaggcctaaacaagtttaagggagtctctttgggatcttcaagttctagaggagtaaccaagactttggatttgcttgcttgctgaagtgacatgcatattgtggacctttttttcacacctaagcttctagatttcgaatctagtctcagcagaggaggaccccatgacttatcagtgaagcttatactttgaacctgaggtacaaaataattgagattcaatatcattgctcaagagttgcaaaatccagttttttgtaatcttctacttgtaaagactatacctttcaataccaaattcacaacaagtctacatcagaactaaacaacacagtaagaaaaccaaaagacaaaaactttgaggaccatgtaatcatctcaacgacaaagatcggtaatctagtgatctagatcgtttttgctcaccttaatcatagatcggctcgacccatcaattctagttggaagtgcaacggacatctaaaatcaaaaaccaaactttcattaaatccgaaacttaatctcaggaaccaaaaaggtttagaatagtaaaaatgaaaacctgagaaggagtagttgagagagccatagcaatggagaaaagagacgataattctccagatgaatattaataattgatctcacaatcgagaggaaaaaaatgatttgaggaacaaaagaaacagaggatgattctgggtttatagtaagaaggtgaggggaagaagaagatcctttcaaggcccagaagagacaacaacagagcagcccatactgactgcaaatttctcaactttttttttggctctcgagagatcttagtggacaaattgctttttgtctgtgttggatcttctttacttttcaccacgttctttgtattttacttgtatttggtacttggaggttacagtttccaaagccaaattcgttgttaatagtgagaaatttaacaagttgcaagagactgaattcagcaaatttcttctcagttctggaaaagtaaaatcgaatttgttttcagaaagaagcttcggttatgtggtggtaagccgaaacaataaccaaaaattaaatcgaattgaaccaaatcaattcaaaattaacgtcggttctcattcggtatacaaagaaatggaaaaccgaaccaagaaaccaaattggagttttctaaaagacaagaaaaccctcggtttaagctgaatttacagttttgtgacatcgtgatttattaaacgacgtcgttgtaacttgatgtaaaacgacgtcgttagttcagtgttcttcttccacagtcgagagtcgaaaaccctaatctctgtactcaagcaacattttcagacgaaagcaatcagaaactcaggtgaatcagaagcatgattcgagttacgaaaccaaaagcgatcatcgaatcactgagttaccatcttatccaaagatgctccgcaagtggaactcctaaaggaaaagcaaagctgaagacaggtcagccattgaagcgtaacaaactctccatcaagaaaggtggtggcggcggcggagcacctgttgaaggagaggaagcagttaacggaaaaggtagaatttccgatgagaagcagaaactctgcgagcaatgcttaatcgctccttgtcctgttcgctacttgaccccccaagagatcgagcgtgaggcgcaacgtgagaagctaggtttgattagtaaagagaagcaacgagatatggagatccagaagaaaggaggagctgcttcaatgggagtcaccgatgagccgatgcgaattgggacgccaggtttggattacatttcgttagggatttttgaagctgaggaattgcctaagtataagcttacggaagaagatggagagagacttgcgaaggagtatagtaaagtgttgatgagagagcatagagagcgtcgtgcagctgaaactgcgcttttgaatttgaagaaatctgctattgaggcattgccggagaatctgaagaaggcggcgttagagcctgatttgacaccgtttccggcgaatcgaggtatggctactcttacaccgcctattgaagggtatcttgagaaggttatggatgcagctaagaagagttcaagtaaagagaagttgagatgatttcgtttaaaaggttagagattttgtcttatctcttgcttttgctttggagatgagctttgaatgcttgtgtttcgaacaatggaatgattcaggatttaagaatgatggttagtagtttactgagtcttgggtttactttgttgtagaaagtgtctgaaataaagagaagttgagatgagtcaataaaggttagagatttttgtcttatgcttatcgttttctcttgtttctgatttggatatgagatttaacagtttgtttttcgaacaatggaatgattcagggtttaagattgatggttggtagtattgatctctgatgtcaaagctgtgttcttgggtttactttgttgtagaaaatatctcaaaactgatggttagctagatttcaggtagtatgatacttattggttagtttgagatcgagttatatgcatattagcaaataagtgaatgagaatcactcacttgtacatgagttagtgtttgcaatgttaaaatggaaacttttggaagcatgaccttcctctggaacttctctgcatataggctcgagtctttggattattatgtatcattttcgttttttttgcaggatatgttcttgtttagttattctttcacgctgtttgcatttttcttgtttcaagtcttcattttgtggt

SEQ ID NO: 15372 - DNA, 1824 bp, Arabidopsis thaliana landsberg
ttttaaaatgagtttaagtttaaatctatataacgtgaaaactatgccgagctttgaacaccagcttacggaccaacaacttaggacatgatgtctaagcgcgattagtttcgacgtttttaaaattgaacatttaaactaattcttaaaaagtaataatgaaattaacattggttttagttaaaaattattaattagtgaaaaaattatttaaatgttttagtgaaagttttaaattaattagttttagttttacttaaaatcatttttatagaaataaaaagaaagataagaatgaaaacgaataatgtaacttgttagatgtggtagcaaagaaggcccataaaaaaaccatttgaagacgcccacacttaaccaaacgtcccaacacttgcattgctctctctagccctcctgaatcagctgcttcaagcccaacttctttccttcttattgactttccttcttctctcggtcgttgactctcttcttcttcttcctcttcttgttcttattgatttcaattttctttgtgcaggttcaatgaaggatttcaacttcaacagtccagccatcgaaacattagccgccgtctacataatccaccggtgaaagtgtagtggtggagatcatgtgaaattagggtctgactgtagaagtagtcacaggatactgaattgcaaaagatagaatggcgataaatgtaagaaacgtgacgatcggtcttcagattacaagattaccgacagattatcacgaacctctcttcgctatcctctttttcctcgtagtctccggttaaagctttacggtggctagatcatcattatccggtgaacgagagagggttgacgtacggagatcatcattcaatcaataaaacgatgctttccacgccgatcaatggatgaaacgatgcgctctgatcaatctaactcttacggattgtcggatcatgttgcagagatgatgatcatcatcatcgaattagagagttttgattttatttctctcaaggaagaaagaattagaaaaagcgtgagagcgtatctataagcaaaagtgttaattaggtctaatcccaatcgatggaacacacaatagagccgttggagtcggttatatttctttattttaagacaaaaagattcaaaagaaaaaaaggaaattgtcatctcaatttcctattctttcaatgggctttattttcttatgaaaccaaaactatttgcttcttctcttcttgtctcgtcggcacttgaagattctgccattctttcttcccataaaaattggtcttaaccggtttccggtatggtacgttggggtggggtccgggtggcatggtctaggagtgtgatgctactgtatttttcatggcattattattacagaaccagacagaaaggcaaacatgtgatgattccacatagacccaaaagaaattttgttgtagccataggaagcattctaaaggacccatctatatgtctctccttttctcattaaccttttcaagattccctcaatacaataagagccaaaaagaaagcaggagatcaaacaaacggcaagctgtttcagagattctttgcaaaactgtatgcagtttgtgttcaggtccccccacccattgagatatccaaatctaaaagtttgaattgacgtataaagtaacttggcttgctctaaaacatctttctctgacttgacaatccaagagaactttgatgttctttcaagcaagagtgctatgttgtacacttttcggtggatatcgaatcataataaactttgcacactctctcatgtcacgggttcatg

SEQ ID NO: 15373 - DNA, 4251 bp, Arabidopsis thaliana landsberg
  unsure (1)..(4251): unsure at all n locations
tatataggccgattcattaaggtacaatttaaatcttacattttattccaatagttgacaatttttgttgtgtgttccaatatactttacaaacttttgatctgccatattattatattcgtttgaccttccgagctaatttatagattattgtattcaaatcataatatcgtaacacgatatctttcatctacaacaaacattgtgctaaccggcgcagcaaaacgagatttaaaaccaaacagtccaacttacggaaattaaataatatatggtcgcttattctaggtctttttacctaccaagtaccaacctacacaggttgaaagatatggcacgtgattagtaaataattttctctactgtagaaaattcaaaatgagctaattgtttcttgataagaagatttatcccaaaacctcattttagaaaacagaaaagttattacataaaaagatgtaatagatactgaagtatgccacatgctagccttgctggcagttatggactaaaggcaaacaattttgagagttttgttacctcacactgcgacaaaggagttataaaattgataattaaggattccgaacagagcatgtagtctaatagtggtttaaaatattaatgttgttgtgcatgtaaacatttttactcttagtacttagaacaccaatcaaattaaatcagtaaacacaatttgtaacgacaaacgaacaagtgaagcatatatagagtgattgattaccttcacagagtttcgaagacatacatgcttcttttatggaaatatgtctcgagagacgagaagcacatgtgcacattaacattgaaaatttgtcaagcttctgtcgaaattgcaatcgtttagtttgaagagatggattcgcaggattctaacatttgatacgatatgatttcagctaagcaattattagttttccgagcatatatagcagtttgcaaaactgagggcatattcttgttgtacaattttgcacacatccaacacaataagattacattagacaagtgaagaatagagcccatacgaactggcgaggaagccctgatcaccaatctcgagtcatagcacttcaaaaaccgttgcatcggtagaaagcagttgaatcttttaaatgtcgaaattatgagtgatcattatttttagttatcaaaaagtaattcagctaatcagcttacatacgttaaatcttacaaatgacattttcaacatatttttatctcttttttgtttattttagtccaattttgtgctannnnnnnnnnnnnnnnnnnnnnnnnnnnnnnnttcaccatttatactcaccagtcaccataaccagatctcaacatccacaacgacataaagaaagaaaaaagcagaaagatagcataaatcattcacacacaagtatcaaggtttgataaaaaaaaaagtgcatatagattgcattctttgaatatatgggtttatatggacggcacacatgtaaggtaacaacaatagtagatacaattgtctttatatacacgtacgtgtaagaatgaagtaaacgtgctccaactaccaaagcccacctatcacatttcactggatatttctttaccaaaagaagaaaaaaacaattcactatttttgtttcctaccaaacccgaaattattatgatttcgagatgggctgtctgttacattattgagatgatttcgagactaccaaagccattactgggcaggctctaaggactattatccatatccttaatcttctggggaatgtcagtaccaagaagattctggcctgaagcagtacaatatgctgtccacattttgaatagaagccatctgctgcacttggattgtttttgacgataaaagagatagattggaaatattgttaatggttgaaagttgatgacaaaatctctatatgaatttaggtctaagagagagttgaaattgaaatgtctgttctatttttttcctttcctttctcctttgttcatccgatttggttttgattagattggcatgtatcattcttgatagactctcattgtcaatggaaaagtaatctaatacaaaaagattggagggatgagccaaaaatcaataacaacatgttgcgatctattatgtgtttcaatgagaaaaatacttagattccatgagagttatatcaatctcactagtagaaaagacaagctatataaaataaaaacaaggaaggattcatgcatagatagaatcagcatataacaagttaaggccggcaccactactatgccagaggacagcaccggaccactcaatgttcgctgaaacctcccccatccctcgggtctatggcgtctgggtcagagaaagctcggcataccaaagctccaaaatgtgatcaggccgccgggcttcccagaagatggccaacctctgagcagagaaggcgcaaagtttaatgatattaaaagaagcacgtcaccaccagagttagagtgtcgctgctgcagatcttccaaacccttgacttccttccaaacagtttcctctggaaaacgccacagtattttcccggacataccacatcagaatataataatgcctcaaataaaacccaaacccaatcgtttttattttctgggttagacttgatccggttgtcataaagcaacaacgccttgttgagaagaaaaagatttgactattctcatccagcgcgtgaacataatcaaaccaacagaaaaaaaaatccaaaaatccaaaatacccgaatcgaaaatatccaaaatacttgaaacccccttgaaaccatccgaaaatatccaaactttttggttagaactaggcatgggcaaattaatcaaacccaatgtaccaaactgtagcgaacaaaaaaattgaagtataagattaataattatcgagatctatgttagctaaatttgaatccaatcaataacctaatatttcaatgtggcacacgagatttgaaatgtaaaatggtaccagttcataagcgtaagatattacgtatggatgcaaacgtcatggtgtgttcataatagaaacccttcgtaacaactaacaacgtcaagttgtttttttttttttattggtcaaaccgtaacaacatcaagattctcgtgaactttaaagatacaaaatgtttttttgtttttatcctttcatttgaaagatggaacgtgaaaacaagactttccccttttgcgctcttacataaacgataaacatgaatgcatataacaaacattaacatatgtatgtgatcattcagaacatagtcaccaaatacttgtaattaggatagtttaatgatctccccatactaatttaagatacatatctttcttagaatttgttttttattaaaaacgaatacattttttgtgtgttttatgtaatttatgataagtaaaacctaatttggccctcatcttaaatagaacccaattttaagagtcaacatatttttgtaaaattatataacagagtatataatatggttgataattcgagtttgctttgatctttttttttcttaagttattgaaagagatgtcagattccaattcgatatttcttttgttctttggtactaattttgatctttctgatagaacaaataatgctagatctatataatttatcaaaactgaatacaagtacttacaatacatttttctgcgatgagaaaataaaatacttgcattgtgttaattaattcgctctttttatgaaaacaaaacctcttattcttaaactggttgacccaaaaaaaaaagacttcttaaaacgattacaaaagaaaatcaagaacatgggtaaacaaaaagttctcaagaagaagtgttaagaacttaagctgtttgaggtgaacaatcatatgtgacatagattgctcaataaatttcccaaccgaagctctaatgtcacgagtgacagattgtttaaccgctaagccatctaaaactctatcatcatcatcattgtcttgatgatcttcttcttgttcttcttctttaaaatcatcagcaagcaaatggagcggaactacggattcttgaagctcccactcctcaatactaagtccccattcttgataatccactcccgccatcgctaaagcctccatcgaacccataaaattagaaagtgatcttaaaatgtagtttgctttgttaataaaatctaagaaccttttgagttctacttcttctctgatgagtaggtacgtg

SEQ ID NO: 15374 - DNA, 1466 bp, Arabidopsis thaliana landsberg
cattgttctctcctgtaatgcaactgcggatcatgccatcatctggattgaaagggaatcacagagagctctcgatgtgagtaccttgaaatgtgttttgctttttgtgactgcttcagcttttggagatggtgagttctgacaaacgcactttctttgtggtgaaattttttagttaatggtggaagaggaccaagttatgcagattccggtggagcagaaaattgtacgccagaaatcaattgttgaggatcatgacgaagaatacagagcggctataatgaaagcagcttctctgaacatccccatgtctccatcgccgtcttatggaacattccatgatacagaagaaggagaaagctctgcaggatcaggcatggaaggatccccttccgggtggtccttcaaaggaatgagaagaaaatgggatcaattcatagattgccattttcctgtaaatgacaacagtgaacatatgatcttcaaaaatcaggaatctcaagctttgttgtgtggtcaagaaacatgaaaatcttgttataggtgtaaatgtagaaaataggatatagaatcagagaagcaaagtagatgaaattcattattgagagatttaagaatttctttgttgttatagctctttttgtgtgtaacacagcctgtaatgttgctagcaatttcttctgaaatatcaatggacataccacttatattgttctatacactattcatcttacaacttacaagctcagtttacaatcttggttttgattccctccaacttagctatgctgaattggtaaacccaagccaagacgttcttattatatgtaaccaggcgctaataagtgtttttagtagcatggtggaggactatatatattcactcggggttggtctcttgtgtccctggagccaaaccaagatccggaacggcttcacctgcaagtgaaagtaaccccaggttataaaaccttgagaagacactaaattccactaggagaatatgaaacggaagctataccatgcattcgtttgaggaatctctcaaactctttgaagttttgagactccatcagagttgggttaagcctcaggtaagtgaaacatgaaaggtggcgaccatcaggatcggtaaggggctttgcgttttcaagtatcttgttgtaaccttctctgtcataacaaggaagagcattttcactagcaacaggtatactagcatcccaagcagcattcagcacctgaaaaaaattaacaatggaaagaaaaatttggcaagttaagattttggcctaaacaaattaaagccaatcacttgtataagttgaagaagttttgacctgccaaactagaccttctggatctgccagagcctctgggaaatcctcatgttgatcaagtgtccgtaactccacacatgtgaagttgagagcagcatcatgtttcttaaacattgcagctattgg

SEQ ID NO: 15375 - DNA, 2659 bp, Arabidopsis thaliana landsberg
tctacccatgacgctgtttcttcctctacatctacttcaattgatgagaagcacatcagtcctctccaggtaactcaaacccttgttcaaccttctcttgtgcatgcatcccatcttcatttacccatatatctctctactttctcctttcaggggcatttatcacaacctccaaccccagcgttgtcagaagcttctgttggtggtacatcagctgtcccacccctagccaaccctgttaatagggacgcatctgtaaccaagtctgaaccgtttattctaagcgcagaagcagatgacacctgtgtgacttctgctttggtatgttaatcccaccatctaaatgacgtttgcttatgcatattttccaagccacatccaatggccttatctctttacattatcgcttatggttccaggttaccccagctgtggactcatcatgcacgcaagtctgtgttctcccacccattggcagctcttcctcgcaaactacgcctccagaccggcataaaatgactcttcgcaataaaaactctctgcatcgtaagtgtgaccccaggaaagaagatcttgtgcctacccccactcgcttacgtgtcacttgacaatcagctctggctggcacaccttttccatcttccaagcaaaccaaccctggacgccctattcctcttctctctactgttgctgcctctctcacagctcctgaccagaaaaaagttgccaagttaaaagcacagcttgcaaaagcaaaaactaggtcactttcccttcatttttacttctctcaccatattctgtctttcgtactaatccattttgcattgttttagtgagtacatgattctcggacaaccagttcgtccgtcctttttcactgagattttacaacctcaacaatggctttctactccggtttgtttctccctatacttctttccccccatctcattcttgcttttacagaaaacagctaactcttcccaaatctatgtactgcagcatattgatgtactcttagctttcatttggggaaaacatgagacctttttccggcagcagcggataacaattcttgattcccttttcacctctataattgccagcagctatgccaccttcaacagatgtgctaatcctttggactttgtctggcaccggttgcttatcttgtctataacaggttcactaccaggtaggcaacccccacagcgttggcttgaagatgttgacacagtctacattccaatgaattggggcagaaagcattgggttactctttctctggatcttcgggttgggcacatttccatacttgacccatttcctgactgcaattcagctcgtaaagttctttcttacatgtctcctgttgcgaagactttgcctgacttggtgcgttctgtttttggtaaaagcccatcccagtggccagaatctggtttcacctttgcgagacttgaggggttagcacagaataaacgtggaggcgactgtggtgccatctgtgtcaagttcctggagctgcattcccatgcactacaagaccaactcattgctcttactgatgcagaagttaataatctccgttgtaactacgcgcttgccctatacgaagagtttgttggaaagctttagtctgaatctcattcgtcatgttatctacccatcaaactcaaacttgttttttcatttaacactttacatgaatttataacttactcatgcattgttcatactgcaacattccacacttgttgtcattttaattcccattttaaaaataagtctacatttgtaaactctcttactttatattgaagccatttgagatttactcaactatcttctctcttgcaaatacaggaatagatacctgcctttatgccccataattgtctccaaccaacttctcttgtttcaccctatataaatcccttctgtcaccaatatacttacaaaaaaaaaacatcatggaaagccttgacgtcaacattgctctcgacatcgcagcacgtgttggccgtgattctgttgctgatcttactgggatgctatcaacctcaacgtattatcgctttctctcagtccaccctgatgttgttaagcatgtttctctgcaacctttgctcgaaaatgctgctcgttgcaatgttatctccaccgctaggcctatctttttccgatgcctccaagcttctaatccttcagctatctaccttgagagcctccgcttagctgcaagcgagggtagagtagaggaagggtttcacatgttgcggtttttacaagcagaacatccaatgagcttcccacctgctgctatgttcacgttgtctctatttcaaattgttttgggtttgtatgaagatggcatatcatcttcacaccgatttgttgatttcgtgggctcttacgctgcagctgatattgtagcaacatctgtttatcgtcacatactccaaattggccgtcttaagattcgatctaatagcgacacttggcggtttgatgctattcctgcatgtattgttgacggttgtgctatcaataatcgtcgtatgacttgttttttttactgtacttaatcaatgacctaatcttggcttgaataatactgaatctgcatctttttttttccccattttcaagtttt

SEQ ID NO: 15376 - DNA, 5450 bp, Arabidopsis thaliana landsberg
gaggaaaaaagaggtttccaatttttaagcccaccaccaaagtggaccaactaacccctactcagtagcgtatatccatttccacccatacacaattatagtagtctaccttttttctacacatatctggattccagtttttaagtaggattattattggttggtaaaagatgcaaagaatatgagaaaaggtctaattgcgtgctccataaacccttattctagttcaaccataattgtcagtcaatagaagcaagataatttgaacgtccaagtcatcatcatctttttttttctttctgaaatttcgttttacaataaacaaagaaaggttccgagtcctcaagcatctctcacgtcggagcaagttgccatgcactctccaaaataaaataaaaaacagacaaagactttagacttgtgacttttcgacctcattatgtccttacttacttcatcttctattggccacccacaaacagtagtttccactttcttcctcaataagttccatttttggattctttcctatttttacacaaatttgttgtattctaaaaagttatatattctatttgctgggctttagatatgggctggctctggatatgtgtgtaatggatacatattagtaaatagttaagtccaaaaaagaaattataaaccccctatgtagtttgaaaactggatcatgtgacaaaacgagcagggaaggcccataataaggcctaataagtaaggtaagcccacagagaaatatacttacgggcttggatttccgaaccttcctaaaaagtgggacctacgcggctgagaagaaagacgaaggccatatcagaccggcgataactgaaaagtcaaaagtcaaaattcaagaggaagaggagtttctaatcatgtctctctctgttttcttcttattcttctatcaaaccgtcaagttgggaaacaaaacaaaactcgcaagtttaacaacgcgtcttctacctcctcctcatcggactatttatctatagtcttcgttagatcaattcctctgttttactcctaagtttcgagatccacatttctttttaacctcatctcatctcttagtcgagatcttcactttctgatgacaatagggtcgtttttctcttctctcttattctggcgcaattctcaggtaacctcaatcgactattctctgttctactccttttttctttatcattttaaaaatcctaacattgaaaataaagtagttaaatagagtcaacgaaaacattgttaatgaaacagtggtgtgcttagcataacgaatcagacagacaaaaagtgtctggatccgtagagcaaagtgttgtcgtgtctttgacaaagttctttgtttgcctaaaccaatttgttcatccgatagaatgaattgcattccgttgttactatcatccaaaccggagatgtcaagccctaaccctcaagtagtatttcttagagagccatgaattgtttgtttagatccaattagaagaaggtttagttgactgtgatgattgtttgtgtttttggtggcaggaccaggaggcgcagagagggaggatgcaggagatagatcttagtgttcacactataaagtcccatggaggaagagtcgcttctaaacacaagcacgattggatcatactcgtcatcttgattgccatcgagataggcttgaacctcatctctcctttctaccgctacgtgggaaaagacatgatgactgacctcaagtaccctttcaaggacaacaccgtacctatctggtctgtccctgtgtacgctgtgcttcttcccatcatagtgttcgtctgcttctacctgaagaggacatgtgtgtacgatctgcaccacagcatcctcgggctgctcttcgccgtcttgataactggtgtcatcactgactccatcaaggtagccaccggacgccctcgtcctaacttctactggcgctgcttccccgacggcaaagagctgtatgatgcgttgggaggtgtggtatgccacggcaaggcagctgaggtcaaggaaggccacaagagcttcccgagcggacacacttcctggtcctttgcggggcttacattcctttccctttacctctctggcaaaatcaaggccttcaacaatgaaggacatgtggctaaactctgcctcgtgatcttccctctgcttgccgcttgtcttgtggggatatctcgtgtggatgactactggcaccactggcaagatgtcttcgcaggagctctcattggcacccttgtagccgccttctgctaccgtcagttctaccccaacccttaccacgaagaaggatggggtccctacgcctatttcaaggcagctcaagaacgaggagtccctgtgacctcctcccaaaacggagatgccttgagggctatgtctctgcagatggattcaacatctctcgaaaacatggaatctggcacttccaccgctcccagatgatcctcctctcttattatttgattcattatttggtttttcattttgatttggccgtcgtcgtgagattgtgaatggtgtagctacatactgtatgtgtattcaaaactctacttgtaccattacttttttgtaaatccactcttcatgaaattgacgtttttctggtgtccgagaggcttgggtcgctcgaataatctcgtccaatagactaatacggctctagtgaacacggtatttacatgtttgtgatgtaaactgaaatcagttatttctttattcgtaatcattcttgggttaacattttctcttataatctgatggttgaagatggcaaagccattgttagcatagccatagctggttcaatcatccacaacactaaattactcgagctctccacatgcgtaatctctctttctctctatttctcccttcgtttctctcattcttcttcttcttttaatttctgggtagctattattttagtgtagaacaaagtttgacacttgtgcttacgcacatgcgctgccaactatgctgcaggtattaaatcagttctgaaaatattgaagcacaactggaaaccgtttcttttgtgcactcaagatattaaaatggttctctgtttctgaaaatattggaacagaactgaaaactgtgtttatgacatgctagcgtattgttatattgtgttttcttgagcaaatgatgatactagcaattcaaatctcatctcttctctttgctattatgaatttcatgcttgtattggaagacattattttgcaaacatttgattttggtttactcaaggacccattgtttcttaaccattggagtagaaatttgttaaagactcttattagtttcttaacttacaaaaagcaaaattttaataaaaaaaataaagttaaggatcatggttaaggacctaaccaatggggcatggtcttagcttctgatctcactggtctttgttcgattgaatcaatccaagtttcgtaagtggtgatggtaggtaatcggagcagcagcgcatgtaaccatcggcagttgtcgaaagcttgtatagtcacatacctccctcctcgtctcttctcagtgtcgccaggtaaatcttctcaatcgtttcttttgtatattactcatagagtcgtgcgctgtctctccctgagaaggttcaatcgatttcttccgattgatgattgatgtatcataatcagaacaatggttatatttctgaattggatgtgtctctgaaattatagcggatgttgtatgtatgggaacacaagagaccaatgatgatgctaatgtttgattgtcatcattggttaagtgaactaatcaagcagaaccatgatttgttttactttgttggtgctagtggtttggggctatctctgtttctaattcgtatatatgttatggaggttaagaggactcttcaagctttatgggcacttgggtttcttggttctttggctacttgtgcagcccttgctagaccagccggtgataacttggttcattatgtcgttgatcatccatctgctgtttggtttgttggtcccctttttcaaagaaggtaaatatcttgcttctgcataaggcttcagataatgatttattgttcttaatcaatgagcatatatgatttatgtttgtggtctacgaaattagtgtatttttagatgtgttatgtaatgttgaacaacatcactagatttgttttgtgtgtctcatgttagaggatttttggcttcggtttgtttgtttctttcttctgaaacacttttgtgtcaagtctttaatcttctctgtctctctaatgttatgaagaaggagagttcaaagattgtggttatataatgttttagcattacgagtggttaacaagagttagttaatgtgttataaattctgttgcacggatgagagtctgacaaaatggaattcaaatcagagaaaccaggttcagtttttcctctcaatattgcatcaaatcttttttagtttgttttggatagcaaatctttgattgttagtctcgagactaacatgattttgtggatcgtggtaacataaccacaaagttgtctattttatgatttgaacattctacacagtcatcctcatcagtggcaaattaaccaggtttgtgtatcaaagagtaggccatgttctgagtatcttcaagaagaggatgatgtttttttgtatagtttttgtctttgatatgttttcaaatgaatcttgtatactttgtcatatttattgtcatgaatctttgttattcaaaatgtgtttatcaaaattgtatcaaattttttgtatagtttgtcttctctatctttcttttcaagcaatctaaactcaaataccaaaatattttttcaaatttgtctttcttaagaattcctactattggacatgaatatttttgagagtccctaagctagtccttagctttatatttgtcaaaatttatattagaaaattcttaaggattccttaaggatcttaaccattggggttgcttattagtttttttatattacttgaattacatatttatttagtttaaagaataaataataataaaaagacagtttggaggggtatgtaaaaagtaatataacagaaaaataaatatcttgtctgaatcagagagagagctctcaacaaccaaagctttggactctcaggccaggaagactatgggattgggcggcgatcaatcctttattcccgtcatggattccggccaagtccgcctcaaggagctcggctacaagcaagagctcaagcgcgatctctcgtctgtctccgccactctttcctttttcttctttgatttgtgttagctaaacaattgttagatttcagggtcttctccaacttcgccatatcaataaacttatattatagatatagataatcacatgcacgtttaactccag

SEQ ID NO: 15377 - DNA, 2688 bp, Arabidopsis thaliana landsberg
  unsure (1)..(2688): unsure at all n locations
tcttgcggtatactgcaggttaaaattataaataagcagattaccatcacgatgtctgtaccttctcacatacacacctatcaaaaacttaaaacctttcaaaacctcttggtatattcaaattaggattcttcattcatggaatcattattccaagggttttgggatgtcttatgaaatgatttggcagaaaaggatgtaaaataaaaagtagtcagcaaaacatatgtttttttgggagtttttagataattaaatcagagattaggactgcgcatatgagtaacccatttgagttcgggtagaacctgttcgggtttgggattaatgggtatatgatttactacccaatagaataattctaaatatttggttctggttcgggtcggatccatttgggtttgagtcagtttggataaaaagtttcaggccctaaaaatacccaaaaaaatagaaacgggtattttgtatgtagatagcgggtctccaaacaaaataacttttaattttgttaagttttaataaatttaattatatttgaatatattttactaaattttgacaaacataacaaataatttttgaatagtttagttgttttggatatttaggtccaaaattaattgacatatttagatttataattataatcttagataattagattatattacgattaaatataattaatattttggatattaaattaatgtttctttgagtacctttttgggtaacgggtaatttccggaccaatcggatatccacgggtttactaaaactctacccaataaggaaattttctaaaattctaacctgctctaacccggttttttggttcgggtattgggttggttatcgggtccgttttttcgtcagccctatcaaagataatctaatatagggcccaattaggtccacaaatgtaaccaaaatactatatatagactaattctaagttaggccaaaaattagatcctctaatacaaaggaaacatgtttcttaccaaaacaacttgtatacaaattttacacatttacttaaaactacatatgttgtatttattataaaaataacatttttaaacaaagttaatccaatacagcattatatgcaaatagtaaaaacattgaaaaatattatggcatcacttttatactatactattttttatgtaattcaaacaaagtatacaatgtaatttatataaaatattaatgtccgtggtgtatagcacgggttatatctagttttatgtaatttctgatctatcaagtagttaagagtgaataaactatatacagttgcttcatacttttttttatactatatgtataaaatcagaaaagctagtataggttaagatacgtttgctattgttgtgcacgtaaataatgttatcgtccccttttttttcccgccagagatggtaatgtggtaaatggtcagatatgggccgttaaagggctttaataggcgttaaattgttcaaaccataatgcggcccaataaaattgccgcgaagccgatggtttaaaacggtagccgaagaaaaccgggcggcgaaaaaattctgttccattgctatttcccgctacttccatttttccctctttgtttactttttttttttttttcatttatttttcttatctcattttcctcttaaaaaccatgagattgattcttcacttcgattccattggatctcaatctcagcatcgatctcgatctcccgccttttttctgcctccttatgataacctacaatgcctgcaatcgccggacctagttcttcccctcagagacatgtcgcgggttctagatcggagagagtcggaggtgttagatccaaaaaaaacaacgcttctcggaaacggaagttgagatccgattcggctgcggaggtttcagttactgtggtgttgcctgtgaattcgatatggacacggatgaaatggaaatcgcctcgtcgatgtgctgtttcaatccctaagacctctgatgaggtaagctccttgttcttagtttaattgtttggcttagtttattcgagtgagagtatcaatgtgattgtagttctgattgcaggagattaaggaagattctaatgaaaaattggaaaatccagtgatatctgtttgtttagaggttaaatcaaagtggaaccctaaaggtatgtatatatgatgagctttttgattctaatgctcttagttagtttgattgtatgattgatgtatcttgaatggatacagatgatgaacaaatgaaagctgtgaaggaggcattacatgtatctaaggcaccgtcaactgttgtttgtcgtgaggatgagcaaagacgggttttcgagtttgttaaaggttgtatggagcagaagaaggctggtagtttgtatatatgtgggtgtcctggaactggaaagtcactatccatggagaaagtaagactacaagctgaagaatgggcaaagcaggtaaccaatctttgtgcatgtttcataaattgtgattagtttgaatctttcaatagaaggattgatctttcatgaattcttacaggcaggtttgcattgtcctgaaacagtgtctgttaattgcacatcnctgacaaaaaatncagataaattctccaaggtaagaccttatccagtcgaaaattactggaagttatggtatcatcat

SEQ ID NO: 15378 - DNA, 5605 bp, Arabidopsis thaliana landsberg
gcatgagtgggaggtttaatcagaaagtttgttgcatgagagctccaccaatttgtttttttgtcggacaatatcatcaatctgaaatcgggaaatatgtgtttatctatgcggggaatatacatttcattctttgaaagtatgtttctaactcttttggattgaaatgtatattggaaatacttattcaatcaaatgtgacaaatactcctggctactatgaatattggttactatatctttatatatagttttttttttttttgaaattcaggaggttctgggccgaagcccgtaattcccccaggcccgaaatcacagcatgtaatattaattttgtcccaaacatcatatatatagctattaactaatctatatatacatttttgcagccattttgtaaaataaatcctggagttggaacttatttacaatggctgccattgacttttaattattgtttttttcagcaataaactgattaacaaacgaaaaacattccaaatatatttcaatctcatatatcacgcagatttttccaaaatttgaactagatttcggcaactatttaaaacaaaaaagtttaacaaccgaaaagacaattgcaatcccttaaaatgagcaaaacgcaactaaatacatttcttatcaattctctaaatcttatttctccaaaatttgaactagatttcgacaactatttaaaacaaaattttgtttgacaaactaaaacacaattgcaatcccgtaaaatatttatttcaattataaatttaaattagcggggtaccgcgggttttttaacaggacgggtttggtggaacgggtttggaaggacgttacttaataacaattgtaaactataaaacaaaaatattttataaatagatagatagaatttgcaaaattttataaatactaactttaaaaaataaattgtccctgcggtataccgcgggttaaaatctagtttagtaatatattataatacctaaatttttatttttttattttcatatgttgcttttttcaaaagtttattttctcttcttgtcacatatattgtgtttttctcctttttatgaatatcttagtatagaaaatgttatatttttaaaatgttaattataatgtgatggctaaaagttttaattagtgagatggtcgttaaaatctatcgtagtttataagataaaatctttattcaaattaaacactaaacaaaaaaattcaagaggacgaactattttacatgcacaagcctaatgttgtaaaacggctcttgggcccaggcccaggaccagaccagcctatatttttgtccctagttcttcttcttcctcgacggttagctttttttaagggttcaggttctctagcgatctgtcaactttttccgattgcaatctctggttatgttaatgagagagcggattcgcgattctctgcctcaacgattgtcgtcaccttctccgacgagtgaccgtgacgggaacgagtcgagcatgattaaactcggcgatgtttcaagccgttccgataaaatcgatatggtttctcacagagtcgacgaacagaaacacgatattgacggaattccggcagattctgatctgtacgatgtagagattcaaagagcactgaattttctaataaggaccgacgagaagaagaagagagagacgatgaacgttatacgaaacattatcatcttcaggaagattccggcaaacgttatccggaatcatcgagattcatcacatcgcatgatcatccatcgagattgagcgacgaacctaagccctctagattcatcacatcgcatgatgatgagtattctccatctcatgggaagattaatgtgttgctaaggaacgataaaactaaacgattggaatcgatttctcgtgagtgtagtgattcatctcgtcatagtgaagatggtagagagagagatacttatagatatgaatcatcccctctgtcacaagttgggtctagtgttgctgatttccaagatgaaagctctaggcttgtaagttcagattctagatctttcggttgtgtgaatgattccgatgagagaagaagacatgattatgatgggaatctttgtgtaccacaggttctacgtactagacgtgtcgatgattatgttggtagaaactcaccaagggatcaacaagttagagatttaagtcgtggagaccatgattcaccagttgtgagcaggtgtgtcaaagagatagtggatgaagctcgggataattatcatataggctctgatatagcaatgagagagtttcccagtgttaggcatgaggtcaataatgtggctagagagaatgatctttttatgcagaggagaggatctttatcaaaatcccatgtctgtggttcaaatatagctgatgttgatgcggccgatacccatcttgagtttagcaggaaagagaggatggctgaccattatgagtctgtgaaggaagattatccttttgtggagttgggatcaagagtggtggatgaacgagatgatcactacaggaacttccgtaacgaagaaagaaaggttgtttatttggataacaaatgtcaagtactgagaaaggattatctatatgatggtgttgacagtaagaagaatcttgatttcagtgaaccatatgctgtagtacatcgagatgataaagcttcacagagcataacacgttgcttaaataaagaaagggaagcatatttggataatgagagaaatgctgttttttcagatgataaaagacaggaactgagaaacgagtatcaccctggcaatgatggtaggatacattctgatgtagatatggcagatattgtggtagatcaggatggaagaggagtgcagcttcaacgacgatgcttaaacaaaggaaaggcagcatacttggataatgaaaggaaggatgtttatctgaattacaaaatccaacaactggagaaagattatgactctcgctctgatgctaagatttatcctgatgatgtcaacagattagatattctagcagactgggaacgggaaaattccagaggtctaaggtatagaggagggtccttaaatgatagaagggaagcttacttgcaatgtgaaagccagcaactcctaaatgattatgaaactaactcctatggcataatgcatcccgatgtcaacaaatcagatactctggaagaccgggaagattccagaggtctaaggtatagaggagggtccttgaattataaaaaggaagcatacatgcaatgtgaaagacagagactcctaaatgattatgaaactaactcctatggcatgatgcatcccgatgtcaacaaatcagatactctggaagaccgggaagattccagaggtctaaggtatagaggagtttccttgaattataaaaaggaagcatacatgcaatgtgaaagacagagactcctaaatgattatgaaactaactcctatggcatgatgcatcccgatgtcaacaaatcagatactctggtagaccatgaagatggcagaggtcggaggtatagaggagtgtccttgaatgataaaaaggaagcatacttgcaatgtgaaaaccagcaactcctaaacgattatgaaactgactcttatgtcatgatgcctcctgatgtcaacagatcagatattctagtagaccatgaagatgcaagaggtctaaggtatagaggagtatccttaaatgatcgaaaggaagcatattttcaaagtgaaagccagcaactcctaaaagatcatgaaactaactcttttggcatgatgcatcccagtctcaataaatcagatattcttgtaaacggggaagaagccagagctcttgagcgtagaagaggatccttcgatgatggagaggaatcatacatggattataaaaggggggatgcatatctgcattacgaaagccaacaacttaagaaagatcatgactatggcattgatgacaggatatatcgtgatgtcaactcgtcagatattatagtagaccatggagatgccaaggcgctagagcttaggagagtagccttcattgatagaaatgaagcgtatttggataatgaaagcaaggatgtttatcagcattacaataaacaacaactgaagtactacgactctggcattgatgagaggatgtatcctgctgtcaccaaagcagagattgtggaccgaggaggtgctagagctctagagcgtaaaggaatgtcctcgaatgacggaagggaagcctatttgccctatgaaagccagcaactcctaagagatcatgaaattgattcgtatggggtgatgcatcctgatgtcagtagatcatcagctggcaagcaagatgaggaagctcttcgaggcaggagatatctttttgatgaccgagatcaagtctacttggatgatgagcgtttgcaacgacgtaatggtggtgatgttaaagtttatgccaatatgagatatcaagatggtagacaagaggtttatcattcgaatgattcaattttgcgtacaagagatgattatggtcttagagacaacgcaagtgaggttatgcatgagaatatgccttatgattacaactacagggatgctaagcaatcaagaatgtcttatgagaaggcagatagtaaaaggttccgtgaacatgaagtagcatatgattacagagacaagctagggaactatgcagtggatggaggaataagcagagaacaattccgatactcagctgatgaaaggaattctggtaatgttgatcacacatcaactcgacgccgtcgattatctgcaaaggagcggttaggtgggcgtgttgaagaagattcacgtgttcatgtgaaacatagactgcatcaggttagaaacccaaacctaaaaggtaagtcccataagaggtacctctcctgaggtcatcatttctctcaacattgttgattcctccaaacaagattgagagagaaaagctcctaggttttcaaaggatgggtgtgaaaacgaaggatcctaaagttgtaatctcggctcttttttggtctgaaaaaggttagaaacagattcaaggattgaagttttttggcaatggaggatattatcttggttagtagatatgctttcttttggcgttgaacttgactttaaaatgttgagatttttgtctgtcttttagattgtttggtcggtggtttgtatcgacctatcaatcaagtagacagtggttacgagacgttggtcttttttggtctctggtagtgacattgacatcggagatcaacaagtaaataactcaacaagtttatataatctaacaacttcttactattataatctcgaaattggttttctttctcattttgattgtgatcattccttggtcgaatttgattcagtttacatgttttgaaattgaagatgtatactaaaccagacaagagaaagaagaagatataactaaatcgattgatttatatacacagtatcaaattcaatttcgattcggttcaaatgatggaaagctaccggtctggtattataaaaccatgagtcaaaaccgcttttttcaaatcactt

SEQ ID NO: 15379 - DNA, 1873 bp, Arabidopsis thaliana landsberg
ttgcaacttcatgtttagtccattctcaatactgcatatgtgtcttgctttgaacaagactactttcaatatattagtttacataagtgaagtaaagatcactttttcacttgtaattagtttttttatatgtattgtctggaacttcacggctgcaacgatggtatacgagaaatatatagttagataattgactaataatagaatcataaaatttaaaaaataacatgataagaaaaagacttaccagaagctgcctacccattcttcaaaaacatcccatttagcttcatgtacgtgcaccaaaaaccgcatctgggtcattcttccccgagtctggtttgtaaccccagtcgaaatcgaaagagttttttgtttggctctgtgattgatcaaatccgggtacctgtgttgtttgagaaacatgacccatttctttccaaagaaattctagtgagcctaaattaaggtcaatgtcaagttcaccctgactagtgtgatatttatcaaacaaagcatttatctcctgtcaatacaacaaagacagtgtaaaaatcataggacatgaactttacaaactcttaaaatggcaatagatatcaaggattagggttctttggacatcctggctgaagcttctctggctgcttttcactaaagtagggtctctgtgggtgtcttggattaggctgaatcttattggacatcgtaacttctgggatttgaatccctacaatgctgggagctggatttggaagcggctgtgtaagctgcgtagtctggcgagacctttcttagtttgtgaagtgggatcagggattacggctagtttctggcacgacaattggactggtttgggccctcttttagaccttacgggacctttgggtcctcaggtgataggtctcccgaaaaaggcggtggttcgagacgcaatctcgggtgctgggtggagggttatgagttctagaagtcgtaatcccatcatctccttgatcaaaaacgccctgcctagttgcaatgatagcatttcctcagaggttgatgatgtgtacctttggaagatggatcacagacctccatctctctccttctcctctgctttgacttggcaagcgcttcacccttcgggtcatcctgttgtgtggcataagtcggtttgatttaagaaccatattccaaagcacgctttcattgcttgggttactgcttggaatcggctccatactagagatcgcatgaggaggtggggcctctctattcctccggattgtgttctttgctctggaaatgctgagtcgagagagcacttgttctttagttgcggtgtcagtagtgcggtttggggtcacttcatgtttagaaatagtctctcgcctcctcttctcttcatggactgcttcacttgggtctcttctccttctcgtgatccaaacatttctctcatcatcaagcttgtgtttcaagcttctatctacctcttgtggaaagagcgcaaccgtagactgcatgatctcaccgcccgctcttctactgccatccttaaggaaatcaaggtaatccttagagctaagcttgatcctctttctagaagttctgaatttgaagctcccgccaagtctctcctttcaacttggttccggttcttcaactaaggcatctaaggtaacttcttcctcctttgggttccttttctctgttcggccctctggctcctttttgggcctctaggtttgttcttctggcctgcgtgccattttgggccttcgggccgtgtatattttctggcctgcgtgcctagtttgggactttatgtcttgtatgttatgctttttctaatggaaattaaaattaaaaaaaaaaaaaaagtgag

SEQ ID NO: 15380 - DNA, 2811 bp, Arabidopsis thaliana landsberg
acatgagtttggaagaaacggtgacatatctggaggacaatcacaagattagtcaccatctcaccataacaagtttgtattttataatctcagctttgatgtgattttgtgcttgtttataaagaatttgatttttgtttcttttattagtatgggagcagcttcagaaagagagtccagagtttttcaagaagtactacttccactgtgaattagcgcgtcagatagaaatgtttaacatttttcttggaaagcaagttagtctgatggtcgagaatggagatcttgatattggtactgcaccatgtacgtataacacaaggactaaaatcttcttatggattatttactgcccgattttatgaactgcttcagttatttttttgtgtctttatgtatctacagtcaagaattttctcggtcaagatcctgaaggagctcatctcttggtgaaactagcgaatacaccttgtaaatctctctactgatatctctaaagttcaataatgtttttgaaaattgggtttgttttgtttgataactctttgcattatgtagttgataggtcagagatgagtccttcaagcttggcaacgttggcattggatgatacacctggtctaacaggtaaagtcataaatacacatatggtactagattcatgctcgatttcttgcacttttgacatctaagaatttccttgtgtttctctcctttgtagtaaacaagttgcagattcctaatgatcagcaaaatcaatttcattcttatcaatggtctactacaactaatcatataccttgtaaagaacagactcaaacctttctctcttctgaatattgagtttgttttgtttgatatctattgcaatgtacagtaggtcatgattgcagctggcaaaacttggtttctttcacttttgacttctaaagcttcctttggtttctctatcttgtagtaaaccagttgccgattccaaatggtcaacaaaatcatcttcatcaaaaccaatggtctacacgaaatcatcaagcttgtaaagaagagattcaatctttctctatcatttgtttaacacttttacttgagcattttttaagaatggctcaactttcattctccataggtactcttggagctcctaccgttcaaccagcagctaatgatcaaacctttttctccataggtaccaatctgggagctcctaccgctccaccaggagctaatgatcactggtttccttatagtgatcctacgtgtaaagaagactcagtctttctctcttcatctatcatttgtttaacacttctacttgagcattttaatgaattacactactttctttctccataggtaccaattctggagcttctgccgttccaccagcagataatggtcaatggttgccatatacagatcctacgtgtaaagaaaacactcaacctttatccctcatagtttaaacccttttacattgaatcactctttctttcttttttctccatagataactatcttgttgtatattcaaccggtgcaccagcagccactgctcaatggccaacatctaatgatttccttcccatagatactggagctccaacttttgcaaaagcacctactgcggcatttgaccattttgcaaatggttttggaaaagatattaacaatagcagcccaaatttccagccgatggatccttcaacagcaaaactactaacactactcgaccacctgcaacaagacccatatggataataccaactgccactgcaggttctaaaaaaaccctcactagaagagctgcgaaaacttccatatgaagtagacaacgtgctgcgatatgatggaaacaacaacgggctactaatgaaacccaaaaagccgccacaagacctatatggacaatgccaaccgcaaccgcagatccaacagaaccttcaatatgaagcaaacaacaacgggttgcaatatgatggacacaacaacgggctgcaaggagtactaacgcaactcgagaagccactacaagacctatatggagaatgccaacagaatctctcagtagaagatctactaactcttgtatatgaagcaaacaacaacggactgctatgagtaataccgcagcaacatcgttatcatcaggaaaaagagacaatgcagacacaaggagatccactgaatcgaatacctatttaatcagaagcttcaaaccattcagatagtggtaagtagcaacactacaaatgtggtttcatacttgtatatgctttaggcctagtaagaaaataaaccggaatcagaaatggcctgaaaaccggttcgatttggttttgggttatggccaatatgcatgacggttcttgcacaatcatacccgtggatatcatatcggttctgtgtactacctaggacccaagcggatatgagaaagtattctatatttggctagatgtgaaagctctcagatttggccagtgaaaatgtcaagaacaatcatagcatatcccttgacgcaatgtgaatgaatcaaatgaacatttcttactaagtaacataataactactaaaacacaaacacacaccaaagatgcagcagaaagttccactttttttcataaacaaacagagcaagtacacttgggagatacaaagagacatggatctaatctactatatcctaatcattctggtttgagcccaattcaagccttaagtctatcaaccagcgaattcactatataagagacagcactataatcaaatcaatgttcataaacataataccttaagaaaggccaagacttt

SEQ ID NO: 15381 - DNA, 2252 bp, Arabidopsis thaliana landsberg
  unsure (1)..(2252): unsure at all n locations
tcaactcaactcatagtaggaacccaactggatcgatcagtttgtggttacctgaatgcatcaatgtacgtggatattgtcttgacatcaatgccgcattctcttgcgcgcttctccaagagttctgggtcatggatacgttgagctcttgacatgatctcctctcctataagacagaaagctcaaatttagtattattaaatcaagtgtagaagtaacataattgggtgacaaactcatagatgcacgcacctctgatgaagacatcgaacgagttgctgtagttagaatcattttcatagggcatagtgtagaacggtctgacagccgatggatagcgatgcagcannnnnnnnnnnnnnnnnnnnnnnnnnnnnnnnnnnnggccaagtttcctctcagattctgtatttagatcaccgagagggtcaacctcctcgccagcttcctgtcaagatgacccaactattatttattcatagtcttaactcatcaagttggatgcaaaaaaaatcctgtcataccttaagcatttgaatcccttctgcaaaggttagcctcaatgtttgcggaagaaactacaagtttagtgccaatcatcagtatccaacacaaaagaaactcagttttttcctttcctaaaaatccaaaagatagattaccttcaaagattgaaaagggtattgctttctgacagattcaagttcctttgggcacctttcttctatttttgtgaatatgaacggaaacaactcccccacaagatccattatctgcaccaattattagcactagtgaagagatgaaatattattaatatcttaacagtagcacaatcatacatacctcagagtagtgcattcgaatctccatctccacatcaagaccaacgaattcacacaggtgtctatgagtgaaggagtcttcagctctgaaaacaggaccaacctcaaagacgcgtcgcatgtcaccacatatcgccatctgcttatgaagctgaggagactgagccagacaagcaggctgccctttgtagtccaacctaaacacagcagaacctccttcactactgccagcgatcaatttcggtgtgtggatttcaagaaaccccttggatagtaagaattctctgaacgcctacacaaacaattaaatcatgcaatgaactattaggataatgacaaatcatatcctagttgacactaactagctataatcctccatgttgcatatcaaatcagagcttacaatttggacttggcactgaatacggaagatggcttgattagccggtgttctgatgtcaagaaccctattattcaaacgtgtatcctgattgacacgagcagctggagatggagtctgcaacagtcatgaaaacaacaactcctatgaacagattgaccaccataatagtatcagaagaacacaagttatcagaattcacagcacaattgtaccaggtccaacaaaatctccaaatcttgaaacagcaaactatacctgaagagatgcttcgatatctgcttcactccgagcagcatcctccacactaagtggtaatttggccaaggatttgttgatgcagtacacttttctcacttgaatttcaacctacaattaaaattatcgatacacacacaaacatgagttaaagcaaacgagaaatctggaggagaagaagaagacaaggaaactaaacctgctgcgtagttcccgtcagcggctccttggggagagtgacgacaccgataacatcgacaaaggattcgcgactcagctgcttgaggtatttaaccatgttggcacctactttggtcttctctgattggctaaccacgcactgaacagttgatccgctctccctcaagaccacaaaccccaatttgttagacgttggacgattcgtgtgcactcggcctctgatcagaacctctgattccaacatctcttccaccaaatcgctcacatcggtccactcctttccctcaacagcctctatccacttcccggctttcggatccgccgacgattgcaactcggtaagagtcacgtcgccgtagttattggaaaactcgtcattctcttccagagagatcgaagctgttcgacgcgttgcttcctcttgttcttgacgacgtcttaacttctctagcttggcagcttccttcttagccgcttacttgctgaacttctctccagattcctccgctgcggcggttgatgacggcaacggcgggatttaagattcc

SEQ ID NO: 15382 - DNA, 502 bp, Arabidopsis thaliana landsberg
tgaccttggaatctacagagatactgttcttcctagaatactggatcaggtctggtttatctctccgtttagatagttggagcatccaaccttccgtctacatgttgtcaactattgtctcactatgtcttaaaaggttgtcaactgtaaggatgaacttgcacagtgctaccttatggattgcattattcaagtctttcctgatgattttcaccttcaaactctcgatgtattattgggagcttgtccacaacttcaggtacttttttatgtaaccgaccacttcttttttatatgcatttttctttttaaaaaattagactgcttataaacctcatcccatcagaacatctttctcctatttttctttttgtcattgtttgttccagccgtctgttgatatcaagacggttctttcgggtctaatggaaaggctttcgaactatgctgcatccagtgtggaagcattgcctaatttcctgcaagtagaagccttttcaaa

SEQ ID NO: 15383 - DNA, 1194 bp, Arabidopsis thaliana landsberg
gaatccctaatcttgttaaaggacattacaaaaccaaaaaaaaaaaaaacgcatgaaaatgaaatcatcaattagtcttcttctttccttcaactagtagagatacaccttgttggttcgcttcctcttactcttcctcttcttatctttcctttcatgttctgcatcttctttaaatttcactaaacatggaacataagagcaagagcacacaaatggtgaaaaagaataaatgcggtctccgacctccacagattcttgtgggttcacaacttcatcaagatcaacttctttcaagcatccataatctccaatgatgtaagccgtattgttgcgttcagattcgtctatatcaaaaaccacgacgattttcttctcttcgtcaatgaagaaactgccagaatcatcgttaaactttagactagtgagtggttccatttcaactgctaagaatttgctccatgacaccgcattcggctctatcttagttgtcacccatacctccatctcataggtatagcagcgctgatataagaccgcaagtttctcttctttaacacaagatagtctcccagtctctataaaatcatgcgaaaacgacaaagaaagaagtggtccaaatttctttgttgtaaaatcaaaaccgagtaagcaatcatacccttccattacttctcttccctcagtcaaaaaataagcatttccatttaacgacacgccgggctgataacatttaaaccccttgttgggaatgccataaaaacaatcccatgagtcagaagagttcatgccgtaaatctcgtagtagccttgtccagaaaaaaacctcaagatcatgtggttcttgttgttgtcgtacccgagagcatatgtaacgcctatgtggtaatcattcctagttttgatccaactaatttgtcccaaatacgggttccaaactacgagcttgcttgagtggttccttgtgacgcataacaataaaccttcgcaagaaaacactttagatatcttgagatggatcaatgaacttttcactgtcctcgtcgaggccgattccatggagattgaatctcatggaataaagcctatgattcattatcgtgaaccctaaaaactgaattctagcttttgtttacatcaaaatccgttctttgaaaaaacgttccataatttgcaactaaaactcactgcttt

SEQ ID NO: 15384 - DNA, 2025 bp, Arabidopsis thaliana landsberg
aagttaaagggagtgcttactttatttttttggggctttttttatgcaatttaaattttagtgatgattgtgtcgcttgtaatgttagaactcgttgttgtgatttctgctgctttgatttgtaggttttgaacaagcggtttagaatgctaaaccacttatttacttgaaataacttttttcacaaaataaaaaagaaaagaaaaaaacaatgcatgaaaacttttcttgaggggagggagaggaactatcattttcttgagatttgtctatgagaaatgggccaatatatatacaacaagaaaacatgaagaaaaaaaaggttagaaatagccagttttaatcttcaaaaaattgaccattcggttaaacaaagtgacgcttttacactttttcaaaagtgatttgactatagaaactaagtgttagaattcagaaaaacaaattcatttaggagactcaaaatgattgtctttaatctttctctcgtacgtcaacaaagacgaaactcttgtcttcatcttctttatatattcaccattagctctaatccaagtcagatccgacacatacacaataaattccaaaagcactgcttggttttcttctcacaccaagtaggttcgtacgggggtaagatcttgacagagtccaaggccagagaattccaattccaaatccgtccaagacttgaagatcctttgttatattgcttatattaattcatcgaaggtaagcaaaaaagattcgtgtttgtcaatcgtattattgtgttaaatggtaagataatcattgtaattacttttgaaaatggagagagttgatctagatttctgattacttttttcttttgtcgtgagttgatttagaattcaatgtttgtacatagaatttgttttctttttttacagtctaagagcactttaacaagaaatgggatcactacacagtctttgttttcaaattgtatgtgaaaatatggcaagactgatacatgaggaccactggtgattactcctaatcgatttttcttggggctaaaaagtgtaagcacgtgtataagtactctctcgatatttgatacttgaaacgtgcctgatcagtgatcactagatgtcaacaagaaaatgaaaataaacatatcttttttttttgccatcctagaatggccttcaaataaatggttggagtttgagacttttctcatctctattcaaaaagcggtaaatatttagagggtgacagtttgtatatagaattctatttttcttttgaaaataacacgtcatatttttctgaggatgcaaaattgtaattatttttttgaaaatttttgtgaaataaaatttaaaggaatagtagtattattaaaacaaaccaaaaaattgataaagggttagtgtattgttcattcacatgtgttattttttttcttataaaggggtttattccaatgtgttacttgttcctattatttgggctgaaatacgtccaaatctataaaagcttcctttttatttccaaacaaaacagatatacttatcatttatcaatgtggatagagtcatctacaaagatttaacctaaaatattaattgtatgacaaatttcaagttttctaccattttttcagtgtaatctctatacaaaataaaaccactatgtattaagtttttaaaataatttataataatttttcaattttagtctcgaccactaacttttatttacagttaccacaatcacaacaaatattacaacttcctttcttgtttcggacctctcacataaaaccaagatattggatcaccaaatctagaaacaaagccaaactttccagtttcatttagattctactttaatagcacaataaaaacctcacataatcaaaggaaaacaaagtaacaaaatcttcatcaaaatatttacaattaactaaaaaagcattaacctcacgaccttgttaaaaaaatcctccatttcttccactactctcatttaccctccctctcataaactcttacg

SEQ ID NO: 15385 - DNA, 1332 bp, Arabidopsis thaliana landsberg
tcaacgctccggaaatttgcttttgacccaaagagttatatggagaggagattctgcactcagagatggttctgatgctcatgtaagtttaatatccaaatctattttatttcattattctttttctgtaatgaatatttattacttgaagtaaaatatttgccaattgtaaaaataggttgatctcaccggagggtattacgatgctggagataatatgaagttcggatttcctttagcgttcacaacaacaatgctagcttggagtagtgtagagatggaatcacagcttaaggcccatcaggagcacggaaacaccctcgcggctctcaggtgggccaccgattatctcattaaagcccatcctgagcccaatgtcttgtacggacaggtgggtgatgccaacttggaccatgcctgctggatgagacccgaggatatgaccactccgcgcccttcataccgcattgaccctcagcatcctggtgcggatctcgcgggtgagacagcagcagcgatggctgcggcttcattggcatttgcgccatctgattcagcctacgccaaaacacttattagtcacgcaaaagaactatttgaattcgctaaggattaccctggagtctatcataactccattcctaacgcgggtggcttttaccctagcagcggttacgaagatgagttactttgggccgcagcttggcttcaccgtgccactggagaccagacttatctcgatcatctaacacaagcttctaatagtggaggtgcaaggtccgtttttgcgtgggacgataagttcttgggagcgcaagtcttggtagccaaggtaggttatatgactttcctaaaagagaccaatgcccttacttacgccacaattcactcactcttttgcaaatgatagcttgtgtttgaagggaaagtgaagaacgaagggaagatgattgagtacaagagtatggcagagcaattcatctgcaactgtgctcaaaagggtttcaacaatgttaaaaagaccccaggaggtttgctctggttcttgccgtgggacaacctccagtacactgccaccgcttctttcgcattagccacttatgcaaaatacctcgaagctgcacaaacatcgattcaatgccccaatggtgatgtccttcaagcttctgatcttcttaaccttgctcgtgcccaggttaggcaggcattcgtgtttttcccttttaaattaaattacgttttgagaatcctcaagacttaattcttataaagatatgcaaagtgttcgtaatcttcatagttcttaggattttctgtgatgattacatggtt

SEQ ID NO: 15386 - DNA, 575 bp, Arabidopsis thaliana landsberg
agtataaacgacttcgattgacagttaaattcatttactaaatttttcggcaacaaaaatattaatgtggtaaaaaaggtattgtaggctgtatcctaattatttttgagaaaaatgttgtttaatatccaactttcaaattgtggtcattttatacatcaactttatatatgaccattttatacatgtattaaacgttcactgaccgtttgaaacatgaaattgcgttgattaggccaaaaatacataccactatctaggcctagacatttggatttcggttaagattcacttcaaattattcggattagacaatttgggtaggatagtttattatccgtttggattttataattattcagtttggatacgtgtcggattgagttaattttagatcagttttgggagaaaaaagtaaaaaaatgaagttaaataaaaattagtttaatcttactaaattttgcaaaaataagtatcattctaacaaatataactaaagatctttttaaatatatgtaggttacttagagtatctttgttatttattataaaattaaagctaaatgtaactaaat

SEQ ID NO: 15387 - DNA, 542 bp, Arabidopsis thaliana landsberg
  unsure (1)..(542): unsure at all n locations
tattcatctaacattaatagtcgttacaaaaacagagagaaatttacatgtgttactaactttgttgtggtgtacggcgtatgcattatatggtgaatcattatgcaaattagagttataaacggtttttgtggcagcccatgattcaagaaacccatttctcaaacaaaaaaaaaaaacaacgcttcattgttgttaatgtgtcataaatttaacttttgtctgttttagcttcggggacatactatcactcatcatccgttatatactcatgtgtttcaggctacgactcattctatttggggagaacgcaacggaagacgacatggtaaaattccacacaacccagaaccaacttgttaagtctattgaccgagcagtaacaaattttataacgcatataaattacaaaaataatatataacaaattactagttgaaaaacaaaattagcaaggagaaaaatgttataagaaataaattaaacctcaagctctacgtcacgatgatgggtatatgctccaagagaaagagncaataaat

SEQ ID NO: 15388 - DNA, 3523 bp, Arabidopsis thaliana landsberg
aatctcgtttccattggtaccctcttcactatgatcagcctaaataagatcaatctcagcaaaaccaataacatatgcaatctaatataatatataagttattaaccataatcattacactctactgcagattatgaatcaactctcacacacacatacacaaagtaagtaacattaagaccctaaaatcctcaaaagtctatacctcttatcaccattccaaagaccgaatcctgcgtaaaaaccgtggtggctgctgcttcggtttctcaacaacaggaatcacaaactccatcaacttctggtatctctctttcctcttatcttcaatctccttagaaagcaactcattctcttcctcaagcttcgcagccaaagcttctaactcaacttgataagcttgtttcctctctctagacctagctgcagattcacgattcttaatcatccttctctgtctctgtgcagctgctttatccaatggctcaaccatcactctcgctctcttccctctcgctcctcctccgtaaacatctaaaccattcccaaacgcaactattgatccttctactttatcaatcatctgaaacggattatgcggcggtgcagaatgatcgaatccgtaattcgtcaccggaatcttcacatccaaatcctccgccgacgccgtcaccgctgtttcgtcttccaccgcagctttcgctagaaaatcctctaacgtcattatctcttccgacgtctcttccttcatccctttaccttctcctgataccatctctctccaaacctcatcaacactcttcccaccacgcgtcgtctccgttcctccgccgtgatccacaacatcagaagccgtcgttgttgttatctccattggtgctggagaagcatccatcagatttatcgacgcatctaagagtgaagattccgttggtgctggtggatctgatgcgaaagtatcgtgtaaaatcccttcgaccgtcatcgaatttgaactgtataatccgtcgtttcttccgccgtaaccgacacttgttagatctcgccggaactgttgttgaggtcttatagacgaagaagaagtagaagcagaagagatgcgacgagatagatccgagtttctcgaatttgaagaacgcatcacctgaaacgacgtcatttctggagaagatgatgaacaagttccgtttgtttcgtcctctttcgccggaatcggatcagagaatcactctgtttctttgactcggccaaatgttgaactttacagaagcagagattagggctttttgtgtcgaattgagaacctttgagaacttttggtaatttatcccaaattgtaattaattgacttttattacttttttaaaataccacgcgcatatgtggcacgtgagttttaatttttagacttaccaaagaaaagagctgattttggtaaattggataaggttaaaatcaaaatggataagattttctaacttttggagcgcgtgggaagttttgtcgcgtgtcatcaaactgtagttgtcaaacttgcatcaattatttcaagatcattaatgtattataacttgactattattacttgaatttagttaaggtaatttaatgacgttattttaactcgatggtagttgtttttagagaatattacactgtaagatactttttaaaacacattttcatggttagacattttttaaaaataaggcattttgaatgatgatttgactcatttaccgcctaaccacgtatcgttttatctctctccttctcctatttattctctctttttcttttactttatcgagaaataaacaaaaatcaagccaaaaaatagatttcttcctttttccttcttccatcttcaacaaatcatccgcttttatgagaaagagagattgagattcagcttgttaaattttccacatctgctttgatctgacttgaaggagaattttttcaaaccatcaatttgagaatctgcccgatctggctgatttagttacatgactcgttgaatgattgaattggatttgcggtttggtttttgttttatgttttatgtttttgttgtttgttgcaaaattaatctgattacttgctctttgattctttgtctttcttctccaatttcatattcgagattattctcttaaattggagattaaagcctcgcagtggacttcgaattatttgatagcaattgtcgaatcactaattgatggaactcgttgcttagtccatgttatgtgaatttgattcatgattatatttgagttgtatcttttcagaaaatctggttatcttatgtgtttatcatgaacggtttataagttttttgatggttgattcgcttattgaagaaccttgttgctagttctggttctgtgaaattgatggaggttttagcttagatctgagactaattttcattcacagatgttagactgatttctacgtttgtgtttaagatatagatgttaaaaatttggagcaaaatcgagaagatcatcttaacagagttaaatgaacagatctctgtggataatgatttctggacacgttattctttacctttttatctcaaaatccaatcgagaagatcaccttaacagagctaaatgaacagacctctgtggacagcgatttctggacacgttcttctttacctttttatctcaaaatccaatcgagaaaatcatcttaacagagttaaatggacatacctatgtggacaacgacttctggacacgtttttcccttgaatttgtgatcatttatgttatatcttgagatgttctgtatataaaatcaaacttggacttgtattttaaaaccttaaaatccaatcgagaagatcatcttaacagagttaaatgaacaaacctctgtggacagcgatttctggacacgtacttctttgctcttttatctcagtttacttgaacttatctctaagttttttgctatcaaattctatggcttttgaaaaggaatgaccttgttctttttgtaatcgatacgtcagcgatcggcgactgatttttttttaacttacttgcgtgtaatgtatgtggagactaacatcatcattctcatgaaagagtcgcaacgactataaaagtgatcgccgtttagtctagtgatgccgacgacaccaacatctcgtgtaaaagtggtcgcaacgacacccttactatttattctccgttttctctagagaggcttctccgtaaagaaaaatacagaagctacacgatcttgacaaactatcaaatgtttgattttgcaaggaaagaaaaaaagtaataatgagaagagagaaaaagagagtgaaaagaagaagcgacgaagaagaaggaaaaaaaaggaacgtggagagatgaaacttttttttttattataatttcttaattttcaggggtaaattggtcaaaaatttaatgaaaaagttggaaaagtgccacaagtgcctcaaaaagaataaaattatttaaagtacctaaatgtatcacattcc

SEQ ID NO: 15389 - DNA, 595 bp, Arabidopsis thaliana landsberg
agacttcccctttataaaaccaacattttcacaaatcagaaacataaattccaaagtctccactgctcctaatttacaacacattacatccaccaaaatctgaaagcaccattgcctaattgttccaatcaaagcatcaatcaccataaaaatagattactgtttttgctcttccctagtaagaagagcaatttcacatcaaaattgattcagaaacatgaatttcaaagtctctataactctgtattcctaccaaattacatccaccaaaaaaccctaaaaccaaaaccaaacctttctacatatataaccatcattcaccaatatttcaaatcaaccatgaatcaagcatctctcataaaccataaaattagattatttgttttggaactgattatcatacctcgtgataatcaatggttccagcggaatcaatgttgaatttggaatcgagacctctcttcttcacgatatctctaaagacgccttcagctgctggactccgaaaatgtttccgagacagacaagaagagcagagtaaggtttggtttcgctgctctgcgtcggaggagtcgtcgccattgaagatgatgca

SEQ ID NO: 15390 - DNA, 8190 bp, Arabidopsis thaliana landsberg
agttgcaccttggatggggtaggttttgtcgccagatttgcacaagatgaaaccttcgatggccatgttttggtttgattttggcaagtatggcgtcttaaccggtgatgtgtaggtggttgttggtttgggaacgtaaggttgtcgttgcgcatagcaatcggcagtagccacaaccaccaccatcgctaggaggaggaggttagtggcggctcctgtggatgccattgttagtagttgctcgcctgctgtcgtttgattaaggtctgatcacaagacatggcctcctttatatatatggaacacacagtctactgaagtatgttacgatcatattggacaagtgacaactagatgttggccgcaagagaagagacataattgggtgcacgtttaaatttttatatttgcccaccaaaacctaataatattgatcgagaaatgttttgataattattactcatcacactacaccaagctaggatccgaattgagaaggaaggaattactgttttgtggttaattcttgagtgaagtatttataaatacgtatttacatgcatgattagataaattaactaaaacaaatagaagaatttggtaggaattaatattacgccatgtaatatagtatttgatgtgggagtagaaataattaagaaagcgttatggttcaaatgataactgcaaattctatgattaattaacttactattatttataagttgttaatggtagttgcaaaaggttatagagcacacagtaaataaagtagatgatattaataaaagtttctagaagaacttggtcgtcaagcaaaaactgcaacaactctgacattgtctcactgtataaaacccaaattctctttctcttttaggactcggttcaaaaacgaaaacgcaaatacgtcttgttctagtttggagttggaagcgtaaaaaacaaaaaacaaaaatgtgtgggggagctatcatttctgatttcatctggtcgaaatctgagtgtcaactcggctctgttagcagcaggaagaagcgtaaacccgtctcaggtacaacacttttggtttcgagttttgtttttttattataaaacctaatatatccgtttctgattcgggaatatcttcgaacagtgagtgaagaaagagatgggaaacgagagaggaagaatctgtacagagggataaggcagaggccatggggcaaatgggcagcggagattcgtgacccgagcaaaggtgtacgtgtctggcttggcacattcaaaaccgccgacgaagctgctcgagcctacgacgttgctgccatcaaaatccgtggccggaaagccaaactgaatttcccaaacactcaagtagaagaagaagccgatactaaaccaggggggaatcaaaatgagctgatttcggaaaaccaagtagagagcttatcggaggacctgatggcattggaggattacatgagattctatcagattccggttgccgacgaccaatcggcgaccgatattggaaatttatggagctatcaagactccaattaaatctcttatttcccggccggtttgctcactcattaatatgctgctaatttacttgttttttacttaacaatcaagtctaatttgtttccatcaatatttcagacaagagtaaagcttcaattgtctttaaaaacagttttcagtgctttatataaatagtttgtcaagaacaaacacactaaacaccgtcgtttatagtcttcaccatgttttttttttgtttgattagatatgatatcacagaaacaattcatatttaagtttaagattctcattctcgttttgtcttcaacacctaaattttgaacttcaaaaaaaaataaaaataaaaatttaatatgttaagtatagagattttttttctttcaaaaagaacattaaatgtaatcatggagacagtctcggggaaaccgcggttgtggcggcggcggagcggaatctgttggcttgaggacgctcatggtttcatcgtctaaaggtgtgtcatgtttgtattcttttacacctttacgctacgtcataagcctcgttcaatttgaggtctaacaaaagcccagtaaagccaatccaattttaatcggcccaaagagtaataaatccaagcgccaataaggctcgtaccgtgagcccaccgaggagagagagactaacgaaactcagaaattcttctcgctgagtactcactctcttattcaacacaaaaaaaaaattgatacataaagaagatcatagtttagccgtaagatgaagaacaatgttgccctcccaagaaaatttgaattgtttctggatttgctcatttttattataacctaaataaaagcatcagaagaataatggtacttgaagctttggctccaaaaacaactatcaatcggagggaccaatcatcttctcaggaacaacaagtgtatcaaactcttccgcagtaagcacgcctaaattcagagccgcttcctgtaggataaattaaaactcaaggtttaacatactatagaacctgtttacaataaatttatgtaatctgcattgcagatatatttgctatcaaactgctgatgcaggcaataacgtctttctcttgttgccaatcaatttcaattctctataataaattgtttcttgtgtttaccttcaatgtacatccttctttgtgagctttcttggcaactgctgcagcattgtcatacccgattttctggtaaagaggataaggattccaaaactcagcatcaaagtacattcattagtaatcctaatggtaaaacggatgactaaaaaggcggagttcaatatttagagacttaccggattcaatgatgtcacaagcataagagactacagataaatacatggaacaaaataatcagttcccagatatcattttcgtttgatggaaaattttcagaccaacaaacgagaataagcctacctcgtgcaatagctttgagattctttctctgttggcctcaatgcccctcacacagtttttctcgaacgaagctgaagcatctgctattaatctgacggactgtcaaagaggcgagatcaaatggttaagactggtatatttttatataaaatcaaggaaacagacgtagaatgaaaatgattgacatacatgtaaaagagcactcgcgatcaccggcttgaatacattcaattcgaaatgaccatttgacccaccaactgtcacagctacatggtttcccataacctgcaatgttattggttgcaacccaaacagtcaaggaacaataatacaaccttagcatctagattcattggtctgtactaagaatgtattgatagatgggacttacctgtgcacaaaccatagtcaaggcctcacactgtgtaggatttaccttcccctgagaaagagataaaaattcatttgaatcaaaactagtgaaaaagaaaaggacagaagagcaaaggaagattgcattcatacaggcatgatactgcttcctggctcattttcaggtagtacaagttcaccaagaccacatcttgggccactatataaagacatggtaaaccataaggacatagtacatgttaaagaaagaaaaaaataatccctatagattagatccataccttccaagaaaacgtatatcattggcgatcttcatcagcgatgtggcgattgtgttaagtgacccactggtttcaacacaagcatcgtgtgcagcctggaaaaagcagaataatttagcaactgatttcaccgtttaggaacatcttgtctagttggcaccagaggcagagctaggaatgggtttcgtgtcaataaataatagaggtagtttggaggctaccagagcttcaaacttgttttctgcagtgacaaatggcaagtttgtttcttcagctactgcagcagctatctttacatcaaacctgtacagatattactagtgttactacagtggacaaagcccactaataaaacatcaaatttaggagagatgaacctgggatggaattatggaaataaaattagaaatgagatataccctttcttagtgtttaatcctgtcccaaccgcagttccaccttgtgcaagctggccaaacatttccagcaagttagacctcagtataaactggagaagtacaggaaatcagatccccaaaagatatcatttcccaaacctgatagaggcgaggaagagtgcaggtgactctatttagtccatacttaacctgcaggtgagttccagattgtatgtgattttcaactttgttagacaaacacagttttctgaacaaaaccacttacttgagtagcatagccaccaaattcttgtcctagtgtcaaaggtgtagcatcttgagtgtgagttcttccaattttcacaatatctttgaactcgaaggactgccagaaacaaggtaagtttggaaagaattaggattcagagcagatagaccataaagcccaagtgcaaatgcaataggaatgtgaagaggtctagaaaagcaggattatataacaaagtggcagggtcagaagatgttccttaaacgcaacaatgcaacatctacaaagcaactctcacatacaaatagtaccacacagaactaatatcagaagtgatccatgatactatagaggtcagagcaagttttatttttaaagagtcttgtgttgcagtttagcgactagatcaagtgtgtcacttaggacggagcaagaaaagagtttgaccttacattccaaagggctatgcaaagatgataaactagggacgagcctcgaattaatctcggttgcagctgcaatgtgcatgacctatacaaaagccaaaaaaaaaaaaaagaccgtcaattataagttgaaagggaagtgagccaacatataagaaagaaaaactttaaaaacttaaagcatgtaaaagtattggtagctggaatgcaaatgaaagcttacggtaggaaaagtgtcgttagaagattgtgatctgttcacatggtcatttgggtgcacacatttctcaccacgtttgcgaccaagaatctcagctgctctattagcaatgacctgtgaagagcaaataacaaggccaaaagaaaatgaaaaaacataaacagaaagccttctcttgtagctagctatatacaatgagatcctcaacagatgtctcaaaaactgcaaagaaattacctcattagcattcatattactctgagtcccactaccagtttgccagacaacaagggggaaatgatcattgagctttccctcagctacttcctgagcagcttgcataattgctttcccaatcgtcggatcaagaccgtattccatgttaacctataaaattatattaactcaattcatcacagaaccaaatacgagaaagcaaatgagaattcagatgcaaattaaccccaaaacctggagctagaatgttaccttggcagcgcatttcttcaagacgccaaaagcgcggacaattggttcaggcattcgctcgcgctcaccaccgatttcgaagttctgcagcgatctctgcgtctgggctccccacaatctgagacacacaacaaataaaacactgtgaaacgtttccctcgaggataagagaaaattcgacgttgcgtaaagatcagatcccgaacttatcggaaggaacttgaatcggcccgaaggtgtccctctcctccctaaacgaggtcgaataagatctcagagaggtggcataacgcagcgccgtcacagttgttccgccggagagccgtcgcgacgcgacgtaaatcgacatggattcttctacctgacagtaaaactgcagtcaacaaagaggcgagcgaagaatcatcaaactacgcatttctcaatccaggataggattacgaatctgtaaacgtaaatagcaaaaacaaaaaccttggaagacggagatggagagctgagagaagacgacggatcaagttgcacaagagcagagggagaaagaaagatagggcaaacaacaaaaataaaatttaatattcgagaaacggattcaacgaatcagcaaggttggtcgatatttgaaaagtactatgcttttttttctgttgtgaaataatacttttcccaaattttacatatttctaataaaatatttttatactagcaaagattgcaaaagttgtaactaattagaagaaatgcaacaagtctctgatttgaagcattatagaatatactaaaaaaactctcaagcaaatagttaacatacaaatctttcatattttttatgttcagctagtggaagaatatacatagaacagaaaagtaaaacaaaacccaagaaagagagcaacaagaagaaactgttgttgcattgtctagctattgtctttgtctgtgttatgtatataaaagctcgcacaaccaaacgagagaagaagaaacaataaaaaccaatggatgaaaaataaacaaatcaaaaccaataagaagccatgtgagtgtgtatgtatgtatccgtgtgagtgagtggccttcaatgtctggcgttagtagctttccgcttcatatcagcaggaccgaactgtttcatgccacgaggaccattccctaccttctgtgaagccaaaggacgtgaaaccgtgttgtttgagttgttcctgcattttttttggaaccattcaaaagaaactgttaaagattttctatattgctgtttcatttagtttttgaccgagtaaaggacacttacctggattgaggacttcttataggttttgagacgggtttcttgagttttgactcaatattgcttcttgtaggtatcttggtggactggttgaattgccagagcaaatctggctcagatgagtcacttgtggctgcatctagatcgtctgtgctgttgttggttcccatgaagatgttgtaagaatgttcagagaatattcttgaagtgtctgaagccaaatctctcctgtaaaagtcttcggcaagaataccaataccattctctgttgtggctcctccccaaagactctccactcttctcatctcgtcttgtctgttattcaccatcaccttgtcaacccactcgctggacccgaaacttcggtcatcctctctgtaggcttgtcctggacttgctactggtggccaaggtggtgagttcactgtaatctcctccacttcacaactctcagatttctttgtcatgatgttattgttatgaatctgcaatcactcagaaaacaatgtccactttgagatctgattttaaatcatagagaaggtgcttgagaaaagaagaatcacctctacttcaccagttttggctttgtgtttctcagagccaccaggagttttcaagatgttgttctgctgtgactctgcttcttttctcgcgagtgctgctttaagagtagcaatctgtaaacaaagcaaaagcccatgtgtgtgagacaatcaaatactatcaaccaagaaagtgaaaccatcagattcagttaatgcaaaaagagaaaaaaaaaacctgttctttgagttccttaacatctgaagtatcattgttcactcgtgcagccccaagctcaaccgtagctactctctctgcaaacttcaaagtgcttattgtttccccaactgcatctgcctcaggactaatgtggacaaacatcaatgtctttgcttgtcctcctgatataacatatttgcaatcccaagttaagaaaaaggtgagtttttatttagctgcaaatattcaggactaaattacttgtatccttttaccaagagagtcctgaaggagttgtgtgagtttgctgtttctgtaaggaacatgtgggttcttgtgagctagcgaagcaatcacatctcctaaagcagagagcgatctattgatgtgctgtgcttcttttagtctgtctccagtaacctcggatttgtctaccctctcactgcctgctagatgcacaagatgcatgcatcctcgaagcacagctcctgaagtcaagtctcttccttgaacatgaacagtcaagcagctgcaaaaaaaaataagattgaaaaatgttatattgagtaagactcttcccatccccttttgttctcgctgctcttgaaaacatataaaattttacgtatgagaaagactgcttcgatcattcaaggctg

SEQ ID NO: 15391 - DNA, 3466 bp, Arabidopsis thaliana landsberg
agaccattttcaagcctgtggttgagaggagaaaccgtaaaccgtgaggcctccatcaatacaaatggtttgacctgtgatataagaagctgcaggaagacacaagaagaccactagtgatgctacttcattcggctctccagaccgaccaagtggagttctactaaacaatccctcctttttactgacgtcttgaagaaacttttaagaaacaaaaatttagagataataagaggaattgaggttgttaaattcacaacaacaacaccaaaacgtaaaaaaaaaatttaaatttatttcttacgaattgagactgagcagtcttgacaacattaggtgcaaccgcattggctcttatgccgtcttttgcccattcacatgccaaatttctagctagctgatttagagctcctacaaaagaagtcaacaaaccactaaaaaataaggaagtgaaaaactctttgttgattagtcagatttgtagtaattgtggttaccttttgttagaccataaagtgatccacagtcagttattgacacaaccccagaaacagaggaaaggaacacgatgcttccatagcctgaagtctttaagagaggatgtgaaagttggcaaaaatggtaagcagcttccaagtttgttgagatatgaaaagtgaaatcgtctgccacatattctgttgttggctttgcgcgaagtacgcccacattgtttacctatgttgaacaaaaagaagatttctcaataaaaaattttgctaaaagaaatgcttagttgtttctatataaagatcatttacttcaagaatgtttagtttgccatcgaaaagcgaagagacggtttgcatcagtttttctctctcgggacgagaggttacatcacagactgaaccactcacttgaaaccctttcttttcccattctcttaagctttgattaagcagagtttcggatatgtcgcatacatggattctagctccaaaaccagctaactcctctactatggcataactaaaacattccacagacatagattaaattccttgaaacataagcagaacaatgattcaaaagatgatatagagaacagaaaaaaacaaacccgataccgctggctgcaccggttacaagagcagtcattccttgtagactccatcttttatccatttttcttgcttgttactagcagtgaccagaaatgccacaaattatgtatacagtaaatgtggatcagaatccagataagtatgaattaatgagtttgttgtcttgtttgtacgtggcatgttgagaaactatgtagtcgtatgttagaaaacatgactaaaatatcgaagtgtcccaagcaaaaaatgacatatagtcaaaatcttcaacagtgaagccatctgtccttttgagtcatcattgcatgattctgtctttgtgcttgatcaactgagcattgtaagttgatgagtgtcgaagcccatcttctcatttgagttcaacttgtgttctgtttctgcaaggctcatgtactcttaaaagaaacatcttctgttaaggtttcttgttcattacgttttacaatatgtcatcacaccaaaatgaatttagttttaaggcttacacctaaatattcaaatcattcattttccaatgttattgtttggtttactgttttcattggacaatacacacaacacagacctagctcaagcatgtggctgatagtagaagccattaacggtgagacctccatcaacacaaatagtctgaccagtaatataagaagctgcaggtagacacaagaaggccactagtgatgcaacttcatttggctctccaacacgaccaagtggagtcctactcaacaatgccttcttgaaactgacgtcctcaagatacttgcagaaacacaattaagagagggttagattaattcacataaaatcgttgttacattcacataaaaaaagaaaagaaaaagttgttagtttattacagattgagacagaggagtattgatgacattaggcgcaacagcgttggctcttatgccgtcttttgcccattcacatgccaaatttttagctagctgaatcaaagctcctggataataaatcaacaaaacatagaacataaaagatttattagtcagtcttgcaatgaacactatccatctactaaaaactctgtctctggctaccttttgttagaccataaatggatccagcgtcaaaagatataacccctgcaatagaggaaacaaagatgatgcttccatagcctgaagcctttaggagaggatgtgaaagctggctaaaatggtaagcagcttccacgtttgatgatatatgaaaagcgaaatcgtcttcggtatattctgttgttggctttgagcggattacgcccacattgcttacctatgcatgttgaaaaaattggtgtttaaaagattttccacacgaatatgattaacttgatagtatctttaaattaatttacttacaagaatgttgagtttgccatcgaactgcgaggagacggtttgcatcagttcttctctctcgggacgagaggctacatcacaaactgagccacttacttgaaaacctttcttttcccattcgcttaaactttgattgagcttagcttcagagatgtcacatacatggattctagctccaaaaccagccaactcttctactatggcataactaaaacattccagaaacataaactacttcaaatcttaatgttcaaacagaggcagaccaatgggtaaaatatatgacatagagagaacagagaagaaagacgaacccgattccgctggctccaccggtcacaagagcagtcataccttggagactccatcttttgtccattttgcttgtaagttactttcaatgaccagaaatgctacattatatatatacacacaccatgagtattagataagtgtcaattttcttaccataaaaataaaagataagggtcaattaatgagtatgtttgtatgtgtggtggatatattagccataataaataaagaacatgacaaaatatacaagtcagtggtcaagagcaaatatgacttttaatagtcaaaatcttgatctaaaaagttttgggtcaatttttgtttctttcttttccattaatttcattcaaaaaaagacaactgaaacgacaagtcagttagactggtgaacaaaaatttcgtaaaaacgtgttagtaaggtaacaagaaggcaaatgtttttttttcataattcgggtacttatcttttaattaggattccattatttttttcttctaattaggtttcttgttcctaccattttacaaaacatctaaaggttacccattgtatgactgtaaaatctcgtttgttcattcctattgacaaagcttttgctgaatatttgaaacatttgggaagatgtaatgatactctatcaatgactaattattata

SEQ ID NO: 15392 - DNA, 1088 bp, Arabidopsis thaliana landsberg
ataacctgatgtattaggtctaaaaagtacgaatagattatgatatctactgcaagttgcttgaattatctactgcaagtggattacatgtcatgttcagtaaaatatgtaactctgaaaattaactaatcctactcgttaggacgaaatacatcggaataagtactgaatactatttccctaatttcccttaatcggaatccatggaaaactatccacattattaaatcagtgttaataaaacattttgttcagcatgatatgtttgatataaattgcatgtgtccatgaatacatacccacttgaacctttaataacactcgagaaaattagttggactaattctgagaaattgaaaattcagtacaacttataaatcaaaacgaaggtagataatagaatcgaaatggttaagcaatgatggatagtcgaattagaccttgataaatatactaactgaaattacaataatttcggaaataaaacgattaaaaaacatacaaaaataaaataaagagcaaaaataaaacgagaatatttttcatagatctaagctgcgatctcaggtcttcaatgtcttcccaaagaacggaatctaggccctgtggcaaagaggtaatcatggaatcacaaaaatttagccctttttgcaattttagtgtagaaccctcgatgttatccattttttctatcaactctcggatctcttcaacgatacatgtatccatccatttgaacaaatggttccgatttttctatattatcgatagttatttcggatagcaagtagtataaattatcagataattagtagatttacttacggaagatcccaagggacatgcataaaacaaacgacaagggttccttggagtagctgattgtttcatcactacttcctcaccacatgggcagaaaatcgggatacctccaagtcgatctaccatgttctatttttgtggtgaaagttgtacgaggagactaagcttgttctatagaaaaccctagaatttggtatttatgaccatttgacactacgtcgtactgataaagtgtaaatgattaaatatgatataattaaataaaa

SEQ ID NO: 15393 - DNA, 3380 bp, Arabidopsis thaliana landsberg
  unsure (1)..(3380): unsure at all n locations
ggaatgtgaaaagcattttggaaaatatgtttttgcgatttacttacatgaccaacagcgatttcatgttgctgggagggtctggcacctctccggtcaagttattattcgacaagtccctaaagttaacaagagagaatataataccatattacataacattttttttttgcatacacgtaacatttgatcagcaacaagacatacttacagcttttctagtgtcgtaagattttgaatggcagctgctatcgttccagttaaaccacttgatgacaagtttctggtgaaatttccaaaaccatattcaataatatgatcatgatcacttatagatcctgatgtgtatactagtgaactaatggcttacaaagtagtgattcttggtggcgtggttatatctgtgatgctgcagtttaaaccatcccacataaactgttgagggacgcatggatcgctttgccagttgattctactcaattcataggaagcttggatgcttttcacagcagaaactgttatagaaatgttttggtgatgttagaaagaataaataaaacgttttgaatactctttagagtttatgataaatttctttccatactatcataagaaagcatagatcgtattagtataaccttgaaacacacataccgtcggtttcatttgtttctaactgcggaaactgaataactttgtagacctcataagcgttaagtagaggtggaagagttgatctgttggttcttatcagctgtaaattgcactccccttcttcacaagtattcggcgacacacttaggatagtacttattgctagctttggaggaaccacagggccaaaaaaaagtttcccatttagtaacatgttaaattccctggtttcatttgcctgcaactcttggatctcagaaaaatgggcgtatacgtaatacttttcatcggggtttactgaactccattcattcgtcaatggcgcactggcattagtaggtatggccgcagtagtgagagcgacttttggtagttcatagtcattggaagttcccacatcgctactggttgatatctgggtccactccctccaaaagaacgcaatccattgacgatcatagacatcgttcgggtacctgagggtgagataaacaacgtttgaacagggaaatcagtaaaaaagaatggataatatcatttttgtcctcttggaccattgtaaatattatcagattcctctttttcattgtttttgtcttgtcttacacttttatttagtgtctggaaacagtcctctccttgaagaactctgacccaaaaaaataaaacagagcaaaaacaagggacaatgttaagttgaagttaccttatgtactttgtcgattcggttagatatacccgaaagtagagattcagagaaccagactgggtgatataagaatcattatctcccatgggccgtatttccaaggctgagatcattggtgtagtttccccagtcttaacaagacaaatctgcaacgagtttgatgttggtttgtgaatgacctctttccgtgtaccattcacagcctcttgcaaatttactgttgcccacggattaggacctagatgcagatcaaatttcggataagagttgagaccatcgtaatttccataaacgaacctagccctgatcaaatgtttcctatccttgtcaacattcagactatagcagttccgtatcccatccggaaaatatctcagcctcgtgtatggcgtcaggtaagcactctctagactagcctcaattttaccaatttgaccagtttggatgaactttgcatcagacgagaattgtagtccggttgatggctcgatataaggagacagttcactaacgggtaacccgcaatccaaactgatgaaccctggcaagagaaatgaacttaagattatatttgcaaaagtgagaatcaaaaagcatgtaacaaatatgattgagactcaaaagcattaaagaatatggaatgtaaaaaattaagatgcagataccttgttgatcctgagcttgaacaagacaaataatggcaaaaactcctgataggagtagcaaaagcggaggaggactttccataattgcttatgtatcaaaacattaccaatgaccgagtttgagagtataaatagataaacccaaccggataaggaagtcaagccaagtctctggcgacatggcaagatgtcctgagtctggaaatagataagttaaaaaaaacaaggagatagatgatatgtccaagactgcatctgttgtactttctttcttcgacagaaaatgggcaacttgtgttttcgaaagaagctgtcaaaatttaccannnnnnnnnnnnnnnnnntgttcacagagagagatagagaaggagcaagagatttgactttttagagtggtcattgacttcaggtttctatcggataaatcttttacattaaaacagattttgacttcttcatcaacaagaagagcttctaatcaaaaagccgagtactcacagttatcaacgctgattatcagatatctaaaaccattcccatagaaataaagtagcaatttttacaggattttcagccatatcataaactgagaattaccttccggccatgaatctgagagaattttcagcctcatctctttcagcgggcgtcgaatctccggcgataaatcggccatctttggcagcgaaattagcactgatttgataacgcgattgacgatttggagtgctggaaacgcagtcgcaggagaggcgcgttttaaacgcaacggtatttaatttttcaacgttgctaaaataacagaaagaattgttatgggccaaactttgggttttctcggcccattaaataaaaaagaatttggatccataaacattcccgacatggcacaccaagagtcaatcaacacacattcaaaatatcaccaaagaaaacagaggagtatgatttcttcacacgttacttgcagcagctcaaactatctcgccataggaaacataccagtgtcaaagatgatgttcacttcagcggaactctgagattccatgcctctactcatattcctcctcgagttttcagacacaagacactcttttagttcgataacaacctgggacatacttggtcgtcttgtggaagaaggatttgcacatgacattgctagttcaagagctctccatgcagaccgagaatcgtaatctccatgaaggtttgggtccatgatactactaatatctccactatttagctcaaacccaacccattctgttatgtgagtctttgcacgggcctggtcgatcacgggttcgtttgtgatcatctccaataacacaataccaaagctgtacaca

SEQ ID NO: 15394 - DNA, 914 bp, Arabidopsis thaliana landsberg
gcgcactacagttatgaatcatgtaagcagaaacgactcctgtttacgttatatcaatgtttccatgggttttgttagtttaagattgccgctggaagcgtgtgcgtatactatcactgagaagaaagatgaagacaagccaaagatgatcgtagtagcttaaggaactcaagtggattcagacatcactttagagatcgaaatagggtttgagaattggaaaacagtgtgaaaataagctaaagcagttgcaatctcctcagttatattcattgcaacgttcgatgagatcttctaacagcatctcccccctctagctcttgatatcttattcctcaactaatcgagaaacacttaactttgaaaaataaaatgacaaaacttgaagacctcacacactctcagttgatcaaaacgaagaacactagctaagatataaagtcaagctgtcgttgttgaatatcccacaaagtcgtccttccaagaaaaagctcacaacaagacttgcggactaatttcatagttctttctacatcacctgaaaactagttaggaagctaaggctttctctgttattttttttgtttgtcattgttccactggttctttgctacaatttaggagactagaacaaaactaaattttttgtttggttatacaatgcaaaaaaatatctgcaaaataagtgatttagtctctaaccgagaaaaaagtaattaaaaacagagcaattactaactataatttctggtgtcattttgagactatagttaaaacttacaagcaatgttttacataaatcatttttaaaattataagtaaaaatgttggcgcctcagtatttcaggttcgagttccattgttctttttcatattggataatttagtccacattgaccaaaagaaagaaaagt

SEQ ID NO: 15395 - DNA, 790 bp, Arabidopsis thaliana landsberg
aaaattaatgcatagttactaccggattatgtgttgcaattgataaaagaagaataaattttggtaagatatcattagcatttaaaactaaaattattttcgaatcaagtaattgtaaatatggttagttatgattgatttccggattttgttaattaggattttagcattaatgaattcggtatagttttagggattgatttgtgcaatttattagggtagtaattaacaatatctatgtttaggtaagtagttagtgcaatatcttaattgttaatcaaaaatttggtcattgtcctaaagaaaatatcttgtctgattgattttgtagggactaaacatacaatatcaaaaattgaaaaaggatttttcgacacaaatcgtccccaaaaatgtatatgtagatatacacaattagtctttactctttagttaagtgttgcagccatgcaaggccaaatcaactgcttctaaactagaacaatacagagctaagaaagaaacagattcttttaacaaaactggagttggtttccacaattaattcccaataaacatgtttcgtcaaacgagatcaaattaaacatgctttaatcttctctgacacgtttccttgatgctgaagcagattcattttggtcccctgttagtgtctcaagaccaacttcaacttctgcaaatgaaccattgcattgctttggtgatgcttctgaagaagagctcttgttgtcttgtatcttttgttgtttctcgaacatcatctgtaggtaccggccctgtttttcaatct

SEQ ID NO: 15396 - DNA, 1769 bp, Arabidopsis thaliana landsberg
attcctcaatgttaaaaaggtaaattgtcttcagttttattttccagttgtagcattctcaatatccatcgctgttgtccaatactattccaattcaactattcgaagaagaagttttctaacctaagtggagggaggggtttgatgttccaagaagtaaagtgtgtaccttaatttttctcttatcttgcactgagcctgagattgctttgcaccaagcaatctgttttccaattttctttcttctttgttttcttttcttttctttgttgtaaacgtttcgtattgtgcattccaagttcttttttttttgtaggcttccaagttcttttttgtaggcaaccaagttttatttgattgcttagctactatttctttttctggtaactgtgagtaactacttctcttaaatgcaaattttcaaatattcgcttatgagataccattttcatagcgcttactatttaaagtaattttcaccttagtgatgaattttctcttcaccatttggcaaagtcaagttagactctcaccaattagccattagtatattttaggacaaaatacccttatcagtgaactaagtgtacaacagacgtgtaccgactagtttaataatcaagtttgggaagagatgtatgcaagagggattcaagtgtgtttgcttcaaggcaagatcaaaatcaaggatagataaaatatatttatgattcggtttaagaaaagtttacattcatatgtataagtttttttttctttcttaaccaggcatcgtggtctggtggtaaaggaacctcgactgaggcgcccgccacccgggttcgattcctggccaccagggaattaacatgcggacttgctttggcgccttagaccaccagttccagggggcccttaagtagaggctcaaagatccctgatcgcgggtttcggcccagtgaactagtcagatcactgtgtggtctggacactgagttatcaaaaaaaaaaaaaaaaaaattctttcaatataatttgttagattcaaaaaacgagttttgcagcatttaaacttgagtgatgtcttaatctcaaatagaaaataatatttattatagcgtaactaactaataaatgatatgtcttgttatgtttatgtcttagataggcactttgaatatgaagttgaatttgttcaaaactagatccattttgatagaatgtgaaaaataaatcaaatcaaaactcgatccatttctttaaatgggtaatttacggccagaccttaagatcatgttttatctttaccatttggcaaaatcatccacatttccatgttttagccataaaagcattttctaactaaaaatatctttgccagcgtaatcgatgtacaatatctgtgtacgaaatcagtgagacgttttagttaagtacaatatctagttggttaattaaaaattaataataataaccaaactgtatctttatatgattttttttttctttttatttgctgaaattatttactacagtatttctttatttatgaatttaaatttttttgaaaactttcttattaacaaatttattttgcccctatattaccaaacatatttattttttagcataatttatatttttttaaaaatatatataataaaaataagagtgtttgtctctacagcctaacagttattatcaatcgggccctaatattttttttaaaaatgttgataggcccaaacttaaatatatatatatatatatatttttttttgtcaaaaatg

SEQ ID NO: 15397 - DNA, 891 bp, Arabidopsis thaliana landsberg
taataccaaatttgtttctcactcagctgatccatcgtgtttcttgttatagcttcgtcgtccggagcaagaaccgttgtggaatgatgctttttctgtgcaaaatcaaaatattgttttagtgagctagggcacaaattaattcatcagcatcatcatatttatgaaaacactaaaataagaggttttaagcacgaaatgactacttttctaattaattatatttgaaaaagtgactaatttttaacttatttcattttaaatctctagctatttttagttatatattagataagaaaataaaagagaaatgagaatgaaaaaaatatacatttacactaaaaattcgcataaccaaaggataaactagggaggggttattggtttattgatttataaggaattgaaaatccaaacaaaaataatttgttattcaatcattgattttaaaattctaattaaaatcatgtgttattgatttgatgatttataaatactagttaaaattctttattattcgtttagtcatttgtttttggatttgagaatccaaattatgttttaaatggaattgaatggatatgaaagagaaaaatagaaggactcaaatccatgggtaaacacatgttattttaaaatccatatatcttgatttcataattaatagagattttcatattctatatagatttacaaatcaataaaccaataacacctccttaagctccgaagaattcgaagtttagcttatctttaaaccgtcttaataatgtatatatagaagggtttgtcctctatttttggcatccgcaatttaatactaaaaactctagttttatacattgttcttaagcacaacaaatatattattgatgtattttaagatcaatg

SEQ ID NO: 15398 - DNA, 966 bp, Arabidopsis thaliana landsberg
actggcaagtccccgatgtgctctttctattaatcttacaccctgcccaatcggcatcagaataaccaatcaaatcaaatgtggatccccgagggtaccaaagcccaaacttaggtgtataagccaaatatctcaagattcgttttacggccgtaaggtgggattccttagggtcggattggaatcttgcacacatgcatacggaaagcataatgtccggtcgagatgcacataaataaagcaatgaaccaatcatcgaccggtataccttttgatccacggacttacctcccgtgtcgaggtcgagatgcccattggttcccatgggtgtcttgatgggcttggcatccttcatcccaaacttgcttagaatatcttgagtatactttgtttggctaaggaaggtgccctcttggagttgcttcacttgaaatcccaagaaatacttcaactcccccatcatagacatctcgaatttctatgtcatggttgatagtagacgcggcccgatcttccgtgagatacgataatttgattgagtggagatctcgacgttgatgatccaaggctccgagcgaacggttccttgcaatcactacaccacggctccgttggttatcacccgtgacacatgaatgacctcaccacaaaggcttatcctgcaagcgcaatcaagaacacaagcaagaacaggaaagaaacgcaaccaaaattatattgattacgggagggggtctcacacgccgatgactgcgacactgttcgatgacagaattgatctaagcaaaacccaaacctaaatgtggtggaggctactgaataaatagagtattagggtgtgcgtagccctggactcgcccctaatgggctccgacgcgatacacggcccaacagacggtgtcgcagcaccaaaacagaatctgaacgctgacttgtttcgacgattcccgttgactccggatgaat

SEQ ID NO: 15399 - DNA, 2798 bp, Arabidopsis thaliana landsberg
tttgcctttctagtaatgttcttgtagcttactttttctctcttaacttgcagcatatatctcttgtacattctcaagtgtctctgaatattgaaggaagtaaatatacggtattcgcctactatcaaaattttacgtctctgcaatttcgtattttcctctgccatattatttttgcgctgaagatattgttaccaggcttactaacatgaacataactgttctagattgatgtagtccggtgtggatcaggaacctacaggctaagaatgaacaagtcagaagtggtagcagaaatacacactctacgtgatggaggtctgatgatgcaggcaagttttctgcctttgttctatactacaagacaaggacatacactgtgtcgcgcagaaaaaaacttctggagaatctcacgggcttttcttgttttcactgtcattgcagttggatggcaaaagccatgtgatatatgcagaggaagaagctgcaggaactcgtcttctcattgatggaagaacttgtttgctacaggtttctgctaatttttttgtgtgtttaccattttacttcacgtttctctgaagtcatctttagcttttaagctgtctgtcaattttggcttattcagaatgaccatgatccatcaaagttaatggctgagacaccgtgcaagttgatgaggtatttggtttctgacaacagcaatattgacgctgatacgccttatgccgaagttgaggtcatgaagatgtgcatgccacttctttcacctgcgtcaggagttatccatttcaagttgtctgaaggacaagccatgcaggtgaagaaccaattcattgctaaagaaaatttgtttcttacagttttgtagaaattgattaacccatccgatattttcttgacaggctggtgaactcatagccaagcttgatcttgatgatccttctgctgtaagaaaggccaaacccttccgtggaagtttcccacgattagggcttccaacggcaatctccggtaaagttcatcagagatgtgctgcaactttaaatgctgcacgtatgattcttgctggctatgatcataaagtagatgaggtaaacgctatttggttttcctatgtgattcaacttttctattaaataatttgattctgagattgctcatatgttttgcaggttcttcaagacttgcttaattgccttgatagccctgaactcccatttcttcagtggcaagagtgctttgcagttctggcgacacgactacctaaagatctcaggaacatggtaaacacttagatactattcgtaatccgttttcctttactgtgatcttgttttgagtttctagtcttttaatgctttttgtttataattctttatcagctagaattgaaatacaaggaatttgagattatctccaaaacctccctgaccccagatttccctgccaaactcttaaaaggcatccttgaggtgattagctactgcttcttattctagacctactgttctgtattctactctaaaatactttcttttcggtccattttttgcaacaggctcatctatcttcttgtgatgagaaagagagaggttcccttgaaaggctcattgaaccgttgatgagccttgtgaagtcttatgaaggtggtagagaaagtcatgcccgtctaattgttcattccctctgtgaagaatacctatcagtagaagaattattcaatgataacatgctggtaatatatggttcaattgttatcaaacggctttgttattaatagttatgtgtgaggaaacttaatatgcattttcttatcttgaaaaggctgatgttatagaacgcatgcgtcagcaatacaagaaggatcgattaaagattgtcgatatcgtgctttcacaccaggtttgtgattatccttcgcacaccaggtttctcttgtctcactatgttattgaactggtatgctcatcttttcttcttctcagggcataatacacaaaaacaaactggttcttcgacttatggagcagcttgtttatcctaatcctgctgcatacagagaaaaacttattcgattctcagcacttaatcatactaattactctcaggtgcgtttggttcctttatgttttatgatacttgtgttgacattcgtcagctgatgattgatatgttcgtgtagttggcgctcaagacaagtcaattgctcgaacagaccaaacgaagcgaacttcgttcaaatattgctagaagcctttcagaattagaaatgtttacagaggctggagaaaatatggatactcccaagaggaagagtgccattagtgaaacgatggaaaatcttgtgagctcatctttagctgttgaagacgctctcgtgggattatttgaccatagcgatcacacacttcaaagacgggttgttgagacttatattcacagattataccaggtaagagatcattcttcctaaccttatatttaaaattcgttttggagtgcaattgattagacagaatttgttttgactccattttaacttgtctcatgtcattagccctatgtcgttaaagaaagtgtgaggatgcagtggcaccagtctggtgtcattgcttcttgggagttcctagaacatttcgaaagaaaaaacactggcccagacgatcacgagatatctgaaaaaggaattgttgcgaagagtagtaagagaaaacgggggactatggttataatcaaatcgctgcagtttcaaccgagtataataaatgcatcattgagagaaacaaaccatagcc

SEQ ID NO: 15400 - DNA, 568 bp, Arabidopsis thaliana landsberg
aaatacaaattcgttaaatattatgataaaaaaaaaaaaaaatctcgctttcttttaaaaaacattttataccaaaatgatacttactagtagaaacatatcgtgtaggagtaaagcgtagacaccccaaatcgcgccgttcagaaagaggaaaaatgacaaccaaaatggcataaactgcacacttctcgtcgtcacaaccgttttctgatatgatcaaaatgaattagataaacgcgtatacatcgaaatgaccatctaatagtgataatagatacaatgacattgatatttttttggataaaaacatgctgaaaaacactctccatacaatttctgtctcttttagtggtggcttggtttacttattgctgaaaggaaatataacatttataatatataacagcccaagaccggtcctatggtagcttaatgaagcaacgtccttgggccctcagtttaaatacaaaaccaataggctcatttagaagtttagtcgtttactatgcaataattaatatttgcatatatttgtagagaaatgaaatagctattttaaatttagttt

SEQ ID NO: 15401 - DNA, 4776 bp, Arabidopsis thaliana landsberg
tgcagagcaaggaacacgtgtgatcgagtatacgagctacgcagatacgaagactatacctggtcattacgtaatctactgggagctacttagtagagaccaaagcaatgctcttcctagcgacgaagtcatggctaagtgctgtttggagatggaggaatcgctgaacgcggtttatagacaaagtcgggtttcagataaatctatcggtccgttggagatacgtgtggtgcagaacggcacgtttgaggagctcatggacttttccatctcgagaggttcatcgattaatcagtataaggtcccgaggtgcgtacgcctcacaccgatcatgaaactgcttgactctagagttgtgtctgctcatttcagcccttcgttgccgcattggtcaccagaacgacgtcgttaggtaaaactttatgatagatatcaaccggatgatgtgcggttttagaatataaagctctgtttctgatgctaattaagactccctgttagatttcttattaggctttgtgaattgtacaataaaatttgaagtacgtaccgatgtttttttccttcatcttctgttggaatccagctaataactagctttggtccaaaaaccagatatttttaaaatcagtatttaattattactacgccctaaattttctttaaacacggaatgttaatcaatgtgccctaatacttccaacataaaagtttggaaactaacattagatcttaaattattgttagatcttaaatttcaactgtgtacaataaattagatcttagattgtggactaccccaaactcgggcttctctacttagatcttctactaaatatttgggcttttacaatgggttcaattactttccctctcagggcttttaactagtttcggcaattcacaattgtaaaactgttgcaacatggctcattcagagataaagcccaatatcagtattggtaaatacacatgtttattttttacttctttttacacgagtttctagaaatgaatagtttttgacatgcaaacaattagtcaaatctcttgtcgaacaaattcagtgcgaaagcaatgtatacgaatcaatagatatgcccagaagataaaatgacaagttatcatgaaacgaatttgaaccagaataagaggagcacacacaaatgcttcgttaagcatatatgaacaaaacaaggccccacaaaaggaataaaaaattccttggtatgtgacatatcagggaaaccacactaactaaaatatttttacgaccttgaacatgttgaataattttttttcctttgatgttttaagatatactgcaaaacattatgagtacttgtataagatatatacacaagaaaaagagcataaaaaaacaaactacagaaacaggattatatattaaatgaagttatagataaattcataatgaaatgtctccttttttttagaatgtttctatttgacttaacaacaccttaaaattttaatagaatgcaacttaaccgaactattgtgactaaaattaaatttattttggaaacaaagctaaaacttcgaaagttactggagaaacgattggaaaacaataaattaaacaacttaatatgacaaaacaatgaaacgtgattttaaaaataagattaaagtaattgaccagaagaaagagtaaattaggctgagatgacaaaaacagcgattagaaaaagactatagaattagaagcgaagctggttcctcgctacgctccaagactaaccacctcgactaaaactacttctagtggcaatttattagcattttattgatcgtggttttacgtgcataatggcttttggctcaaaggaaaaaaaaaaaaacataaaaatatatttcgacatgtgcaatcaatctttgacaaaagagatttgctgatttgcaatcgcaacgtgaactattatatattaccatggaccataatgtattatacatgaaaggttagttttttttaatatatcaataagatattaattaagattaactaaatgtataatatcgaccgttatagacagagtgaattaacatagaacttttttcacaattttgacatgagctccatgcgctctaagacaagctttttttttttttgcttgtcttttatttttcttttgttgcaaatgtcttttaatgttatagtctctccatttcattataagtatagtttcagattttttcacatatattatattaagaaagaaaaaattggtttttgtccttatgatttttttcattgatcaaatacataaaattaacagagataaaactgaaacaatattttaaatttaaaacaacatttaaagtgtaacgaaggaagtaaaaaatgtttaccaactatatttgtcctatctttcttaaccaagctagcttatcttcactaattcaaagttgtcacgttgtctgtttgatttaatactaattcgagtaaaagcaaaagtatcttatggaaatatctgctaacactcgcaatatataaagatatatggttttaaacttttaataataacaactatatatatacatttttatcattaaaaccttttcacaccgtgcaggatggttcccattctagaccggtgaccctataaataatatgataatttccttgacaccatatcacaaccaaattccttagagaaaaaggaagagaaaggtcaaagatgttttactatgtgattgtccttcctttagctctctttctcttggcttacaaattattcttcacctccaaaaggcagcgttaccatctccctccctctccatcttactctctcccaatcctcggccaccacctcctcatcaaaccgccggttcaccgtctcttccaccgcctttccaatatccatggcccaatcttctacctccgacttggttcccgccgtgccgtcgtcatctcttcctcctcactggcaagagaatgcttcacaggtccaaacgacgtcattgtatcaaaccgccctcgtttcctaacctccaaatacattgcttacaactacacaaccatcgcaacaacatcttacggtgaccactggcgtaacctccgccgcatctgctccctcgaaatcgtctcctcaaaacgtctcgccaactttctccacatccgcaaagaggagatccaacgcatgctcacgagactctcacgtgacgcccgcgtcggcaaagaggtcgagctcgagtctgtcttatacgacctaacattcaacaatatcgtgaggatggttacagggaagatatactacggcgacgaagtccataacgaagaagaggcaaatgttttcaagaaactcgtcgccgatatcaacgactgtagcggcgcgagacatcccggagattacttgcccttcatgaagatgttcggagggagctttgagaagaaagtgaaagctcttgcggaagccatggatgagatcttgcagcgtttgcttgaagaatgcaagagagataaagatggtaacactatggttaatcatttgctctctctgcaacaaaatgaaccagagtattacactgacgtcactatcaaaggcctaatgctggtaagatatacgagtttatgcaaattagtgttggtagtatatataagggatctagggctgttcaatttgttaggttcattcagttttttttttggttttcagatcttctgtttttttggtcaacttcagatcttgtggttcacaaaaaaaacggttgggttttaaaagttttataatttggatttgaagtttttcgcaaaatatatctttaattattttttatattaggtagttagctaggtacagctatgaaatgtaaaaccgaataggtctatttacttttattccatttaggggcatctattgatttgatttaagattagttttacagaattggtggtatctatagaccacaccataccggaattggtcttgaaaagttatttcttaggatttgggacccatgcggctgtctatagtacggacaataatttattcttaaaaagtagaaacaattctgactattcctagtttcctaattcctactatgtagaaactattctgacccattttttcaaaatcgatatatcaatatggtttcacatttatacggttctagtttaacaagatttgttaattatgcgtaaaacagggcatgatgatcgccggaacagacacttccgctgtgacgctggagtgggcgatgtcgagcttgctaaatcatcccgaggctttggaaaaagcaaaactagagattgacgagaaaatcggacaagaacgtttgatcgatgaaccagacatcgcaaacttgccttaccttcaaaacatagtgtcggaaacattccgattatatccagcggcaccgcttctagtaccaagatcaccaacagaggatattaaagtcggaggatacgatgtgacacgtggcacaatggtgatggttaatgcgtgggctatacacagagatccagagctctggaacgaaccggagaagtttaaaccagagaggtttaatggcggagaaggtggaggaagaggagaagacgttcataagctgatgccgtttgggaatggacggagatcgtgtcccggcgccggactagggcagaagatcgtgacattagcgttaggttcgttgatccaatgctttgactggcaaaaagtcaacggcgaagcaatcgatatgacggagactccggggatggcaatgcgtaagaaaatacctctatctgctgggatcctctagagtcgacctgca

SEQ ID NO: 15402 - DNA, 1467 bp, Arabidopsis thaliana landsberg
  unsure (1)..(1467): unsure at all n locations
ttgagcacatgaaatacacaatgcttatggtttgatgtgttggtctttgaggacctttactccctagctggagttttccaaaatctgtcacattagtgtctcttctctatgcttcatatcaaccattgtctcctttccccttgcctttcagtttcagtatctctcatcacttgttgagcttgattcttgataacaaagattgacagaattggaatataaggactgttgttggaccaaaatcaaatgactttgaacacaattgttggatcgtaaaaggctttgacagaggaagattgcagcacttcttacacagaggaaatgcttgcttgaataagacgaataaggattctatgtgtgttgtttaggaccaaagcaaaagctcattatacgataagattacacttttgtcttgtatacaactttcttcaatgcaaaaaagggatacaaatattcgactaatacatgtaagaaacaatcaattggatcgtaaaaggaacaactgtcgactatattaacccacactcttcttcgtttccttgatctcaagctattgccgactgaatggtctcggcctctgtaggacgccaccatgacttctgaacagagagcaatccttctccatctttggaatgtgtcattcttacattccatttcatcgatttcaccatcttctcaatttctcctatcgtttccatgtcatctcttactatgaaagttccttgtggtctaagaatccggtctacttcagccatcacgcccaccaagttgcacctagagagaatttgtgtatacatagacatcaaagtttgcaatcaagaatatagagatagagacaaaggagatgaataaacgtgtatatacctctttttcagtgaagagaaaagatgatcagcgtgaaggaggtcgtaagtccgagggtaagtgctgaatgattcacaccaatcatgatagattccaaacaaaccacgttcgtatataatcggaagggtatcaggtgagtcgataggaactacattcatcacccacagtttcagatccttcaatgcagcagcaaaactgaaaaccaaaaagagatatcattaaaaacgaatcaagagagccaattttgttttgatgtaagatagtataagcttttgcttaccctccatagactgctctcatgtccatcacatttctaacataagaccaatcgattcccataccgttgaggtatgactttgaaacaatagtcttccagcgttcatggtctgctgtgaaatcctcttgtgcaggttttccatatactccttcctgagaatctaaccactgaggaaccgtctccactcnnnnnnnnnnnnnnnnnnnnnnnnnnnnnnnnngttttgatgaatcttctgttactttgtgaatacacgccccaagtggaacattcctgcatcaaacaaaaaaaattagcaacagaactgcattggattactattcaattgt

SEQ ID NO: 15403 - DNA, 2165 bp, Arabidopsis thaliana landsberg
  unsure (1)..(2165): unsure at all n locations
ttcaagcaacattaagtatatgaaacaaaagactgactatggaaatcattcaagcaacatcaagtactaatcatcaaacatggaacgattatattattaaaagacaaaatcttactcgaaattaccttgagaaagatgtcaatcatttcgtcaatgttgagttcccgctgagttgactactgattggaattatctgaatttgctacaccatcctcttccattaaagaaattctctcttctatgctcttcccatagacctcagctacttatttggctttagcnnnnnnnnnnnnnnnnnnnnnnnnnnnnnnnnnnnnnnnnnnnnnnnnnnnnnnagacacacgacgccccaattcttcctcctataatgatacatagacatcattaaaatcactgatgagagataacaacatcagtgttctaagtgcaaaatttgaaataaaagtgaaagactataccagctcttggtgaacttgcatgaatgatttttgtcctgatacgtgtttgtggactccaaggccaccacgatcactgtttctacactgtgatgcatttgagctttttcccatagcagccggagtgttccagtaaatccacatctctgtccacagttccttgacaatccaatacggccttacaccactatttttttgcttggctaacaatccctttaagccttttctttgcgatcaccaagaatccttctctccctagctcggtaagtccgatatcccacttgaacttcccctacacatatttgtatgaattagtataacagatgctgattcaattcagcataactatcaaagattcaaagctgaatcaacattaccgcaaatgctcagaaatatcgctgttgaatgcttataggagtcaccttccaactaaagtaaggtccatcaaatttggcccgaaatattccagcaatagtcctagacaatttccctttgtctctgccaaacctattacatcaaaacaaatatacattaatgatagtaaggtccatcaaatttatcaagctagaacctaaaataatgacgatataacatttagagatgctctcaacacaacaaaagcttcataatctaagcaactacatctcataccatatagtctcaacgcctggaattcgggtccgactaagacgtggaagatgctctcggccaggcagacccaacatatactcgaccatctcgtcatagtccatcggtggttcgttgtcagcatcagagtcaacattagggttttcatgaggaggcatttgaggttggggaatatgataaggaggaatttgatgctgaggaatctgataagaaagttaagcttagataaaatccctttagaaacaaagaccaaacataaaacaagttggtaatcaatcatacttgataaggatgcagatgttgataaggaggcggctgttgataattaagaggatgttgttgagcgacttgcggtgatggcaaagaaataggagtcggtgtttgtgacctcgctgggtactgagaaggaagcgttgctctagatgattgagtcactgaattagtcgcgttcgaagaataagggttggaggcatgagatgacgatcctcattcggttctctcacctcctccggttctcccaccagttctctcacctccttcggttctcccaccacggcctctacttgatttcccctttccagcaaccatcacggagaacaaaataatcaaattgagagagaggagattgagaaagatccaattgagtgaaaaccctagaacaaaagaatcagatcgagtttgaggagagaaaccccagagaaattcttagtgtcgagaattcgagatagagaaaatgaggaaagtgacttttcagtggttagtaataaaataaaaggagtcgcaaagtcgtcacaaagcaaaaaacattagtcttaacttagtcacaaacgaaaaaacacgagcgataatttaccgcctaatcaaaaaccctaaaaacattttcgcgtaaatacaatagtcgcaatttggtctcaatgtttgtcacaaaattcgtcgtaaggtagtggcaaacacgtcgctattttgtgaccaccgatatgagtcacacacacctatttaacatttctgaaggttaagaaaaaaaaacattagttataagtgttaatgatcaccaacacccca

SEQ ID NO: 15404 - DNA, 1893 bp, Arabidopsis thaliana landsberg
atctcatcgttttgttttgtataagaatatccatatttatatttagttttctgaccatatatatctaacttgtaaaaaaacaaattaagcattacctaccatggtatatttttcggatttatagaagtggcaaatgatttgaatcaatgggcagccatttgaaagataataataattttggtactaaagatatattgttgaaaaatgagaaaaatttactgagcaaattcatggcagcacaaagagtcccgccggtagcaatcagatcatctacgaccaatgctctatcaccggaatctacagcttcaacatgcatttccaaccggtcacttccgtactccaactcatactcttcaaatattatttggcctgattaaaaatcgtatagttaaaccccatactttttttgataattaaaccccatacttgatttgttaaacgataggtaacactattgttactcaaaatatcgcttgacatataagaataataaaataacaaagcatatgttaaatataaaagtttggaatggtgtttaacccggcaatttctttggtttacgaagaggaacaaattttgctccgatggctaatgcgatgggtgaaccgaatatgaaaccgcgagcctctatacctataaacaagcaaaacgtaaggaaaacaaaaaaatcagtcgtgtatatatatatatatatatatatattagcaattaaatcaatatgaaaaagacatgagaactctaattccccgactgttaaaagattccttgaaaacatttttgtaaaggctcgactttaagtggaaagtattgactttaacaaaagaaaaaagaaatacaaacgaggctctctttttttgtccttgtaacatacgcaagagacgggttcaagagcacatgccaacttacgatgatacaaaggaccaagtttacatggatttatacttgaaatatatgcaattcttttatcaaaaataaaataaaatgaaatttcttaatatctcagtcccttgaaactacctttttgtgtgtatgcggtaaaatttcttatatgatcgatcgttataaacatcgacagttacaatgacatcaaaattctttacacatgaaaatatggtccgaatatagcattgtttttcataaaaaaaatttactgttagtccatggttaaaatatatcaaatatgtgtttgattaaaacaacaaaaatacacagtcttcaaatagtatgaaacggccatgcgtatattagaaactatagaaacatatatgactacaaatgttagtggtttagttccaatgtcccttaaatctaatatcctttatgttgctaaacaataaatcataatactgtttttattggcaatgtcccttaaacctattattctttatcttttacgtcaactatttatatcgtttatattaggaatcttactacatagaaaacaaaataaacactaataaataataatgaataaataaacactaattaataatgtgatgaaccaacttatttatatggtattaagatgcttccaagttccaagtccagtcattcgacttggactagagcttaggtctaaataacctaaacgtgtaaaagtcgttgaataaaatagtaaaaggaaaataactacgtaacatcacccaacatataaataaagagagccgctgaataacaatgatgagaagaaaaatagatatataaggtataaacaaaactttatttaggggccgacccttttaaaaaggtggcatctataaatcaagtaatcaaccacccatttatccaaacaagattccaccacttaggaatgtctaatcagatttctctttggtttatgtttcactttatgaaatgcaacaatcaagttgaaattgattttcatttggtact

SEQ ID NO: 15405 - DNA, 3129 bp, Arabidopsis thaliana landsberg
tgcaggtcgactctagaggatcccctcaacagttctttgtgggggcttctagatttccccaacaaaccggcgtttcggcgagctttgggttatttttgttgagtaggcaattggaagtggctaactccgacgagatttgggttgtttttgccggtactcccattagattttcgttaagggagtttaagattgttaccggtcttccttgtggcaagtatccaaaagttcaaaagaataagaagagaggaactggtgggaagcagattccatactacaatacattgttcggtcttgaagaagatgttacggttgagagggttattacaatgcttacgaaaagggtggtaacggatcgcgatattaggttgcggtatgcttgtttggctctcgttgatggcttcttattgcctacatcacactacccaaaaataatgaaagatcaagcaaaaatggctgaggatctgaaggggtttctgtcatacccttgggctcgtctctctttcgagatgatgatgattttcattaaagagagggaagttgaacagctctccattacgtgtgtggcagttcaaggtcttctatacgctttgcaactcgttgtcttggaagcatcccccgccatacaggaaagccctcaaatagatgagtttgctgggtcagactcagatgaagaggccgccgttgaagtaggttcttgtcagggcgttgccctcaagcttggcaatgctaaagatgtggatgccaaatgcgaggtaatgttttttcacaataagtcgataacattttggttaccaccatagcatttgagttatagtttttaatagctttattatcgtaaataaagttgccactagagttatccgataatatttttaaatatgatgtaactatttatcatgataacgatttcattaacatattttatatggtaactattacttgcagtatcatgttgatccaattatattccccgattctcggttgaatcccgaagaagatttaacatggtccgacgacgaagatgatgttaaggttgagaacattgtgaagatggctgaggaaggcaagttcgaatgaaatgttttgtggcgggtgtatcccatctaagattgtggttgcgtctaaaaaaaaaaagaggtggcaaaaccaaggtggttcgtggcaggaaaacaccattcaatgctagatcagctactagtctgaggagaaagcatcaaagtcccattgaagaggaaggtgaagggtctggtggtgtagatctcgctgctttgtcctgcatgattgatgacaaactaaaggcacaagccaagaggattatcaaagggtgattcattggtttccggaaaatttgattgttgattctggtaatctcaaaggtgctgcttttggggaacatggtcctcaagctaacaaggaagccgccgatgctgatgaaaatgccaatccagtttcctctccggagtccaaaaacaaaattgctgatgcgaatgttaacctcaatccaccgtcgagtcaacccgtacctatgcagactgattttacccttccgtcttttcacggagaccaagctatatctgctgtagacgacgttgtttctttctacaactcggtggatgtaccggacggccagtcttgcgggggaacaaattttaataatgagaaggaatttcaggttagcggatactaatgatatcgggttaattcgttgaagaatttttttttctttcttaatcacgcctttgcgcaaggcgacgtggggatgataaatgatacaaccacagacgaacgaccaggttatatcgttagcggatactaacgatactgtgttaaattgttttgtacctaataatattctaacttattcacgttggcattgtagggcgacgttgagatgggagatgatattaccacaggcgcggacgaccagttggaaagatagttaagtttgttgtattacttataaagatagttaagattagtgaaatcttacaagttttttttgatgaaattaaatgattctcatccctaaacgttgttacttgttagcgtacttagacgttaacaaaccaaatatccgggcattttaaccttcttcttttaccaattcggttctatctcttctaatttccaaatgttgtcttggttgtagggcgaatctgacatggaaggcgacaaaaccacagttggtaacgaccatgttagataataaacgaagatgaataaatagttaacacggttttgtagtttttctgttgtcaatgcttgttaattggtaatcatactattatcgggtagttttctataagatctgcggggaacgaaaaagaattttgctttgataacatacttatccggtaacaaattactattctttttattgtaaattaggtcaataacatttctgcttatcttatacatgtgtgtttactaatttatatgtgcttatctcccatagtggtgaattaggtcagcgctaccctagagcctccaccgtcctcctgtcgaagtctgatataacagaagttagttgactaaatttcttattgccgcggttttttatttttataaatcagcactcagttaccggtttatggtggtttaacaattcatgatactactcgtggatttgatgttgcaccagatcgtgttgaggtatgttagaagtttaattatcttgttaagagaaacacacttgtgaatctatctgccagttaatgtttcaatctttatttttgcttgtagattagtggaattcaagtccatgtttcattgaaccccgtcattcagttgaaacccagttcaactgtctctgttgtcgttccaccaatcgttgtacccattccacttgcggtacacgcagaggttaatttttttttgcctcttatcggtaattttatttgtagctgctaaaggtttaaatgtcccgtttcaggctgctgacgattttcctatatattcttcccaacaccaaacacgtgtcagcgaggaggtttgttactagtttattatttttggttgcacttgttaggaaactttcttgttaaccttcagaggcattctataattttgttgaatccgcaaataaattttctattgttttatgcaaatcgttccagctcaacccggtat

SEQ ID NO: 15406 - DNA, 3177 bp, Arabidopsis thaliana landsberg
cgttccgtagattacagaacattcactacagagcattgatagtagcggatcacagggcttcgaatctggtttttcttgtacctcgcagagttgagcgccatatcgttcccaatagttaaccacaaatccttcaactcttccctctcgaactttggtgtagtttcctttccactggggaaaccaaacaatccttccaagctcctgatagatagctggtaacgctgctcgctcactgaaaaagtcaagaaccccaacccttcactctccagctcatctgctgtaagtccctgatacatctccacttgtagagtggaaagaaactctattgattccttcttgtaagcgacgtacgggtaagacatcagtgtctccagatgacacttctcgaataagtgctgtacgtcctccagtagccccagctgggctaaagtctgataacaagggtacctcgttccctagaagttgttcagctcgaaaagtctgatgtactcctctactgtaacttcatcaggcctgttcaacagcttttgtctttctgtgccatgactcaggctcatactcgacgtcaatatcttcgtcgatcaactcatatctactggtcattgctctttttcctctagcaatctcagctctcctctcattgcgtcgagctactgagcgttgggtctcagctctgaagctctcataagcctgtccctctctctttggtccagttgaccaagattcagcttcatcgacgttgtaatccatccatggaggattcgccactatagttactcatattgatttcctgaaaaagaatgtaactcaaagccaaacgttaatatgttagtccaaataaatgcaaacactaaaccggtcaagtacacggtcgagtattacggtcgagtacagtgaaattgtggcttcgggtatagcggtcgagtgaagatgaatgagagacggtaactgcgtggtcgagtaaacggcgaatggagagaagacggtggcggtttgaggagcggtcgagtgaagcttcacggcaagtgaacagcttgaggtcgagtgaagagatgaacggaggcgcagtgaatggcgaggtcgagtgaacggcgagaagcttcggcgaagtcgagttggctcgcgagaacgagagagagaaactctggccgtttgtcaaaaatcgaatgaagagcctctttatccaaattgcagggcggtctagtgaatggtggatagttgagagatggtgaagccggtccggcggtcgagtgaaagagagggaacgaagatgaggtcgaatagcggttgagtatggagaggtgagagaaagaaatcgaagtagaggttgaggggctcgtgcggtcgagtgaagaggaggcgagagcggtgagagatgatgaaaccggtcccatcgtcgagtggaagagagggagaaggcagtggcgtgagcggtgaaagctgaattgtggtcgagtaggaaaatggacgaagtggtgagggatggtgaagttggaacggcgaggtcgagtgaagaggaggcgaagttgagacggtgaaggtccgccggtcgagtaggcggcgaatagagaggagcggcgttgcgatcgagtgaaagagaggcggtgagagagatgtcgagtgatgtttggtcgagtgagagacgtgagggagagtgtgtatgcaaggtcgagtgaatggagaggaagagagatgatgtcggtggaaaaggatagggtgagatcgagtggtggagaagcagtcttgggatttcgttatctctaaaaacgcgtgggggaacaaaggtgagaggtggtgggccacgctctgtctgtttgtcctgaagcactgttctctgttgactaggaatgtctcagaaccttctgtaatcctctgtaaacttgataaactctctgtaagtctttgtagcttctgttggtcgagtataaatatgatttcaaaattttgagtttttaaaatcatcactaatactcgacccaactactcgatctcatggtctttgagtgcaacagaacttttttcaaattcttgaattcctttacactgacatactcgatcccctgttgctttgtagagtaaaattttaaaatttttactctacctccacgctgtttctctgttcctgaaaatcacaaacacagccaaaaacaaatcaaaaataacaagaaaataaaagttttatttacagaaacagtcttgggaattcctcccaagtgagcttgtttaaagtctctagcttgactcctctcactcattaagaagaaaatgcgtgatagagaggatctgcatagtcctctctaatctcatcatcatattcagcatcctctcttgagagatgcgtggcagaatactcaattcttctttcctcgaaataggcctctttctcttctggtggataatctatctcctcagaccatcttgaagtaaacttttatctcgggatagtgtcaatcccgcattttgattgagctttctcttgcatctgatccaatttactcttaagttcctcaactgtctgagctagcttctctatggtttcttcttgctcatcagatttctttttgagatctcgcaagtcaggtgtagaggttgtgcttggtctggtgattgaatctgaaggttgaggctgagccctgatcttttcttctagagctgtcctttgcgaagtttcgttgatgtcaaactgcagcttgatgtgcttcccaaggttaagacttattctcccgtctttgacatctatcatcgctcccactgaggctaagaaaggtctccctaggattagaggatccttaggttctacttccatctcaagcacaacgatatccgtaggcacttccactccattaatcattactagcagatcttttagcaggccgaaggattttcttgatgacctatcaataaggatcaaagtcaggtcgcaaggcctgtactgagtgaattccagcttccttgccacgaagagtggtattaagcttactgaagctcccaaatcacatagaaaattgctgaaaaccaattgcccaatggaacatcgtagagtgaaaggtccaggatcttccagtttttcttgaacactcctcttaacagtggctctagacggattagcttcacattcgtcttttgaatcttgatacatcttgatcctttccataattgaatttctcacatctttgt

SEQ ID NO: 15407 - DNA, 2137 bp, Arabidopsis thaliana landsberg
cttcgtttgcaatactagctgtgatggtctgatattcctcttcagtttctatgaactgccgagtatgggcgtcggtcccaccactcgatggcatcgaactttccctaaatgcaactatcaactagtcgctgccgacaagggtgagagacacgagtgctttaaagtcgcatgccctactcctggatttggcaaagacaaaatcagtggcacttacaagccagtttggttatataattccgctgagttagacctaaatgacaagcctactacttgtgaagttttcgattttgccaccaacgcttggaggtacgttttccccgcgtcccctcatctgattcttcacacccaagatcctgtttatgtagacgggtcacttcattggttcactgccttgtcacacgagggcgaaaccatggttttgtctttggatcttcactccgaaacgttccaagtcatctctaaagctccctttctcaatgtctctgatgaatattatatcgtcatgtgcaacctcggtgatcgtttgtgcgtatccgagcaaaagtggcccaaccaagtcatatggtcgttggatgattcagaccacaagacatggaagcaaatatattccatagacctcattatcacctcttctttgttctttagtgccatattcgcattcaccccactagcagttttggacaaggacaagttattgttttatgatagtacacacggggatgcattcctaacacatgatccagataccaaatcttatgatttgccttacacatctaatcgctgtgcaactgttgtttgttatttcccgagtttaatttctattttgtagacttgaatgattggttatttgtccaagcattcttttttggtcgttatttgtccaagcattctagtttctgattagtttactcactgggttatgaattactatgttttatcaatatcaacatcacattacaaattttcataaatttaatgttttgattataccatacatcaaaagtactaatgacgaaagaaaaaacattattcttttttttactctgtaatcatcgattctccaaaccgaaaagataacaaatactataaggaataagggatttgattataccatacatcattgattagtaaaggttagcttctgactaagggattttttgcggaaacataatagcttcttacaaaggcttctctacgtaacatcaatcttcttgttggtatacttatttagccccctttggatgaaagaaagttctaacaaagatataaactgaaagtaatatcgaccaaatataatcataatctaaagaaacaaaagcttataatctcatccgtacatgacagattcaaaattaagttcaggtgcgagcaaagtcatattcatatataaagctcgaaatggagggacgacctcggcatcatctctgtcatagttcttcttattccggtacggtttctattggtaaggcatgtaccgcattggccttctgaacctaggagccttcctgcacgaggcattgccgagtctcgtgagacgaagaagagaaagccatttgtgataaactgatggtaaatatgcagagtttaaacttacccgtatccatatggggaataaaaatacggaggcacaaagggtctgcgaaagcggtatcccattgaagggttgaaacgcccaggatgatactgtttcattccaggaacgtttgttctcttctgcaagacctgaaattattttaagccagatgagaaaacgatggaatcataaggggttttttcatggtaaaaagtgttttgtttgatggtatagtaagatgtgtacctttaattgacgaccatgtagctctgattcattcagttgtagagcctcttgtacagcttccacttcgacgaattctacatatgcaaatccctttggctgcccgaatttgtctgtcagaatggtcacccgatggacagtgccgcatgtttggaaatgctgctgaacttcttcaggtgtgcaagcgtaatcaacctgcacagtcaaatatgcagttatagtatataacaaactagcataaacccatggagaccttcaccgagcacacaaagagtaatccatcaaattaattagttcagcgtaacaagaaaacatagcaaa

SEQ ID NO: 15408 - DNA, 1736 bp, Arabidopsis thaliana landsberg
gaccgtagtcgtaaatttgttgttggctttttaacgtctcttttatgactattattgaagcctaaggggtagtagtcaatatactgacgataaatttggtgactaataagctacaatttgacaaccattttatatgactatgtgatgattacattcaaaatttggcatatttatattaatagttattttccgattagactatggttaactaaattgaaacacaaatcaaaaacaaaacaaaattatacagaaaatatttttgcacccaaaacgaaagtgaagacaacagcattaagtatttgttcataccaaattaaacagaaatagaaacatagtgacataaagtttaagttcaaaaaagagttaagacatctcaacttatgaagcagatggaaatggagctgaatcttgttgctgaagagtgggtgtgatagggtatgtggttgtccatgaagtgcggatctgtttgaagcagatacatggtataaaaagagattaggctagaagatcaactgcttataccatttatggtcatttacctatcttataaaggattattgttaaaatgggcactttttattcaagaaatttgaaattaggcactctgcttctgtccttcgaaaaagagtacttttggcgatggaaattgaccttcgtacccttctgttcgttacgcgggatctgggtaattcgaaattaggtctgacgtttgaagcgactgcttcgactgtagatgcgcaaatcggagaaataagggcaacgaaatatgtggatgaaaatgaaagtcgtcactgttgtgtggacatatttaggggtcttagtgcgtagtgtaccatttcacagaaggaaagaaccaaaattgattgtctctcagatccgaaaaatcttgaagtatcgttggtcaccgatcgaaacagatccgaagaattgatgaatcgaaaggtaatatgttgtcaaatagagattttcgaaatcgccgatgttgattgatttttggtagaatagttatgaatatttgctaatagcatccatacttgatttagtaggagatggtaagttgttaggaatattgatcaagtgaacttcaatttatatgtagattagtgatttgttaagtgtttgtgtttgtcatgtttgtcttgatttaaattaacgcaagtgccatttgtttttgtatggcttgttgcagggtgttgatgttccagtttttgtcatagctgggaagtgggaatgttcacaacaagggaagtgggaatttgtgatagaaaatgatcgcttcgccaggagcatatgtgttacttctgatatgacgtttagtgaggttgaagcggcagtagctcatgagtttgatgttgatgcaagtcaatggagtactaaattaagttactggcttccagagcaactgtccattttttcaacgtctaaaagacctcctgtcgctttaaatagcaatggtgcactgaaaagtttcttgcgcgtaaaggagacagaagctcatttaaatttttgcctctctattgagtcaagagttggtggggacatcctaaaaactgatgggcgtgcgcttggggaatgttctggaactgccaaatacattccaagggagcaggagagtgatcgagttgagtctcaagtagtcaagtttgtcactgctccaactacagagaccaacggtgatctagatgaagggacagggaaatacttgcaaaatgaggtggagggagttcatgttgagt

SEQ ID NO: 15409 - DNA, 661 bp, Arabidopsis thaliana landsberg
ctgaatacactacaccgagactgctaacgccattgtagccatgaaagtattgtcgatgcaacattctacgccaccaactccgttccatttcttctgcggcggttgacattgtacacattgcttccgttccaagtaagaaattttatttttgtttcggatttggttttagcctctgtaattgtgcaaattagactttaccaatataaaaaccggtcacaattgattttcttaatggtcttgagtagacataacaattgaagcgaaaagagattgaacaagactcttgtcttattgatctgtggtatcgagaaaagggtaatcagtgtaaccagcaacaggatcagaactgtagaaacttggtctgtcttacttattcagcggagcattgagctcaaaccttttaggcaaatcaggattagctaagaacaatcttccgtacgctacaaaatctgttcttccctctgccaccgccttgtttccgtcttctcttgtataacctccggcgacaatgaacgttccattaaacgcatttctcatcggcgtaagtgattccctgcactcgaaaatctcactgacggttttcatcctaggctcaatcatgtggcagtagattttctcgaatctgttgagagacttggtcatgttaagctctaaatttttg

SEQ ID NO: 15410 - DNA, 1349 bp, Arabidopsis thaliana landsberg
atttaattttttaaaatgtaatacaccacaatattaatattattattaattaatattataagcaaactccttgctcggaacaatagtttcgagccggtttagctttctcggttcgagatatccaaccgatcgaaacaggctttcttccttttttaggtaagaacacgaaatgtcgtcgagaactcaacttctgttcttgcacttttctaatgcccttggagctgcaatatatagaaaattagtattagcaaagattcatagtataattttacaccaccagttttggattaaacaatactaaccaagcccgattgcttctgatcccttcattattcgtatacgtttgcatgaatcaacaaacatcctaaaatagtccaaacaacatgtaaataaatattttgtatagacgtatttataataataattcatatataaatttaaagatataaaaatactcactcccacggtacgtctcctacaagcatccagtcgccatctttatcttcatatgttggaacataatctgatccgtttagaagatcgatcaatttactctcattcatgaaatctttcattccttgtggtccatagttgcctgaaaaataaaatttcaaatttcaaacaatatatgataaaaaggatcatgttttagtagatagatatattgtcaatttttatttacctatggtaaaagagctaaacattttgcttaaggcgttggagagatcttggtaagttttgtagagtttcaagtcaattttccgtaggtacggtgcaccgtccatgctaaccttcacataagccacggtggcacatgcggaggcggatgaggtggctccactgctgccagaagtcttatcgtttccttcggtggcatctccggtggtcggtttttggccggacatgacgttcttgcggaaagatcgtaccggtggccatcccacaacttgtgccctgaaatttcgtaatgattttttttttttaatttcaataatactcattacttctttttttgtaaaatgtttgtaaatgatctatgtgttctacacgtgtcggatgttaggtggttgtatattccattttcatataaaccatcaccaattaaataaaaataatttccgacaaaacactctttatttatatatttagtctttttcttctttttttctttgctattatttttcatcaaattgatatttctgtttttgatattttttcaaaagactcgaatattttttgccgtaaaaactgattaaagtactaaaaagaagaggtatacctttttatgcgagtggtaaaaatgattcatatttcacgtttgattataatttattttgggtggataaatt

SEQ ID NO: 15411 - DNA, 6796 bp, Arabidopsis thaliana landsberg
gtcatgcattgactaattaagggttactaattttttctgacaaaacatatagagcgattcatatggagacaacagctgctacaatcttgactgtccaggctttgttcaagtgaataaagatattgcccttggtgcagccctcaacactatctcgacctacaatggtacccaatatgatttccttctaactattgagaaggtataatttatctacaagtactgaacaaacacaacttatagcagtttcaaaaagagtgtcatcactaaattgagctactatacctattttaggaacaagataccggactttggtggcttaagtttgatactcatctagtcggatactggccaagctttctagtcccgaagctagcagactcagcacggatgatcgcttggggaggtgaaattgtgtatgatgctagtggccaaaatgaacatacgcttacgcaaatggggagtggccatttcgcggaagaaggatttaagaaggcggcttatatcaataacatagagtacatcgataaatctaatcatccgatcaaaccctttcctcaaaatcttgaagcttctgttactcggcctgaatgctataacctcaaggttggctctagccgaaggtggggaacttacattttctatggtggacctggacgtaaccctcaatgcctatgaaaagtgacatgatttttcgaaatttctttagaaaatgtttgggacaacccttgtgattgaacttaatagcgttctaaagatgtaaactatttaagactaataaatggttttgcatttgagataaaacaaaaaagatcatatcaatattttaataagcaacacgtttttcttgttaggtcataaaacgtaacaagtcggtgtcactaatttacttatcaagtgataccttgcacgatttgtaacttgcagaaaaaagaagatagaaggatatgataaaattttatgcatatgtagaaaaaaaccttgcacgacaccttccgttagatcgatcagctttgacttatacgtttaaatttgcgtttttgtcattcacagagaagaatatgctttacacttatcctctctttcttatttctatattcttgatgagtaaagtaattgacaccaagatactgcatttctatataacccatgactacaagtttcctctgttttaacaaaaaacgaaaaaaacaaacaagtttcctctgtttaaatatcaatcttcctgtttatgttccgctatcccaaaaaatgggaaactgcctttcaacctctgatccatctcatgaagatgtatcaaagaagcttcccaaagcacttcccgtcgatgctgcattcaagtttccttcaccgttacctaattttactcgaggtttgtattatcatcggttcttactgatctctctctctctctgtctcccaattagttttgataatcttgatttcacttgcatcatcaggtgatggttttgcgaaaggaaccattgacttaggaggtggtctcgaagttagtcaagtttcgacattcaacaaagtttggtccacttatgaaggaggaccagacaatctcggagctacattctttgaaccatcctcaatccctgccggtttctccatccttggctactacgctcaaccaaacaaccgtaaacttttcggctgggtactcacagctagagatctgtcaagcaacaccttaaaaccaccagtagattacaccctcgtaggaaacaccgagtcactcaaaataaaacaagatggaaccggatacttctggcaacccgttcctcctgatggatatcaagccgttggcctaatagtcacaaactcctcacaaaaaccacctttagacaaactacgctgcatccgatccgatttaaccgaacaatgtgaagctgatacatggatatggggcacaaacggagtcaacatctcaaatctaaaaccaaccacaagaggaacacaagctacaggagtctatgtaggtacatttacatggcaaacccaaaactcctcgcctccatcattatcttgcttaaagaacacgaaactcgacttctctacaatgccaaatgggtcccaaatcgaagaattgttccaaactttttctccatgtatctatttccatccagacgaagaatatctaccttcctctgtcacttggtacttcaacaacggagcattactatacaagaaaggcgaagaatcgaaaccaatccctatcgaatcaaacggttctaatcttccacaaggaggatcaaacgatggatcatactggctagatcttcctatagacaaaaatggtaaagagagagtcaaaaaaggagacttacaaagcacaaaagtgtaccttcatatcaaaccaatgctcggagcaacattcacagatatatcaatctggatattttaccctttcaatggaccagcaaaagccaaggtcaaattcgtaaatctaccgttgggtagaatcggagaacacattggagattgggaacacacgacgctacggatcagtaatttcaccggagagctttggagagtgttcttatcgcagcatagtggtggaatttggatcgatgcttgcgatttggagttccaagacggaggaaataacaagtttgtggcgtacgcatcgctacatggacacgcgatgtatccgaaacctgggttggtgttgcaaggagacgatggggttgggattaggaatgatacggggaaaggtaagaaggtgcttgatacggggttagggtatgaggtgattgcggcggagtatgacggcggaggagtggtggagccgccgtgggttaagtatttcaggaagtgggggccgaagattgattataatcttgatgatgaagttaagagtgtggagaggatattgcctgggcttttgaaaaaggcttttgttaaatttgtgaagaagattcctgatgaagtttatggtgaagatgggcctactgggcctaaacttaagagtaattgggctggtgatgaaagttgatgaaatattggtttgtttgtttggtttgattctttgtatataaaattcttcctaaaccttaatgtaaaactactatgttttatatgtaaataaattaacattgtgtggctaggtaaaattttttttattggaaactgatttgtttcataaattcataataaaacccttcagatacaatcataagccaaaaaagaaaaccaaaagtacaattaagttctacaagaagtttatgaaaggaaaaacaaatattttctttttctatataatcaaatcattcactatgactcatacgattttgtagcttttttctcaaaattttagaaatccagagatccacattgtttgctctctatagattttgctacagatccaggcttctttgtttccttgttatgatcaccatttacgcctcgaggtcttccaatacccatcttaggcaaaccacggttcagtccttccagcaaaacacaagctttacaccatttctgcatatcatttgtaatccaaacaatcaaacactatatactaactctaattatggaaacaatttacttgatgtgataaaagagaggtctcacctggctagaaatatacccgcatcgctcacacgtcccttgctcaggcatctttgtggttgttgcaattctaaaatcttcaccagactttatgatgtccagaatcgcccttggcctgcactttgtgtaagttagagatctctagttttcttatttcattctagcggatactaaacaaaagggttgagaaagaaccttattctttccaaatctttgatgaactcacgggcaaacccacgatatgcattaggagagtaaatgcctgcaaactcaaaaaaaaaaaaataagccataaaaataactagagattggctgaaactataacttaggaacagataaaacctacaaaaaatcgatgattgtacacttacattcagtggagaagtaatccagcttcttgaaataagcatacgtaaagctacgttaaggtatcacaatatcttttgttgacaagtataagcgatatatacaaaaggattatgtagtgaaggatatatgacaatctccttttcgtatgtatacttgaaaggtttacatcttggaatgggaccaccgctggccatacacatcagggattaaaactgttgtcgtcccaatgagtctcctatgaatgctatggtcttgttctgctaactaagaaaaaacaaaagcaaagattgtagtaagcaaatttgagatactttcagaaacttgctctgctaccacatattctcacaaaatgcaatctacttacatcacattacagaaaaaggaacatgcataagaatgtctcattggagaaaatcttccataccaaccttgtcaagaaattatgaatggggaacatgaataggaaactaaaaagtatcacaaaaccagactataaattctttagatttcaaaagctttggatcataatgttactgaatagtataagacatagccaagaaatgaatactaaaagctgtgaagagcaaataaatacctgaagaagatgaaaactgacgttatacatcaaaaagagaatcatgaagcgagttttcctcagaaaccaggagtaaaatcaccaaaagaatgatgataatcaaggcaagtgatacactccctctgaatatgtgactttttaccaccagacatcttagagattatcatcaacaaagaaaacgcttaagctcttctatatgaattgcattggttttaattttgttccaagctttttgtttgacaacagttttgatacttcggaaaagagaagtaaataaatataaacataggaagggaggagctacatgtctactatttttattttataagccaatcagggcgttccatgtcataccccactctcacctctcgggcaatttcacacccactctcaccaatcgcgtgatgagcgcgtgtatacgttttctgtgggttctaacccaccaaatggcttgttttgaaacacactcgctcctttaaaaaaaagcctcgagtgcgtgatttcagtgtctttctcctttaattccaattcaaacccaaccgaaatcaattgaatttttcaaaaccatgtaaaccgaaccgaaattaaaacacaaacgacaaactagcaattgtcacttccactattgatccaactccgacgaaccagattgataattttgattcgattccacacagataacatatagtccaaaccaaacgcaattcataagagagccaaattattacgctatgttcgaagcttttttaacttgccacaaatcaattcacaaaataagaaattgtgctcagaaattttcagaagaattctcgatcataactttatgcggtggtggtggctgtgaatagccaacggagattgctccatgagaaattgaaccggcatcgccgccggtttcattgtccacatagtaactccgattgctgtgcgaatttatctcagtctcccttattgcggtaatggtgaaaccagtccacatatattctaatcaatggattattgggctttttatattaggcccattaaattcatccggcttttaaataaaatgagttttgtgatagtccgagaccattgcattcctcagtgaatacaacaacattatctgtcttactaaatgaccatatcaacaaaaaaaaatcgacttgtttgtcaataaataaaaattcctcgatttccatattcatataaaagaaatagataccaaattgttggcaaaaacaagcaaataatacatatttgtggggagagaaacaaaaaaaaaagctacactttaatagaaagctataacatattgttgacttatgataacttgtaacgtgacttcacacgcgtagtagtattacttaaaacttaggtcacgtgaactggatacttatgaaccgagtcaccccacgggttacccaccactgactcgttagccggaatcgttctcaatgctctccacacaatactattacatttaaaacccgacccaaacgccaactgccaaaccctatctcctcgtttgacccgacatttagcctccacgtaagccagctcgtaccacagcgacgagcttgaagtgtttccaaagcggtgcaaagtcatccgagacggctcaagatcaaactcactaagtccaagacctttttcaaccgcgtcaagtaacgctctaccaccagcgtgaatacagaaatgcttgaaacatagtttaaaatccggaacatatggactaacctttaaccggaaaagcttactctttaccaaaaagaggataaaccggagtttttcagataaaggcaaaacaagcggaccaagtgctgttagattcgtctttaacgtgtcaccagcaacaaccgttagttctttagagagtgcgactccaacgatacctttactatcttctttttgttcagcacaagtgtagtgtttatcgctagagcctttgtgagtccttacaatatgagtcaattcgtacttagaccggactcgggcttgactccggtttgagagcataaccgcagcgccacctactcggaatagacagttagggactaacattgaccggtcgttgcctcgatacatgcttagagtcatgttctccgtactaacaataactgcgtaggtattagggtttgcctttagtagatttgtggcgaggtccacggagattcctaaagaaagttcaagaagctatgaagagtggtgaactctaaaaggaaagatagaaactggggagttggctgataaagaaggacagtaacgattgcggaatat

SEQ ID NO: 15412 - DNA, 1222 bp, Arabidopsis thaliana landsberg
cctggtggagttaaacagaaagtcatcaaaataattattttatattaagacttaaaaatgagatcaaagggatctaagaagatagatatggagataagtagcttcttcacttgagagggataaacctggaggcattggtagcaccaacaccaggcctaccgtgctttaccggtttgtatgagattgagaactcagccaagtaatgtccaatcatctccggcttgatctcgacttggttaaaagtctttccgttgtacacaccaatgatgcttccaatcatttcaggcacaatgatcatgttcctcaagtgtgttctcactgatgctggcttctcaccagctggtgcctccattttctgctcaaagacacaaaaatcattgactctttaatattttaaaaccatttggttgcagagaaacagcacattattctatatatggatacataataaggacaatagcacaaaagtggggtatagattatctgagttataaaaaaaatgacattatgtatagtcgcactcaagacattctaagacataatctttattgtttaaagccatttggtcacaaaaatcgaacgcaaagttaagtaacattatcgaaaaccgggtatagattatctgaattagtcacacaagactaatgcatagaatataaaaacatgctgataatcttttaactaagagggataacacgattctattagccataaaataaaccatcaaaatcgctcaacttaatgagacatataaacatacaagatacacaattcctagatttggacaattgaatatgttgttcaacaaacgtaacatttaattagtgatgtgagaaattttgattttaccgctttgcgcaatttcttaatcaaagccataggtttcctggtcaatcctctagaaaaccttttaaagataacaaaacacatcatcagtctcacaaaaccaattagacaaaagcgttttgtttggttcaaagaaagaagctgaccttctgcgaatacgggtactgaaatgtttgacaagatcttcggtggacatgtcgagaagcgcatcgagatccactcctctgaaagaaaacttcttgaagattctctttttcgcaattccagccgcaacaacctctggttccatatccgcctatggattcacaagaagagacattacatccacaatgttggaatccttaatcacgaaatagaatttcatagagacaaacat

SEQ ID NO: 15413 - DNA, 3055 bp, Arabidopsis thaliana landsberg
  unsure (1)..(3055): unsure at all n locations
gaagaagaaagaaaagagagaggcggctgtttttaggtttttaggtatcgatgatgctctgataccatatagagaatatagaattggatgttttgtattgagatgatttacattgtttatatacagactagatattctagagacttctaattacagaatatatagtttacataagtagaattgtgattgatcttgattgatccttgatatgccccctcaagatggaggggtcttcgacactccaatcttgtttgtaagaagttgaaacgtggaacgaggtaatggttttgttaaagcatctgcgagttggtccttggtagaaatgtgtttgacacgaagatgaccggcttgtatttgattcctgataaagtggtagtccaaggctatgtgcttcatacgtgaatgaaacacgggatttgcgcagagataagtggccccaatgttgtcacaatatatgaccggcgtagaaggtatggagatgcctagttcagtgagcagtgagcagatccatgacagttcagacgnnnnnnnnnnnnnnnnnngatattccgcttctgttgacgaacgagctacgcctttctgtttctttgatgaccaagaaatgggattgcgaccaaggtagacaacatatgcatttgttgagactagatcatcgctgtctccagcccaatcagagtcagagaaggcatgtagagtaagaggagtattacgactaatgaagattccatgtgttggagttccagctagatatcggagtacccgttttacagcttgccaatgatctgttgagggagtgtgcatgaactgagagagacggtttacagcatacgatatatccggtctcgtgaatgcaagatactgaaggctaccgacgacacgacgatattctgttgcatcggggagtttggttcccgagttcaatgtcagcttgggcgttgtggccattggagttgcaatgggtttggcatgtagcatgttgtggcgagccaagagatcaagaatgtaacgtcgttgactcaagtgtagaccggaggagacacgttttgcttcaataccaagaaagtaggacaactcttcatggtccttgaccgagaaacggttcgctagcgccattagtgtttgttgaatcaaaccattgtcgctgcccgtaacaagaatatcatcaacatatatgagcatatagacatacaaactatctttcttcagaatgaatagagatgtgtcagctagcgaattcgtgaagccaacagacagaagatagtttcgtagctccatgtaccaggctctaggtgcttgtttaaggccataaattgctttcttgagatgacacacataattgggtttgtctttatcaacataaccaggcggctgtgacatatagacatcttcatttaacgttccttgaaggaaggcgttattaacatcaagctgacggatcggccaatcgcgtttgactgcaacatctaaaaaccaaacgaattgttgttgatttaatgacggggctgaacgtttcaatgtagtcgagaccggcttgttgtttgtaacctttagccacgagccttgatttgtatctatgaacagagccatcaggattaaactttgttcgataaatccacttacaaccgatgacattgactgtaggtggcggagaggggaccaaattccaagtgtggttggcgatttgggcgttgaattcatcagacattgaatgtctccaccgatcatccttgagcgcttgagccactgttctcggttccaagtctgacgcagcaagcgtggcagcaaaggtgtatttgggatttggcttcacaatcccagattgagaacgggttgccatcgaatgtggtggtggaacgaccggaactggttggactgtccgggtagacgaagtaggggtggacgacgaagttgagttagcagcggcagaggtagcagcggaggtagatgaggtcgtcgtctgtgtttgggcttcaccaacatgggctgacccagagttagtgtgggccgaatttgagggaataggactatgatgggcttgtgtagcggattggacctctgcatttgttgattggtctgatgtagggcctgacgaatccgacgatgtaggtgcagaatcagttgcgttttccagtggcggtgacggtgaaggaccaaagaacggtggcgaatgcggtggcgaaggcggcggaggctggacaagtggcacatacacagtcggaacagactcatcggatagattatgaggaggggttgagacagatttatttggagatgattgagcggagaacggaaacgtgttttcatcaaagcgaacatggcgagagacatagatgcgttgagtttgtggttgaaggcagaggtacgcactttgagttaatgaatacccaagaaacacgcacgaagaggactttcgttcaagtttggtggagttgtatggtcgtaaccaagggtagcagagacacccaaacgttttgagtttggagtagttagggttggtttgaaagagcttttggtatggtgactgaagtgagagtgtgggactcggcattctattgatgagataaacggcagtggatagtgcataggaccaataaatggttggcattgaggcatgagtaaggagagatagcccagtttcgacaatatgtcgatgacgtctttcggagaggccattgtgttctggagtgtgtggaggagtagtgagatgacttatgccatttgttgatagaaactcccgaagagctatgtattctccaccattgtcagaaaataaagttccaatttttgtttgaaacctattttcgactagagctttgaatttgataaatgtttctttgacatgagactttagtttgagaggatagaaccaagtgtagcgtgtgtaatgatcaacaattataacataatatttataattgtcaattgacatgatgggagatgtccacacatcactaagcaaaatttcaagaggacgagaacaaagacatggaggtttgagagaaaggtaatttgtgacttttattaatggaacaatctctgcaaagagagtttattt

SEQ ID NO: 15414 - DNA, 2989 bp, Arabidopsis thaliana landsberg
ttgcatgctcaccctttttctctacgcagttagtttttaatgcgttagtcacaatgaccgtttttctacaagttggtgcgacgacggattctcttcatgggaattatctgatgggttctctattcactgctctctttagacttcttgccgatgggcttccagaactcactcttactatctccagacttggtgtgttctgcaaacagaaagatttgtacttctatcctgcttgggcatatgcgattccttcaattatcttaaagatacctctatcggttctcgattcattcatctggacattactgacatattatgtcattggttacagccccgaggtcaaaaggtaaacaacatttttgaagataccttcaatgattaatccaaattcagtaagtaaactacttctaatggtaagtgttactttccttcaggttcttcctgcagttccttatcttatctacattcaacctttcttgtgtatcaatgtttcgcgctattgcggcaatctttcgcacaattattgcttccacaatcactggagctatttccatattggttctctcattatttggtggcttcgttattccaaaatgtaagtttccggaactttcttatatcaagttatacttctgcaattttattattataataatccacttgtgaggattggtaggcatctagtttagactatttctaaaaatgctcatctttcagcatcaatgcctgcttggctgggatggggattctggctttctcccttgtcatatgccgagattggtctaaccgcaaatgaatttttctctccacgatggagcaaggtaataactcttcagaaggctttcacacaagtctagtaactctagtctactgatccgctttatattttgcaataggtaatctctagcaagactacggctggggaacaaatgttagatattcgtgggttgaatttcggtaggcactcttactggacagcttttggtgctttagtcggctttgtcttgtttttcaatgccctctacgtgttggccataacgtatcagaatagtaagttcatcacacatgacaataaataactctatgaagtgttttccatctaacatatgataagattatctttgcaagttaagatccccaaagatcccgtgctatcatctcacatgaaaagtactctcggcccatagaagaagattttaaaccctgccctaaaatcacttctcgagctaaaacaggtatctctttttgtcagctattccatcttttctatgttttactaggtcagtggcttgcgtaatgacaagatatcttttcacatctttcgtctctttttcataggaaaaattatcttgccttttaagccactcactgtcacatttcaaaacgtgcagtattatattgaaactcctcaggtaaactcattgtttaagatcagtgtgaatgttttgagatactaaattctcaaacaaagcacaagtttacatgtgagtcacgttcctcttagggaaagacgcgacaacttctctctgatataacaggcgcgttgaagcccggagttctcacatctctgatgggtgtcagtggagcagggaaaacgactcttcttgatgtcctttcgggaagaaaaactcgcggtatcatcaaaggagagatcaaagtaggcgggtatcctaaggttcaagaaacatttgcacgagtatcaggttactgtgaacagtttgatattcattctcctaatataactgtggaagagtctttgaaatattctgcatggcttcgactcccctataacatagattcaaagacaaagaacgtacgtaattacactctcaaaacgaatcgacttaaagaaattgtcagaacctttatctgactatatctgggatctggcttcaggaactcgtcaaagaagtcctcgagacagttgagcttgatgacatcaaagattccgtggtgggacttcctggaataagtggtttatctacagagcaacgcaaaaggctgacaatagccgtggaacttgtttctaacccttccatcatatttctggatgaacctacaacagggctggatgcaagagccgcagccattgttatgagagctgtgaaaaatgttgctgagactgggagaacagttgtttgcacgatccaccagcctagcatagatatctttgagacatttgatgaggtaaaatggctgaaatcattgatttaaccgcattaatctaaactttgatccccctagcagcttcttattcccttaattgcagctgatcctgatgaaagatgggggacagcttgtctactatggtcctcttggaaaacattcaagtaaggttatcaaatactttgaggtcagtttgtctacaatactagactagtttcatctcgcctgggttcttagaaaaaaaactaacacttagagttctatttattaacagagcatccctggagttccaaaagtccaaaagaattgtaatccagccacttggatgttagatattacttgtaaatctgcagagcacagacttggaatggattttgcacaagcatacaaggattcaactctgtacaagtgagtctttatgcagcaatcctcataatgtttgtatgtgtgcgtcaaactatcgttcttagtgcctggtttggtctttttgtgcagggagaacaaaatggtggttgaacaactgagttctgcgtctctgggatcagaagctctgagctttccttcacgttattcacaaacaggttgggggcaactaaaggcttgcctttggaaacaacattgctcgtattggagaaacccttcacataatctcactcgcatagtcttcatattactcaattctctgttatgtagccttctcttctggcaaaaagctaaggacatgtaagtctccgctccccattttgaagtatgattgtttgcaatcaaattgtggaatcactggctttctttttttttctggggtaaagctcgaaacttaagttct

SEQ ID NO: 15415 - DNA, 2251 bp, Arabidopsis thaliana landsberg
agaaatatcacgaagctagggataactccgaagttcaaaactcaaaaaggccaaggttgaccaacgaagaagaaccaaggagttcgaaggggaaaatcaatgtaatccttggaggctccaaactttgccgagattctattagtgcaatcacaaagcataggcgaaatgttctacttaaatcaagtttgagtgaagaagttaaataccaaggcgcttcaatatcatttgacgaggaagaaacgcggcaccttgaaagacctcatgatgacgctctagtcattacgctggacatggctaactttgaagtgtcaagaattctcgtcgatacgggtagttcggttgatttaatctttataggtactttggaaagaatgggaattagtcgggtagacatagtgggaccttcatcacccttagtggcttttacaagtgaatcggcaatgtctctcggaactatcaagctaccagttttggctggaaagacctcgaagattgtggattttgtcgtgttcgataaaccagcagcctataacatcattcttggaactccgtggatctatcaaatgaaagcggtcccttctacttatcaccagtgcctcaaattcccaactccgagtggagtggaaacaattcggggagatcaagaagcttcgagaacttgttatttagctaaccaccgattaacaaaacccgcaaagaaaggagtgatcccgagatttcctagcgggcagaaagtagatgatgtcgtgatcgaagtaattctagagcagataaaccagatcaaaaagtccgaatcggagctactttatcgggcgaagtaaaggaagccttgattgagctgttaaaaaggaacaagaaatcatttgcctggtcggcagcagatatgcttggcatagatccaaatataatttgtcacgagttaaatgaagacccgagtttcaaaccggtgaaacaaaaaagaagaaaactcggagtggagagagcaaaagcagtaaacgacgaagtggataaacttctaaagatcggatctataagggaggtgcaatatccggattggttagcaaacaccgttgtagtcaaaaagaagaatggaaaggatagagtgtgcattgactttatagatctcaacaaagcttgtccaaaagatagtttcccacttccacacatagatcgtcttgtggagtcaactgccggaaatgaattgttatcctttatggacgccttttcgggatataaccaaatcatgatgaatccggaagattaagagaaaacttcatttatcacagataggggcatcttttgttacaaagttatgccattcgggttgaagaacgcaagagcaacttatcaacgggtggttaatgagatattcaacgaacatctcggaaaaacaatggaagtctacatcgatgatatgctagtcaaatcattgaaaaaggaagatcatgtcaagcatttagaagaatgtttcgctatccttgaccaatatcaaatgaagttaaacctggggaagtgtacgttcggagtcccatctggtgaattcctcggttatattgttacaaagctaggaattgaggcaaatccaaaccaaattaacgcctttctcaatatgccatctccaagaaatttgaaggaagtacagcggttaagcggtcggattgcggtattgacctgtttcatttcaagattaaccgataaatcattgcctctctatcaaattttaaaagggaacaaagagtttctttgggatgagaaatgcgaagaagcattcggacagctcaaagcatatctgaccactccacctatattgtccaaaccagaagcggatgagaagctttatctatacgtctcggactcgggccatgtagttagcgtagtcttgatccgagaagaccgaggagaacaaaaaccaatttattacataagcaaatccatggcagatcccgagaccaggtatacgatgatggaaaagcttgcgcatgcagtagtatcctcagctcggaagcttcgcccgtattttcagtctcacccaatcgaagtcttatcaaatcaaccgcttcgaacaattcttcatagtccgaaccaatctgggaggttggtgaagttggcggtggaattaagtgagtatgatatagagtacaagagccgagtcgccatgaaggctcaagttcaggccgattttttaacaaaaaaaacggtacttggcgggcgggagcaaccagaaaatcagactggaagttcacgtcgaggc

SEQ ID NO: 15416 - DNA, 1799 bp, Arabidopsis thaliana landsberg
aatctgacacattatcctaggggaagaaaaatggatcaataacccatttaccgacgtttaccatcaaattctgcataatgaataaaccgaaagtagcatacagcacacctcattatcggcaaggccataaagagcaaatgcagcattgtgttgcaatgatccatttcttgaatcgagaagcttcaataaaggtcctaaaccaccactatgggcaataccagcttgattgtgggcatcctgcaagaaagagtatgctagaaatcaaaagacacatcggttttattatttaatataactcactacttaaaagttccccctaatgaaaacagatttagaaacacaataagaatacccatcttccacaaccatggaagccagcttttttagcatctataaatttaaaatcaaaccaatcttgaagtaaccaataagaaaacagttgacaatcaaggcaacagcaaattatccaggatcactaggaattatttgaaaacactaagaaacaaaagctacaaattaataacagttgtggtatcaaatgtttgatctggaagtaagaagaggtaacatctaaagcgtgaagttactatttcacaacactcaaatgggaatgcgtacactttcataaccgaactaccaaaagttttaaaagaagaacctgtgccaatctacccagtgcaaaggccgacatttccttcaactggacatccggggactgaagcatctcaattaaaggacggacagcacccctttgcacaatgtgcacctgcaaagttataatttgagcatgaagtgaagaatgaacaaaacaaacctatataaatcagggaaaatggtagaattagtgagaaatgggaaggtatgttctacaaatcaacagaaacaaacaacttatcacttcgtataaccaaacaaaaaaagatataaggctttcgggaatggaaaaagagctgaggataaaaaacctgggatgaaattgtaccttacaatcagaatcagttgaggcaaactgcccaagtaataaagccgcctctctttgactctcagggcaacaggagctgtaaaagaaaaattcaagaaatcaaaagaatgaacttggggttaacagcgaaataaaaacctcaacaatagagaagctggtaagatttcagctctagccaaagtcataacaactctatgctgaaccatcaaccatgtatatcaaaatggtgagggtccacatacctaagaagaccaatgacaggttgcaacgccccggcagtaagaacctcttttttaatgtgtggagacgagtgtactagattgcctataactccaaccttaaaaagcatgactcaactggttatttcaacgtcaatcccacatagataaataagtagcaaaacagttgattataaaaagattcctaaccgcttcataatgtatagcagcatcctctgatcctagcattagaataagtgtgggaagagcattgcattcaactatctgcaaagaaaataattatcatgctccggctaaatctaagtagaagctgtaagatagcaatatttacctgattcttgttatcatcatttttaaatgcaagggttctcaatgcccctgctgctgctctctggacctttgaatcagaaaattcaagcaactccacgagaggtggaatacagccttctaccctgtttgtcaaactggaagtcaagaggatagagttgtaactgaaacaaatctcgaaaggagaaaccacttaaatatgctgacctacacgggtcttgatatgctgtctcatgagcaagatggtgatg

SEQ ID NO: 15417 - DNA, 571 bp, Arabidopsis thaliana landsberg
tggtggacaacgatattgtataactgattgatccaacgattcgttttggaatatggtttaggtaacaaaatgaggataggagagacgaaacgtagtatccacgatgctctgtgtgtggctaggaatctcatccgcaacaaatcaattgtatatggaggtggagcagctgaaatcgcttgctcacttgcagttgatgcagctgctgataaataccctggcgttgagcaggtgaaatatgatctttcctctttgagcccctgaaatgaaatcatttgtttctcaaattgtaactctgaatactaatcatgcataaatacttcctcatctgcagtatgcaattagggcgtttgcagaagctttggactctgtccctatggctcttgcagagaacagtggattacagcccattgagacactttctgcggttaaatctcagcaaattaaggttagtaaacgacgaactttattatctatatcattgacttgcttgttcggtgactgaacaaacattgggttttgatgaacaggagaatattcccttctatggaatagattgcaatgacgtgggaac

SEQ ID NO: 15418 - DNA, 1074 bp, Arabidopsis thaliana landsberg
ggagctgctgctgagctaattggaagaagtggacctgaacaaatcaatatactcgaccacgaggtcgagtatcgtcatcctcgacttactgaattactcgcccacaacctctacagctaatcactcgacagcgacactctatccttcactcgacctcgaggttgagtgcagccatcaccatttctcaccatcactcgaccccctggagggcacctccatcaccacctatcgccattcactcgaccccctggtcgagcaacaacgtcaccacctctcgtcatttactcgatcaccaccactcgaccctgtggtcgagtcccaccatcatcattcattcgatcaatcactctgccaccaagttgagttccaccatcatccaccactcgacattatactcgactgccagcttcagagtcttctcaattctgcactcaaccagacattcgagcataaggaagagaagaagactccaactcatcactcgacccattactcgaccacctaggttgagaaccgttcttaatccatcccaatactatgtcgttttgagtattagggtttcagaacatttcgctataagtagcatgtactttatatttttgagactaggttttattcggtagacagttgctgttcttaacatttcttaatctagattttctcttactttcattgagtattttgcttttaattactaagttgttcatcttgttatcgttctgttatcattctgttgctatgatgttttcattcatgtcatcgtttatgttctctatattgaagtctaagtagtgactaggttgctaaggatgggttagagtagttaggaatccttggtttgctaggtggttgactttgatttatagatctgttatggattagttgttcttaatgcctattgctttctgatcaactagaatttgagcccagatgttcgcgtacacaaaaggtcttcgacgaaatgtctgaaccactaatttcagagattcgtggctctataccactgaattggttacaagaagcgttttggcaataacttgttgattcgttatgcctgttaggttagctctcgtc

SEQ ID NO: 15419 - DNA, 2584 bp, Arabidopsis thaliana landsberg
ttttatttattctcgttaattgttacctaaaaatgtacaatatatatcagaaaccccttattcatcagcaaaacttgtgattcttgtttaccacaataaaaaaaaaaaaaaaaaaatcctgcaatgaagcttctactgttgctgcttgccttctgctgtctatctctatcaagttgttctccatcttatcctatgattttactttctttttttttcttcttcttttgataaacgattttttttttgtctaaaatgattttattttactatattcttgttcatatgttaaagtgtcttgagaaaaggttctagtttttttccccataatttatctttttctgttagtccacaagaaaactttttgaatctttttctctgttatattttcaacgggccggggaaaagaaattctaatgtttttttttttacgtgtaaacgtttacacttttcagggtgtgaagaacaatccgtcccttatgattactcggcaacaatagaggtaagcaatgctctgttcgttcagacatttttttttttttttttttaatgttcattaagacatggtcatttgaaattctgattatatttttttgtcttggtgcagtgtctagagaacccttataaaccacagtacaatggagggatcatcgtgaatcctgacttgcaaaatggttcacaaggctggtcacagtttggaaacgccaaagtcgatttcaaagaatttggaggcaataagtttgttgttgccacacaaaggaatcaatgttctgacagcatctcgcagaaggtgtacttggaaaaaggaattctctacactttctctggtaaaaacaattttgaatttgtgtttcttgaagcgcactctttataacttcatctgatgtattttatgttatacttgtagcttggttacaagtgagcataggaaaatctcccgtgagcgctgttttcaagaagaatggtgaatataagcatgccggttcggttgttgctgaatccaaatgttggtctatgctgaaaggtggtctcactgttgatgaatctggtcctgctgaactcttcttcgaggtatgtctcttacacaaacatactcattgtctccattgtttgtctacatttctgcattttgcaagctactttatacacctatatatggtgatccattatccctttttcatgtgtagagcgagaacacaatggttgagatttgggttgatagcgtctctttgcaacctttcacacaagaagagtggaactctcaccacgaacagagcattggcaaagtaagaaaaggtaccgtgagaatcagagtcatgaataacaaaggcgagacgatacctaatgcaaccatatccatagaacagaagaaactcggatacccattcgggtgcgcggtagaaaacaacatacttgggaatcaagcataccaaaactggttcactcaaagatttaccgtgacaactttcgggaacgagatgaaatggtacagcacagaaagaataagagggcaagaggattactcgacagctgacgcgatgttaagtttcttcaagagccacgggattgctgtacgtgggcacaatgttttatgggatgatcctaagtaccaacctggatgggtgaattctctgtctggtaacgacctctacaacgctgtgaaacgaagggtttactcggttgtctcgcgatacaaaggacagcttttgggttgggatgttgtgaatgagaatcttcatttctccttctttgagagcaagttcggtcctaaagcctcttataacacctacacaatggcccatgccgtcgatccaaggacaccaatgttcatgaatgaatataatacgttagagcaacctaaggatttaacttctagtccagcaaggtatttgggaaagcttagggagcttcaatctattcgggttgccggaaagattccgttagcgataggtcttgagtctcatttcagcactcctaacattccgtatatgagatcagctcttgatactcttggtgccactggtttgcctatttggctcactgagatcgacgttgatgcgcctcccaatgtccgggtaacttaattattctcttatacaagtaggaaaaaaatcatcatttcagaattttcatttccttctctgatgttttgtttttcttgcaggccaactatttcgagcaagttctaagggaaggccatgcacatccgaaagtgaatggaatggtgatgtggacaggttattctccatcaggttgctaccgaatgtgcctcaccgatggaaactttaagaacctacccactggagacgtcgtggacaagcttttacgtgaatggggagggcttcgcagccaaaccacaggtgtcactgatgctaatgggttatttgaagctccactctttcatggtgactatgatctccgtatatcccatcctctcaccaattcaaaggcttcttacaactttacgttgacttccgatgacgactcctcacagaaacaaccatctctatatgtctttcgtgtttgagaagctaagtttacaactactttgtatttgagtagtttgattcttatggcagattagtgt

SEQ ID NO: 15420 - DNA, 6830 bp, Arabidopsis thaliana landsberg
gtggatttgcactctgatcgatttttttgccaccagatctagaagaaggagatgagatgactggaggaaggggactcattgatcgaggtgggggagatgatcgaggagaacgatcagttcgggctctcgtcttatctctcttaggagagaaactgctgcgagttggattttcccttttctttcgaagcaaattcatgattgattcactgctcaacctatttcgagaagaaggccgaggtgaatcacgacgaggtgatcggtctcggcgaggtgatcgaccaccatgaccttcacgatgaggtgtgggtctgaaggcaccagcagatctagccccttcggcactgccatcattgactaactgggttctactgtactccttcttgtcgacagccgacgtaaggaacgacttgttcgcttcacaagcctccacgattgatttggacagcgtcttgcatcaggtggcgatggctcgagcagaagctctgtgaggtaaaggaggaggcaacggaagttgaagaagttgttcagggagactcgtcctgagcttgtggttggcctttatgaagctgtcaaaggtgaaggaattccaaagagtttccccctcaataacgatcttgaagaattcagcgaactcggcagttggaagagttgaagcgatgaaagctacgatgtggaaattaaaagttggtcagatagggcaagatatatataaaaatcatatgcatgacctaacgtctaccgggcttagtagtccactttgaggggagcaagtcggaaagatttccaactgaagcaggggtctttttaattaacaaccatgggtgatgccagttctcgtccttgttaggaagatgcgagatgaggttcctgttggcgttcggataggccgagaagtatcctaccttctttgaagaactcctcacactgagaagttcaatcagttcgggaaccccgatgacatatctggcttcctccgcgacagtgataatccccataatagtccggaggaggttgggggttaattggggcaaggcgatttcaagggctgacaagtatcgaacgaaatcttcgggaaggggagaagtcaagccgcaacccttgaaatagatctcgtatacgcaaaagaacccgggacggtggttctccggcgactcagtgggctccggcatttgcgagtccttcataacttcagccggaatccgacagagatctcccaatcgattaagagattggagagtgcatgtggtttgatagtggggactggcgatgtcatttggccggatgcaaaggtcgttactagagccgacatcatcgaaagaggaggattcaggtctttcaatttcagaattcatcgtgtagtgaataaggggattgaaggttcggagagagaaaaaagaactttgctttgagagtgaaagcgtgaaaaataacaaggaaagagtaaagtgaatttacctttacgtttgccagtgatgatgatggaaccgtcttgggagtcgtggaggaagtggaagagtttccccgctttaatagttaataaacaatatacggtcataattgtgacagatgtaacgcgagtaattgtaggagtttccgagatcaaagcaataacgtgatttaggcggaaaatcagagagtcatttggcgcaatctttgcttctggaacattaaagtcctccgaactggagtatcatttcgaaagccttgagcggctaattgttggtgtcggatcccgcaccatgggctcgggaccggccaaagattgctacacaagtatgggaggcccataagatgaaaagcccgtaagattcttcaaagtaagagtatgggtgagatgtcgattggcgaagtgggtgcaacatcgaagttaggactactcgaattgaagaagacaaatgggccgaagggtaaaggaggcccggagtggtttcaaattcgaacgttgaataattaattcaaagactagaaatggatacatttaaggtagaataattgtgtgtaaatgaggattaaatgtattctttgggtataaattatgggtcaaagactatgtaaagacacacgcatttttgtgcaaattagctatacacattttctctacaaaactcacagttttctctataatcatctatgtattttctagtatatttgtcttcaagaataatccttctcactaaataaataaatacttgagtgtgtgaatccgacatccacattttggcgccgtctgtggggacggaggattcttgagtcatcagatttcttctgtgtattacataaccgaagtgatccgcaatgtatggagaggatgctaccaacgcttcgatagccaaaaccctcaagaccatgcaacaaacaatggttgatatggcgcaaaagttttcaaacgtggaaaaaaccgttgaaacactgcaaacaacccaggtatcgctcagccaaaatgttagtaccattcagtctcgtgtccgttctttaaatgtagaaaatcctagagttcgaagaactatcttcggatccccaaattcccttccgcgaaatgcaacatgtgatcaaacgaccccggatggtacaaacgcggagaatcaaccagaagatggagaaaggcattccgaggacgataaccagttcagagaccagcacgagcaggaaaacttcgaccagctcgaaaccatgaaagaagtaagccgagagttgaaagaaattaggtcgaaattccccaagctacaagctcggagccggatatcaatcgggttatcgaggaggctaggcgaacaccgttcatcccgcgaattccgagtttgagaatcagagattctcgaaaactcaacttttctgatagccgctgggcgagttgatctaaatgaagccgatgaagacgcatggtattgcaaacttttctctgaaaatctgtgtgggcaagccctgatgtggttcacttaattggaaccaggatctatcagtaatttcaacgaactatcggcagtatttttaaaacaatactcaattctgatggataagagcatttcggataccgatctctggaatttgtctcaaaggccgaatgagacacttcgggctttcatcaccaaatttaaaacgtgctttcaaagctcccaaggatctcacaacagtcggctctgtcggctttgcgaaagggattattgcattatttgtggtttaaggaagatctaatacttcacaaacgtgatactattcaagacgcactatttcgagcgaataattggatggaagtcgaggatgaaaaagaaagctttgcaaaaagaaataagcaagcaaaaccagcggtcacttttccgcccaagaagtttgaaccccgggaaaatcagggaccaaggaagtttggttcacagccattcaataacaacgtcggaaagcagtttcaggggaaaggaaggtcaaacacctgggtctgagatgaaagctcgtattgtgatatacacagagtcaccggacatctgaccaaagattgtagtgtttttaaaaggcatctcgcagaattatgggcaagcggagatctttcaaaattaaatatggagaacttcgtcaagcaatatcatgagtcgagggataactcagaagctcaaaactctaagagaccaagaccggctggcgaagaagaaccaagaagttcaaaagataaaatcaacgtaattcttggaggatgtaaactttgccgtgattccatcagcgcaatcaaaaagcatagacggaatgttcttctaaagtcaagtttaagtgaagaagtagattttcaaggcgcttcaatatcattcgaggaaaaagagacgcagcacctagaaagcccccccgatgacgctctagtaattacgttggatgtggctaacttcgaggtttcaagaatcctcgtcgataccggcagctcggtagatctaatttttcttagcactttggaaaggatggggataagcagggccgatgtggtaggaccgccatctcccttagtagcttttacaagtgagtcagcaatgtcgctcggaacaatcaaactaccagttttggcgggaaagatgtcgaagattgtagattttgtcatttttgataaaccagcagcttataacatcatcctcggaacttcgtggatctacctaatgaaagctgtcccctctacggatcatcaatgcctcaaattcccaactccaaacggagtggaaacaattcggggagaccaagaagcctcgagaacttgttatttagctagccaccaattgaaaatccaatagcaattaacgaagcgcgcaaaagaaaggagtactcccgaggtttcctagtgggcggaaggtggacgatgtcgtggtcgaagtaattctagaagaagacaaaccggatcagaaagttcggattggagctactttatctggctaaacaaaggaagctttaatcgagctgttaagaaggaacaagaaatcatttgcttggtcagcaacagatatgcccggcatagaccgaaatataatttgtcacgagttgaatgtggatccaagcctcaagcctgtaaagcagaaaagaaggaaactcggagtggaacgagcgaaagcagtaaacgacgaagtggataaactcttaaaaataggatctataagagaagtgcagtacccggattgggtggcaaataccattgtggtcaaaaagaagaatggaaaggatagagtgtgcatcgattttacagatcttaacaaagcttggccaatggacagtttcccactttcacatatagatcgtcttgtggaatcaactgccggaaacgaattgctaactttcatggatgccttttcggggtacaaccagatcatgatgaatccagaagatcaagagaaaacgtcattcatcacagacagagggatctattgttataaggtattgcctttcgggttaaagaacgcgagagcgacttatcaacgtctacttaacaaaatgttcaacgagcacctcggaaagacaatggaagtctatattgatgatatgctagtcaaatcattgaaaaaggaagatcaaaacaaaaatttagaagaatgtttcgctatccttgaccaatatcaaatgaagttaaacctggggaagtgtacgttcggagtcccatctggtgaattcctcggttatattgttacaaagctaggaattgaggcaaatccaaaccaaattaacgcctttctcaatatgccatctccaagaaatttgaaggaagtacagcggttaagcggtcggattgcggtattgacctgtttcatttcaagattaaccgataaatcattgcctctctatcaaattttaaaagggaacaaagagtttctttgggatgagaaatgcgaagaagcattcggacagctcaaagcatatctgaccactccacctatattgtccaaaccagaagcggatgagaagctttatctatacgtctcggtctcaggccatgcagttagcggagtcttgatccgagtagaccgaggagagcaaaaaccaatttattacataagcaaatccatgacagatccggagaccaggtatacgatgatggaaaagcttgcacttgcagtagtaacctcagctcggaagcttcacccgtattttcaatctcacccaattgaagtgttatcaaatcaaccgcttcgaacaattcttcatagtccgaaccaatctgggaggttggcgaagtgggcggtggagttaagtgagtatgatttagagtacaagagccgagtcgccatgaaagctcaagttctggccaactttttaacagaattgccagtacttggcgggcaggagcaaccaaaatatcagacttggaagttacacgtcgatgggtcttcataaaaaaaatggatccggggtggggatcaaattggagtctcccacctcggaaatccttgagcaatcattccggttattattcactgcatctaacaatgaagtgtgaagaactaacttgtttcttattgattcataatgaggttacatcacatatatatacatacttgaggaggttacatgtctaatgggctaggttacaaaagcccataactacttaagtctatgaccgacctatgtctaattcccatgggccggacctacgggccggaccaactatggcttctcttcatggaccgggccgacaggccgacgggccgatggaccgatggactggtgggccgactggtcgatgggccgtcacaccaatgggctgacggacctatcctccaaggacatgggccacggttatggaggccatccaacaagtggtttacaacatgaagcagaatatgaagcattaattaccagactcaggttggcacagggagttggagctaatgaagtgatcccctactgtgattcacaactggtggttaaccagttcaatggagactatgaagccaaagattcaagaatggaggcatatcttgaggtggtcaaagatgtggttaaaaatttaagaagctcgaactcattcgtataccacgaggagaaaacacaactgcatatgcactcgcagctctggcctcaacaccagaccgcaaagtcaaaagaatcattccggtagaatgcatttcggagagaagcattaggaggaaaaagagacactcgtcattacaagatcttgagctgcagcccgagatcgcggcgaacctgggattgaactaccacctgtcaagagacgaaaatcaaaaggggcagccgtacctaagctagccgtgcaaaaagataatagggtcgaagaaattgtagagcccatagaagatataggtccagaaaacactgttaaagctgaggccgaaccatagattgacgaagacttc

SEQ ID NO: 15421 - DNA, 2098 bp, Arabidopsis thaliana landsberg
agggtaaaaacatatgatgggcggtagtctcagagagcaaggcagctttcattccattacgttcattacggataatgtgttgatcgctcatgaagttttgcattccctacgcgtgcgaaaacgatgtgcaaattcatatatggcggtgaaaaccgacatcatcaaagcatatgaccgcttagaatgggggtttctagaaagggtgttactacagaaaggttttgcccctacctgggtgagttggattatggaatgcgtacgctcagtctccttttcagtactcatcaatggaactccacatggattctttgaaccaagtcggggaatacgtcaaggggaccctttgtccccttacttattcatcttatgttcagatgtattaagttcccttttttcccaagcaacaggaaagggtcgatcaaaggcattcaaattagtaatggggggcccaggctttcgcatctactcttcgccgatgattccttgtttttccttaaagcagatcaaaagaacagtcaaaacctcctacaaatatttcaagattatggtaatgcttctggtcaactaatcaatctggagaagtcatcaataacttttggaaataatgtctttcaacacacaaggactagcattatgcaaacgctaaagataccaaataatggtggtggaggcaaatacctgggacttccagaacagttatcgggtaagaaaaaagagatgctgcagtatatctatgataaagtcaaaaagaagattgacggatggcaaactaaattcctatccacggctggcaaagaaactctcattaaagcggttgcttatgcaatgccggtttatttcatgaattgtttccaattacctatggtgttttgttttgatattgatagtatgattgcaagattctggtggggatcgacgggtgagaaacgtaaaatctcctggattgcttctaaagcgaaaggcggattgggttttcgagaccttcacttgtttaatcaggtactactagcaaatcaggctcggaagattatacaaagaccagagagtatgattttcaaactcttaaaggctagatatttcagggaggttgatttttttcgcagcaactagaggaacaaagccatcgtacgattggaattctctccgttttgggtgggagctactcaacattggaatacaagttaacattggagatggtaaaaatacaaagttaggagtagacccgtggctaccaacaacgccgccgcgtccacccgttcttcatccatcgacggaacctacgctacctgtcgcgatattgattgatcaaacctctcaccaatggaaggaaagtgctatctctcaattggtaagtccgacagaccatcacctaattcgaaagatctatctacctctcagaagtcaacgtgactcctacttatggagccatacaaaagacgaaaaatacactgtgaaatcagggtattggacggcagccactgcaatcattagggatgatgacctgaaacccccattggcgaatcacacagatattgctactaatatctggaaattaaatctctcccaaactgaaacattttatatggaggcttgcatcaagagcactggaggttgctgcgaatttacgtcggcgtaatatctacattaatccctattgcctacaatgttgtacggaactcgaaaccagtaaccacatctttttcacatgcccacacgctacctccatatggagaacagcaggctatcactttcctttgttgggagatgatgacatatcagtggaggacaaattaaggctcctaattgacacgtcccggacacaacaaactagcaaatttcaatgccttctcccattttggttattgtggcgaatatggaaatgtaggaatgatctggtctttaatcgcagaacgatcgaggtgacagatgatgtagaacaagcggttactgacacaagagaatggattgaaaacactgcagtttcggaacaaggtcaacccgatattcaacatcgacgaggtcctagagcgaggtggatgccaccagaacaaggttgggttaaatgtaactatgattcatctcaccatgaaggagacag

SEQ ID NO: 15422 - DNA, 2750 bp, Arabidopsis thaliana landsberg
tcatatactctcttgtttgttttttttttataaggggaacatttttctttttttctattggtctcactatcaggtgggaacaaggggggaagttctataaacactaaccgttttgatgagggaataggaagagcagtaagattagctccagtcttagtggattgtgttggaaaccagaatatcgtcaagtttgttggtttgccatttgtgattttccaatagtcagattgagtcaaacctgcatcattaatcaactagtcaataatctaaagaatagagatcataatttcaaacaaaattttgactcaataaaacgattcaaaaagaaaaataagaataagaataagactcaaaaagaaaaacgtagttagtaagcgcctcccccagacttaaacgacactgtccctagtggcattcaaatccacagaaagtgggaaaaataaatcaattataattgaaaataaaagaaaggggaaagaaaaatcaaactagtgggttgcctcccactaagcgttgttttgagtcaatagcttgacttggcggagttcaagatgtgggtggagtggtggaggattgctgctgcctcctcgcctttcaaggcggtgtgtaaatggatctggttggagcagctcctagtgtcgatcgacactcagaggtgtgtcgatcgacactcttctcgtcacctgcaagaaaaacaggagaaacaagctttctaggaactctaggcttgttatcttgtgaagcagtcttcgaataattcaaagaattaatcaaagataaaacaggagaagaaagagaagagaacttatcacataggtcctcaagtggtgtgggctgaagagaatgtgcagaatcctctctctgtgaaaccgagggtgtcgatcgaaagggtagtgtggtccatcgacaccgttgcttttgaactctcattggcgagctacccgggccgcagcgttttgtgtggctctgtggtgggattctgatcagtctgaggaggtgtatctatgcttgaagcaatgcaagtgataggcttagtaagctctgaaccatccatgccaaactccatctccaaatcacgaaccttgagagagattctctctttcttcacatcaaacctagcgccagttgtagctaggaatgctcttccaagaataagaggatccttgggttccttattgtagtccaggaccacaaaattagcagggattagggagttaccaaccttaacaagaacatactcaaaaattccttcagggattcgtttgaaatgatccgcgaagaggagagtgattttactcggcctgtagttagtcatgcctaatctctcagcaacagacttaggcatgaggttgatacttgatcccagatcacacaaagagcggctgaacctgcttgaagagatagagcaatcaagaatgaaggtacctggatcaggaagcttcttagtggtctgataaggagtgatggtgcagatgtactcagcaatatccactctctgtgctttctctttgctgaccttaggcagcataattgcactgatgtccaatgtcagcagtttagcttcctttgagctaatttcattgacaacaaggcgcttgacatacctgttgagtggagcataggatgtctccgaagtattcttaggaattgaggtgaggatcttttccatgatggttgtgcacttaccagcatgaatcttctgcttagaacgacgcttccttggataaggaacaagaggagtgttggcagattcggtctgcatcgggattcttacctcatatggtgcagtccggacccagtgtcgatcgacaccttcgtatggaatcgtctcatagaagaatgttctatagggtgtcgatcaacacttgtaggtttcggtcgataccaactctgcagtagcgagctccaactcgtctccaatgtccaattctttccacacatcatctccttctctgatcaagatggcattacagctcttcgttgggttagcatcaggattaacaggaagaaaatcctcttgtctcttaatggattgtgtagtttgagctacctgtacatccagcttcttcaagtgagagctcagattgtcgatcttcccattaagatctgtgtagacagcatcaaacttgccattaaactcgacaacgagctttgtttggctctcaagaatcttctcaagcatagattgcattatgctctctgatgagggtggaaggggggcttggtaagctgaattaccatatgtcctctcgaagttgctatgaggaaatgacttttgaaaggcaggctttggagtgtagctctggttccctgtaaaccgattgccactgaagttaccctgtggctgcccaaacttcttgtagtcctgaccatctatgtagaagaatccctcttctgactcagtctcaggctcaatagactcatcctcaactgcaaagtggacatgcttcttccttgtaagcaagttgtgaactgattacaacttggcatgtacctctgccatctgattgcctgaaacagctccaacaatcttcttcctctcaaagtcagcattcttggtgctgttactacaaacgagattctctatcagagcggtagcatcagccggatatctcgtgtttatagttttcattgctcgccgcatctagagccgggtgggacctccaatcaactccactgaaaaaggtaccaagaagttatacctcactgaagccataatgcgggcagacctgttgatactccttgaaacg

SEQ ID NO: 15423 - DNA, 2508 bp, Arabidopsis thaliana landsberg
gcggccttttccttaatgactggatgctgtctattcaccgctggtttccaaacatcacggagagtgaaatgaagataataccattttgggttcaaatacaaggtatcccaattctttacttgactaatgcaatggctagggtagttggaagcagactaggccatgttacggatgtggattttgatgaaaatgcaaatcaaatgggttttgtgagggtcaaattggcatggaactttgatgatcctctccgtttccagaggaactttcaattccaggaaaatgagaacaccatcatcaagtttcgatttgaaaggcttcgaaatttatgtacaaagtgtgggtctctcaaacatgatgtgaaggaatgtgatttgtcctttgaagagtatgtccctgtaaacgtgaatgatgacaacgatgatgacaatcatgatcaaggacatgatgaagatgatatggctgcggaggattctttgcctagcattgatcctgcctctttgattccgggtttacaaggacacaacgccggtgccacaagtgtgaagcaggagggatcctcaagttctgttccatctgacttggcgagcgcttttgaggacacagagttgactgcagagagactgagatacctccatgccaaacacgttcgggaaacattgatggatcaaagggaggctggacttctagaggaagtatctgacaatgccacaacaggttttccatttgttaagaggaagcgagtccgtttcgaagtgctctacaaccaggctgaagcagcagaagagtcggctgtcctaggacatattcgcaagaaagataagaaagtgagtcttggaacatctgtctcttcaccactttcaatggacggaggcgcggggggcccggtacccccacagcccccatgaggatcgaatcttggaactgtcagggcattggggtgccgctgactcaatcgcgacttagtaatttatgtaaagtatttaagtttgatgttttatttctgattgaaactttaaacaagtgtgaagttattagtaatttagcaagtgtgttagggtttcccaatgtaataactcaacccccacaaggtcatagtggtggcttggccttgttgtggaaggatagtgtgcgtttgtccaatctttatcaagatgatcgccatatcgatgtacatatctctatcaataatatcagcttctatttgtcttgtgtgtatggtcatccatgtcaaagtgaaagacatagcttatggactcactttgaaaatttatcgcaatcacgcaatgatccatggattttgataggaaattttaatgagatattatccaacaatgaaaagattgggggaccgcacagagatgagtggacttttagaggtttcagaaatatgattagcacttgtgatttagaggatattcgttcaataggagaccgtttctcatgggtgggggagcggcactctcatacggtgaagtgttgcttagatagagcgttcatcaactctgaaggagcagccttattcccctttgctgaattggaatttcttgagttcacaggatttgatcacaaaccattattcctatctctcgaaaaaactgaaacaagaaagatgcgaccatttcgttttgacaaacgacttcttgaggtgccacacttcaaaacatatgtcagagctggatggaataaggcgatcaatggtcagagaaaacaacttccggatcaagtaaggacctgcagacaggcgatggcacaattgaaacataagtttaatttgaattcccgaatccggataaaccaactccaagcggctctagataaagctatgtcaagtgttaatagaacggagagacgaactatatcacatatacagagagagctcactgttgcttaccgtgatgaagagagatattggcaacaaaaaagtagaaaccaatggatgaaagaaggagaccgcaacacataattttttcatgcttgtaccaaaacaagattttttgtgaatcgtttactgacaattaaggatgaggagggaatgatttatcggggtgacaaagagataggggttcatgctctggagttctttacaaaggtttatgagagcaatggtcgtcctgtttcaatcattgattttgcggatttcaaacctacagtgacagagcaaataaatgacgatctcacaaaggacttcagtgatttggaaatttataacgccatttgtcatataggagatgacaaagcaccgggtcctgatggtctaacagctcgtttctataagtcttgttgggagattgttggtccggatgtgataaaagaggttaaaaaaattttcaggacatcatacatgaaacaatcaataaatcacacaaatatatgtatgatacctaacattacaaaccctgaaacattttctgactatcgccccattgcattatgtaatgttctctacaagattatttctaaatgtcttgtagaacgactaaaaggccatctggatgcaattgtaaagac

SEQ ID NO: 15424 - DNA, 4811 bp, Arabidopsis thaliana landsberg
atgggtatagctttacttcagctacatatcttcactttgcaactcttcgaggagatggaacttcaacaaaatctggcctttgaggggcatccggttgctgattgcaaacgctggttctggctactcaagaatcatcttcaggcttctagcttttgcttggcagcttgcttattgaaggagcatagatgccaacacacaaacctttctcttgcgaactcccacatggattccttacttgattggtcatatgatgcgataatgtctgctagagtccaaaacttttaaaaccctggtgttacgtcagtgtaaccgaagttatttcttcaagaaaaggcagtggccaatgaggcgaccacacgaaaattaggctttgtccatacctcatttaataacgaacgacgtttcatcgttcataacggtttcaattatttgtatcacgtcgctgatctgactctcacgaaccacaagggttaaaatctctcacgtgcccctggtcccattcccatactattctttgctaatcccaaaaaaataaccgtctctagttaatgattttaacaaatcaataggattaaaattttatttgggaaacgtgcagggattgatcatactcacaattcaagctcggacaccatccttaatgcctccatcgtgcgatagtcccacatgtgaagaagtgagtggttcgaaggcagcgatgctattcgtggggttgtaccttgtagctttgggtgtgggagggatcaaaggttcattagcatctcacggagcagaacagtttgatgagagtacacctaaaggtcggaaacaaaggtcaacgttctttaactacttcgtgttttgtcttgcttgtggagcactagttgctgtcacgtttgtagtttggttagaagacaacaaaggatgggaatggggattcggtgtttctaccattgctatcttcgtctctattctcatctttctctctggatcaagattttataggaacaagattccatgtggaagtcctctcaccacaatcttgaaggtttgttttgacctctttagctcttattggagattgacgtgtgccctaagttatgtatatgatttctttattcaggttcttcttgcggcttcggttaagtgctgctcgagtggaagttcaagcaatgcggttgcgagtatgtccgtgagtccctcaaatcattgcgtatcaaaggggaaaaaagaagttgaatcacaaggagaattggaaaagccacgtcaagaagaagctttgcctcctcgggcacaactaactaacagtttgaaagtattaaatggagctgcggatgaaaaacctgtccatagattgttagaatgcacagtccaacaagtggaagatgtgaagattgtcttgaaaatgcttccgatatttgcttgcactatcatgcttaactgttgcttagctcagctctctacattctccgtccaacaagctgcttccatgaacacaaagataggaagcctaaagatacctccagcttccttaccgatcttccccgtcgttttcataatgatcctcgcacctatctacgaccatctcattatcccattcgctagaaaagctaccaagaccgaaacaggagtcactcatctacaaagaatcggagtaggtttagttctttcgatattagcaatggcggttgcagctctagttgagattaaacgaaagggagtggctaaagactccggcttgcttgactcgaaagaaaccttacccgtgactttcctatggatcgcacttcagtatcttttcctagggtcagccgatctattcacactagctggactactagagtatttcttcacggaagcaccttcctcaatgagatctctcgcaacatcgctctcgtgggcttctttggctatggggtattacctaagctcagtgatcgtgtccatagtaaacagcatcacaggaagctcagggaacacaccttggctcagaggaaaaagcataaaccgttacaaactagactacttctattggctaatgtgtgttcttagtgcagctaacttcttgcactacctcttttgggcaatgcgttacaagtatagatcaactggttcaagaagctaaaattggatgggcaacttttgagtttttttttttgtttttaattagagcagaaaatgtttttacttgagcggctgttatataagagatgataaatgggggtaagtagtaatgttgtgatcaggtatatattgggtttaagttttatcgttggacaagtaatgtacagcgaatgatattaacttgctttaagtctttcttttgttcttgtggtgtacgaaattgagtcaaggttttgatctttgatatattcacaaaagttgatactggaaattctgtgaatacttatttgaattctcagcaagatactaaagaactggaatttgagagaaatgatggataaggaggcccaaggattttttgtcatttgtgtgagaaaacgatggtcacgaggcccaaatatttttgacatggcttggaagataataaggaaacaaagcccatttattgaggttttggtcagtcatgtagtgtggtaagtaaagttataatcaaaacatttcttttgtctttttctttgaagacaaattgattccttacgtctaaaccagtgttttcacgcccgacccgaaccgtccggtccgaccggttaacccgtaacccgaacacttttccggtttggggttagtgctaatacccaacaatttcaaacccgggaaaatccacaaaaactcaccattcaaccgtgacccggtgaaccgtttgaaccgatcgggtctgggttttaaaaaatttatttgattttggagtaaaatatagtattttaaactctattcagttatttttagaaatatttttacttcttaaactcatttgatgttttagattatggtaaaaacttcacaatttacttttagagaatgaatgaaattgtgagagagacatccgagaatagttggttaaattcgcgatattttatgaaaatattatgtacttagacgctttttggaaagttaatgcagattaaggcacttaaaaagaagaagacactttgccttgttaaattgtccaatttgccctcaaacttattttctctttctcattagcaacatttcttccaatcttcgccatttgtcttaagaaaacttctcttgttcctctctctatttttccagaatcaaaattaaatattataggacaacttcaatattcaaaattcaaatttaaatcttataaggtttatcatcatcttccctatctctcaacaatctaacagtgtcaataaactacactatctttgattaccaaaccctactacgcctcctccgtaacttccagcgtcacctcctccttagccacctccctcacggccaccaccaccatatctttttccaccacaacctccaccagatctgtaacctctgctatgtctctcgtaaccaccacctcctccgtatacattaccgcctcccttgcgatatctgccaccacctccgtcacatgcttctccaccgccttgagcaaatgggtggctctggtaatttgatttttgttttttaatttcaatctcaagtcaaagaataaattatcttaattggagagtaagagcccttgatttctttcagattgtgatttattttgcaatttaaatctaagttttgacataaatttgagattcaattctctaagaaacttcttcttcttcaacaatggtggattgatttgatttttgctctctctcatgggtaaaactcgtttcacctacgtagcatcgagatttctgttaatcaaatctcctgttattatggacatagattagtaaaaaggtttccgaatggatatatttaaatggacataatatggataccaaaaaattgtttgttgatttttttttcagtttgcagagacctccaccttcaaaaccttattaatatggaactttggtttccttacaaaacacggttaatcgaatctcctgttattattgacatggtatatagaatgaatacgaatcagtaaaaatgtttctgaatggatatatttaaatggacttgttattatggataccaaaaaattgtttggtgattttctttcagcttgcacagacctccaccttcaagaccttatggacatggaactctggtttctttacaacccacggttaatcgaatctcctgttattacggacgtggtatatagattggatatagatcagtaaaaaagtgtctgaatggatatatttaaatggacttgttattatggacacctaaaaattgtttgttattttgtttacagtttgcagagacctccacctccgagaccttatggacatagaaattataccaaattcctgagataattgagatcaaattgtttaagaaatttctctcatttatttgcagaatcggtaccaccgatttttcgtgagccgtcgccataatcgataagagaaatcaagcttagaagttatggagacgtagagagagaaaggcactacaaatcatggaaggagaaagagagagagaaagagagagagagattttttagtgtgcgtaagaatcatggaagagagagaaagtgtttaatttgtgttcaattttaaaataaaaattattaattaaattaggggtaaaaatgtcttaaaagaagttgaataatggaaaaagtgccctctccctcgtaagtatctcaaaaggaataagatagtttaaaagtgcctaaacgtgtcatattccctttaaaataccgtacaaagtgtttatatagtttc

SEQ ID NO: 15425 - DNA, 5586 bp, Arabidopsis thaliana landsberg
ataaaattaattcattaggatctttatgttatttctaaatactcaaaccaaaaaaaagaagtaaatgattcaaaatccaatcataattatttttcaaattcattaaaatacaagaaatttcatattaaaaaaatagatatttctttcaaagatttatattcaaattataaatatatactaaaacgctaaaaaattaagtacatgctataatcttttccattatttttctaacaaaagaaagttatatatgggctaaacttagaaggaaagcccaagaggccaagactatataaagattcatgacccgagtttaagatccgatttcagaatttgggactaaaggaggacaacgacaagcgccgggaaaaaatcgagagcgacaacaatggcgccttcttcgtcgagcggtctcacgttcaagctacatcctctggtgatgcttaacatatccgatcacttcactagggttaaaactcagcttaatcctcccgccgcttcttgcgccaccgggaatggctccaacaacgccgacgcgatgttactgcaaaaccctagggtttatggctgcgtcatcggtctccagagaggtcgtacggttgagatcttcaacagtttcgagctgatattcgatcctgctcttgatactctcgacagatccttcctcgagaagaagcaagaactctgtaagtttacttacactcgctcacttttgttgtcgattgtttgatactcttgctaatttgtgagttttgttattttttagataagaaggtgttccctgacttctacgtattgggatggtattctacgggaagtgacgctaccgaatctgatatgcatatccacaaagctgtgagtagtgtagctttaatgtttaatataaatttaattgaatttaggattctcattgtactgatttgttgaggttttcatctacagctgatggacattaatgaatctcctgtgtatgttcttttaaatcctgctatcaatcatgcacagaaggatcttcctgtgactatctacgaaagcggtaaaaattggttatttgcatcactgattgtcttattgttttatagattataatcttgctaatcctgtctttttgattgttttcaaaatttgaagaatttcatgtcattgatggaattcctcagtcgattttcgtgcataccagctacacaattgaggtatgtgtttaggccacttgatctgtaatctatctatgtgatatgagagtggactttcaataacattgcaatgattgtaaacgcgtgcagacagttgaagctgaaagaatatctgttgatcatgtggcacatcttaagccatctgatggaggctcagctgcgactcagtgtaagctttattatcacttcatatttatcataatctgttctttctttttcatctgcatggaattttaggttgattcctcgattttgtgcagtggctgctcatcttactggaatacatagtgccatcaagatgcttaatagcagaatcagagtgctataccagcatattgacgctatgcagaaaggtatattcttgctcaagtccccactctcggtccctcttcaatttgggaatcaagcttttgtgacctgtcccttgatcttagaatatttctatgtgttttcctacggggaagaaagaattaaaagggtgttagaagatgattttgagcaagagtaatgtggtactaatgacttatgtgattctgcatctaggtgataaaccttgtgagaactcagttctgagacaagtatctagtctgctcagaagtttgcctgccgcagaatcagagaagttcaatgaaaatttcttgatggtaagtagtaccttacctttttctagcaatgttggttaaataaagtggccttcgaatttcttaaattcttaatgtagcttgttgttgtgaatgatatctttataaatatgatgttctcttcttttgcaggagtacaacgacaaattgctgatgtcttacctagcaatgatcacgaattgtaccaggtatgtgctcgacacgctattccatttaactatttgaataaaagaatgatggacatgcatgcaaatcttttgcttgatacaatgcaatgttttacgataccaagacagatgaaatcaccagtacttggttgaggctgacattgagatagtttgttttatttagattaagaactaaatctaggaccttgctcaattatccttgttataattaagatactgagcctgtagtagctaagggaatataagcttctttttaaaaaaaaaatctaatcttgtgctacaccttgaccaatccatatgtcaatttcattccaacgaaatgtcctgaaagaatcctttgtatatttgatctcttactctcctttttccccccaaaatgcagcaacatgaacgaggtggttgacaaattcaacactgcatacgacaaacacagccgaagaggtggtaggactgcgttcatgtaaagattagtttcaatgtaaaaaaaccttttctttcttttggtggtctggtccctaagtgaaaatttagaactcttttaaggcatttcacttttcggaaccaaacaaacagctaggaagcttttcttctgtttaagctttgtctagacagaagctaagtttaggcctaactaaattttgcgacaagactgtgaaaacaaaacagcttttaccttctctcaatttttcatttattcaaaaatttgagcaatcagtgaacaaagagatttgtttcatatctgtcgtaatctactcaacatctctctgcatatcaatgagctcgctgacaaatcaagtccctgttgtggtgacactggttccaccttcggctgtgctgctaactgcaacattaggccagttggatccccaatgtcaggcgcctgcaggctggtaagcttctcttgcccaatagttagaccaggcattgaaagatcagaaagctcagattggcctatgtaaacggagaaacctgtaggatgcctcaggtgtgactggaagtcaaatagagatgagttggctgtggccagtccctcagatctactgtgtggcattggatagtgcacattgtggttgtgggtctgagtcgctaaactgccttggagagtccctgaactgcctgcaccgacttggctgctgttgcgtgctgctggtacaacgtgggtgtgcttgcctatataagttgttagtacgctcttgaagtcatcagaggctctctctacatgcttcgttacggtacatccattagctgtgcatttatagtagctcctgaaaacatagaaaactgattttattaaattcaacaaagggatagcagcagaacagagcatttggatacaagaaccttggattcgggtttcctttaacgactttttgcccatacttgcgccagcgataaccatcatcgaggatgtcaatgtcacttgtggtctgcaccacaactcttggctcacggctggctctggttgatccactcgtttctgttgcataagcttctagtttcctgtaaaatcaaaaagtttttgagtctcgtttactgagtcatcgaggattcggtgtttcgattgctaaaacaaaccttcttttcgactctgattcatctccttctcctcccccacctcctcctcctccatcgtaacccaaagaaacacttccatgtgtccctcgatcatcttcatcttcatcattagagaatgttgaagaagcatcaaccacaaccacaggatcacctgactcgtattgactccggtttgagcttgaattgatccagattggtttccatactcgaatctcgtagatccctcttcgacattgttctcattgcttccaccttgttgttgagtgttattacaactaacccacgttgcagcagaatctctctgttgttgttgttgttcaacttgttcagttccatctacttgcatccctgagcggcgattaggtggaggtttaagatgattatgagctcctttgtatataatctctgtgatgtgaccttcccttgatctctcaactttcttcttcacctgacaattcgggtttgtgcacttgtaatagcttcgcggatactcacttcctttgaccaacttttgtccgtatttcctccagttatatccatcctctgcaggcgcaccaccagccatcgaatcaccgcgtctttgctcttcttcttcctcttgatgatccacggtttcaagactggtgtttgtagtgacatcagatgtcttgttctgcccgttttgattgtcagtttcaatcccataaagattggagctttctatgttttcagagccaggttttacttcttctgcggattgatgagaagaagatctattgttgtagttaccataatcaactgacatcatctctgttgtgccttggaagaaagaggaagatgatcttgaaacaggatgtaagctgaatgatgctccaatatcatcaaagaactcgtctttcgctttctcagaagacaatgcattaccattaacaccaggaagaaatggaaatttcccggtagttggagaaggttgagcctgcaaggtcaccgagatattcagaaaaaatagctccataataacatcgaaagaaagcaaaccaacttgtagcttaccaatgggttagaaaggaaaacaggagattccaagagtgttgcagggctaaggccaggagaagagatggttaagcaaggagatcgaaggttagagtcaatggaaaagtcggtgttggtgcggatattctcagtgttcaaccttggagcattaaatccagctcttgcagcaattctttcactgagaccacctcgaaaaacattgctttgtgaagaatccttgttatgattactactagtgtcttcttctaaaccaataacttgaccatgattcaaagataactctctttcaagaacacgtttcgagctcttctcttctccaatagcagaggagaaaagtgtcccgggactaggactacgaggcacccattctcccatcacagcaacattttcatcaaaaccagccatttagtatccaagaatttggctgaatctctgatcaaactgtgatgaaactcctgaaaatatgataaagaatcacaaaacttcagattactaccaaaaaaacaataatctagctaaacacaacgatgattagagacaagtgtcactaaaccagtgagcttaagtttctcaaagtttaaaacttttttatttcaaagtggacaaaaaatatataaaataattcattcagacaaaagaaaaaaatgtaagaaaatgaaggactttttctttttcacacgttaagccactttcatggaatctcacaaaatcaaaacataggattttagattctaacgaattagcttcgagaattttggaaatgaatcaaaaatgatcgagccacgaagattaaaaccgacaaagagaaagaaaaaaacgtgtgattatagcttaacccagactgtaagcaaaaagaacctaaaaggagacccttaaacccctcaaggtttgttcaaaatccagaatttaagttaaagatgaaacattttaatcatatgaaaatggaatcgcaaaaactcg

SEQ ID NO: 15426 - DNA, 1463 bp, Arabidopsis thaliana landsberg
tggctgtgcttccagtcaaacccttgagagacttactattgaccatagatattgggctgaacataacttggagagctttacttttgatactccgagtcttacctacttagactacaatgctcatgttccgggatcgtatccaactgttaatcttgactcccttgtcgaggctaagctcaatcttggttttacaactgatcttgtagaagatgatgacgatccctttaccagcgatccaaccaatctaatcaaagggttaagaaatgttgagatcttgaacttatcaagtactgatactgtggctgtaagtgtgctcctttttttttactctttgctacttttaaccttttcacttatcgttgcttcacttccgcttccgggtggtataagaatcaaaatctcgtttgatattaaattgtttcttgaggttatgatttttatttttatttttgttcttcaggcgttttatttctccaatgaagcaatcccagtatttgaaaacttgcatcgtttatctattgcaactgaacgtgaattctgttggcgaactctgccatatctgctgaagaagcctccaaatctagagtctctcgtcattggggtatggaccccaaaacatttcaggtatacaacaacacctaatgaagtctccaatctctaattctccttcttgttacagggtcccttgcactacaattatcagttgggcgatggttatgagtctgaggagatttattctgaagatgatgatgaggaggaatcggagtctgacggtgatgagcctatttgtgagtgcttgtcagattattctttcctagagtcatgtcttgtgaagaccgtagagataagcgagtacagcggaactaaaatagagttgaagcacatgaaacatttcctggagaaattgtcatgtcttgagcttgtcaaagttttttctcatgaaagagatgaagaggaacatgttcaactcagaaccaatctgctgaatcttcctagatcgtctaagtgcaagacccagttcgagtttattcctcctcgtagctctgtttgagcataactctgtttcttttcttcttggttttctgtcagctagattctattgataggatttttcatcagttatttgctttgagttgttgtcttttgacgttttattcaaagtgacaaatcttaacaagattcaatttcaactacaacaggacccaactgaagccatagaagtttattactttgattccataccccatattgaaggttacgttgaagctcataattcccatacaaaagtttatgaacatcaatcatcatgatgatgaggtgtaaacatgttgtgaacattttttattttctcacaaacgctccgttttggttaagtaacccgagattataaaagcggccgaattttcggtttaaaaccaaacgaaaacaagcgaagaaatcaaaaccagaaccaaaccaatcga

SEQ ID NO: 15427 - DNA, 2493 bp, Arabidopsis thaliana landsberg
  unsure (1)..(2493): unsure at all n locations
tgagtctctatttattattattataacttcaacccaactattttaatttaaaagataagaaacaaattactatatttattttttaatctgatcatttattgtataaaaattacattacacaatattaataaagaatttaaaacatagaaaatatgtcttcattctccatttacttctagaaaacaaaactttcatcaaacacgacaacgcttcaaaaaatcacctcatttttatttctaaaataatattgacataaatttgatttatatgaaaaaccaaaatataccaaatctgaataaattaatatcctctttactaaatatgccaaagtcaaagatatttttactttataaacctctcctattatgcaaaaaaccaaattttatttcttacaattcagcaaaattaaaattccttgcctaaaaattaaaaatcatcaaatttgaaattacttttaaaattattactcacgtgataataataatattaaagctgaagaaaggcaaaattcagaaaaaatcgtttttttttttttttgccaggcttctctcactctccttcgccgcggaatcgtctctcggagccgcgaaaggactcttagggttaaagattcttccccaaatctccttctctcttcctcagctgatttcgactccgatcaattttctaggtttcgattcatctccgttactaatttcgtctttaataccgttttgttcgtttttctagggttttagatcgattcttctgttttttttgtcaccggaaaagcttagaactttgctggtgtttgattgaatttgatgaatatggtttgctatttattaagagttttcgaagttgagattccgtagcgtgtttattgattatgatcatatcgttacctgttttctttttcgtttcttgtgaagttggagttgttaaagacatgattctcctcttgagtttgatataaagtgtccatctttacgaattttcagagattttagccaagaatttcgtcttaggcaaaagctatattgcggtttcattgtttctcctgaagtcgtagtcttaagatttctacatgatttgaacgagttttattggcatggtgaaattttcttagtgccgtctatgaaagtttgcttctttagggttttgtatgcaaaatttcttctatagactcgaaaaaatgttgagttttgtctcagtgcttgatgatcaaaggttgtttttgcatgcagctgatatagctaaatataagctgatacttttattggttccaggtgtttgaaggcatttgaaaggatgggagacaatggcaaagatgaaattatggtcgaggcatctcaatgcgctggtgctatggttgagataaagataaagacgttggattctcaaacgtacaccttacgtgtagataaatgtgtatgaaaaacgagccatagtggtttagatttcttatgatgtttcattttctgtttccatgaactgagactagtacctgtaaggtctgtctttcttcgtatgcatgtgttgcataatgaagtttctaattactaaaatcaatcctttgactaaaattgtggaactaatgccttatttcaatactcacttgtttatttgtgtcctaaatagcctttcttatatttgctttctgttttcttgttttatctcaggtccctgttcccgcattgaaggagcaagttgcttccgttactggtgtcgttacggaacaacaacgcttgatatgtcgtggaaaagttatgaaggatgatcaactcctatcagcctatcgtatcctttttgttctttccagcatattgccccagttctttcttagagttttccttttcagttgtgatttgtgaaccctagtttgctgatgtagcccttggttttgaattccttgtttacaattccagtgtcgtatggtagacttttccttttaccggtaaaattccttaatggttccatcttagatgttgaagatggccacactctgcatttggtagtcagacaacctgtatcagagagttcaactagtaatgcaggtagtttcaagttcccgtacaaatttgtggccccaaatactgttactgaacatctttgaatttctatactcatgatagtttagcatttaccaatgctttttgtgagactctatttcaacatgctgagtggaaatattgtnnnnnnnnnnnnnnnnnnngctttgagtgctggtgacatccagggcagtcaacgatcacgagttgtagtaggatccttcaacattgctgaacaagctgatggagtctattcagatcttggacaggtatacctcttttatctgtttgatctgtttttacttttgtgtgttggattagatgtgatccttttccttttttttgacaatcaaaaatatgtgcgatccttttcatgagctttgttttatgtctggtagatagttcagctgatctgggttcattgggatcctaatccagaggtggtattgagggacgatgatat

SEQ ID NO: 15428 - DNA, 1020 bp, Arabidopsis thaliana landsberg
  unsure (1)..(1020): unsure at all n locations
cataatcttcattggttgagaaacgacggagcatcatagctttcaatcccgagacagtcacagagcaagcacgcttgattccttccagttttcatcaggaagtaccggatatgaaactgttacttgcggcagatgataagatcaatcgcttgaccttaatatcagggacaaaagaaacaatctcagtttacacactactcggaaatcccaaatggacattcagaaaaaatgaaaatcccaaatgggctcttgacaagaggatcaagaacgtgtcgatggaaggaagtatgttnnnnnnnnnnnnnnnnnnnnnnnnnnnnnnnnnnnaagaaagtagatgaagaaagtagatccaagaggagaaaaaaatgagaaaaatgaagaatcagagaagaattaaagtagatatccttttgttttaatttctaagcatggtgtgttcagtttcttgtttagcaagaaaagtttaagaaggcctagacgagtatgagttaacattactatttcatgatttaaaaattccctgcagttcaactcaaattacctcccgtattcattccactttctcttgttttttttccgaattgttcgagcatacacacgacgactcctccgactcctccgactccgatctatcattcaatcagaaaaaaaagaaaagaaaaaaaaaaaagctagagaaaatgtggaccaatttggaaacgttgaaattctacgtcttccatttgtcttagagcatcattattgcttatctcttatataagagatagaatgagatgttcttagtaatcaattacaatttttttttttaaaaactaatctaagaaacagccaataataatgctcttactattatagcacaatgtgctactagaaaccactttcggctaatgggccttatagtcaaagatgacactataatttttatggaaatgtagtaatcaacaataagcccattggttgatctcatgtgtaataactaaaacattgtgctaggaaacaaaaccaattcccaacaat

SEQ ID NO: 15429 - DNA, 888 bp, Arabidopsis thaliana landsberg
tgcttggtttctacattgatttctactttaatcatgttttgttttttgataatcatgtctgagtagttctcttgttgggtttagggattctcattaggaatttggatgaattagtagatcgaaaaccctgctaggataataaatttagaattcttcatctttgatcgttcttaatgctagttctagagtaattaactaaaacttgattttaggataatagataaacccgctataggtatctattactagaactatcttacatgagcctagtatttagatacggactagcgtcgatttagatacttatgtgaacttatcaaacctgattataatgcttgtttaggtctagggatttacaagagagttgggatcaatactattaagcataatgagtaacacggcacatcaccggttactctataatagtgatttgagttctagaatagttcgataataatcttaatttactgctaaatctcctattctgatatttcctgagaattttcctaaacccgacgtattaatcatctaaatcttcaatctcttttattgctttcttgtcttttattttataatattttatgcttagtttaatttaaaactgttagtctattgtgtgatctgagaactttgtagaatttgatccctaagtgctataacaatctctttctttgagagagtagtcattagggtaatttgactcatattaaaacgctaaaccagttgttcaaaacgctgcagaacccttaaaaccgcaaccgcccgtttccgtaaactcccgcaaccgtaactgcatccgtggcgtttaaactagtgagcttaagccctgatatgaactttttactgtatgtattttgatgtgtttttttctttttcacaagaaaagta

SEQ ID NO: 15430 - DNA, 1634 bp, Arabidopsis thaliana landsberg
gtgctataagacttagcccagctgggttactgaaggacgtacagcatctgttcgagaagtgtcatctggagacactcatgccttacccttaccctgcctataaggaggagacaatcgattttctttccacgctgcaagtggagatgtatgagggactcacagactttgagttggataccatgggactaggtttcttgacgttctcagtggatgaacagcggtatcagctttcgatcaagaagttggaagaactgattggtttccctagtggaaagggaaccaaaccacgatttgacagagaagagcttaaggacttgtgggccactattgggaacaatctaccgctaaactcggcgaggtccaagagcaaccaaatccggagtcctgtgatccgctactttcagggatcggttgccaacgtcttttactccagggagtctacaggcaccgtgtctaacacggacatggagatgatagattatgcgcttacagggattctccactggacgaagggagagaatgtcttgagtggcgatctcaacaacgcaccaccagtaatgcctctgttgatccatctgtgtggatacaggaagtgggcgttgacgaacgggaaaaagaaggtgagaggagcactatgcgtgggtggcgttgtgacgccaattatggaagcttgtggagtaccgctcaaggaaccagggttagcaccgaggatgatggacttggatcatttgcgcagatgtgagttcttggagtttgacatggctggcgactttcaccgctacaggttcgagcattcatcgattaaaatcgccaacattcttctcccctgcattgatgctactaggattctcgagggcagaaacattgacttcaagcctgcgcttgaagaactttatttagagggcagtccgccaactgaggagatcagtcataccgaaggaggtacaacagaagatattgatgagactgatgatatacatgaagcggagtttgacacgagcatgtatcatttcagggagcatataccttctgcgagggaaagcaagagtttgagtgaagctcacaggaacaacagcaagctgcagaagtggtgcaagaaacaggacaagttactcgccaagtgcttaagggctatcaagtttctgaaggacaagctcagctgctcctcttccactacagctattccgcagggacatctccctcaggacatgccttcgaggagatatgacgcgcccgagccaagtcagcgcaggcctgagcctagagagcaggagattccgcatgtccctgcgaggcattcatcattcgagcctcgtgaatctgggaggaagaggaggaccacactcactcgatctagcagtaggagcggacgacttctgcagtctcgtagtttacgcgaccgcggtgctggccgcaacagaaggagagaggtcgagtttcctcatagcggtgctggccgcagcagaaggagagaggtcaagttttcctcagagcggtgctggccgccagagagctgatgaggtcgagtacccacctgctggagctgatacaaaacaaggtggttcgtctatggccagagagcaatcacaggcagccattgacgagcaactacgttcattcttcgactaaggtaa

SEQ ID NO: 15431 - DNA, 2837 bp, Arabidopsis thaliana landsberg
aagatttaatgccaaaatccatgcagggaattgtaaaacactcgctaatacataatatttcactctttagatatttttgagtgtatgagtaacgtactggtgaatagcaaaaagaagaagagatgttcgctaacaagcaaagatgttaaaaccctctccgaaaaaaaaaaaacaaagatgcttaaaacagacaataattttggagtggatgaaaatgaatagtcggaaccagatgcaaggaaagtaacgtacattgattttccaacagcctttgtatggaaaaactgttgtctcatggttttgcaaccctctctcactgttacttgtccatcgcagcaggctggttcctaccggctccttcaaacacgaaagaaatgcatataagtatttggcatggaatattatccaaaggtccttcccctaactctttagactatgtaccaagcacaaccttttccgtgttttcttttttgacttcttgttgcagatatcagtcagaatctcctcaatgtctacagtatcatctacatgcgttttcaacaagttacaactatccaaaaggctgagttcttggacaacacttggggcaagagaagtatcatcttctactctttttcttacatactccattagcacaagccctgcaagataccatatgattgtgtcacaagatcaaagatgaatagcttcacaataacagatttcaggatttaaaaaaacaaaaagtgtcggaagttagaagataaccgagagatcggagcatcttaagatcaaatttgtcagctactagatcttcgagaccacttactttggcacgtcgaatgactagcttttttaagctgatgagcaaatcctgaaaaaatgattgatcaatgttagtttttgactgcagaaagaaagagaatgattaaacaatatttaccagttcagattctgagagagagcaaaaccaagtgagatcatcggtcctattgttcttcaagatttggcttaattcctccattcactgtttgaaaacaagaatcctatattactaaattaatggttaagataaaaccttagctaacaagaggtaagcaagaattcaaaccatacatatataatcattctaaaatcaatgtggtcactcaccttaaacaaatgaaacagactccggaggtagtggcaagagcgatgcaaacgataaaccctaattagaatcggacgtgttatacaagagaagatgaattacgctgaacgtcgtttagaatttcatgctgacgtggattagatacatgtggacttttggtttcccttacctaacttaaaatatttttagtcctgtgaattcggtagaaaccggttaaaccgaaccgagaatctcagtttccggttaagagttgtaaactgatcagtactctctgcacttttgatatgcattatccaccaaacacaatgcataagagttgtaaatcaacagtgaggtaactgcattccatgtcaaccatctgcagtgctgctttcttacttcctttacgcattttatccagcgactctatcgctgcgtttgtcacctcaggttagtctagagacttagagagatggatacatcacaaaatatgcaattactcaagccaaaatggagattcatatttccactaaacaacagaacacaaagcagttgtaattacacgctctgcaaccactattaccacattcattcatgaggttatcttatggtatagactaagagttgcataacaatctgcaattttccaccaaacttaaaattattcctcaggccagggtacaaaattgaagattattccttcactaaacaataaaacagaattctaaaagcttatcaacaacttcttctagataagaaaaaatcaaacaaatatttcaagaaagcaacgaagatatctagcattctccacagcccaagcaaataaggctgctaaactaatatgaatcggctttgtaaaatagcaaggttatgtcaccaagatgggggcactattagtcagctcgcagtctcagtatctccttagctgttcttaacctgaagtacggcatgtctttctgcaaacgatagaattaaagacgaaatgaacatattttatagtatccctcttaatacatgtttcaccaacacctactttaattccatgaccaataatgtctcatgtgcttaagtaatgtttcttctagtttgaaccggataggaatttgatatttctcgatttcaaaatgcaacagtattggtacagattcataagcaaacacagaccttgatgacatctcttattacctggctaaattgtagactcaatcctctactgtaaaaatcaatgtatttaagcataaacatcccacagtcgtacctgcgaattattcgaacagactagtgtcaagtgagatcaataacatagcaaaatgagaattacgtacccgttctgttgctgaggacgttcttcaacgtattccattccccatgaactaacgtcaatattcttttgactcttttgttttacttcatccaccaagtactttgcctaaaacaataacactggttccataatctccaaaatgcaaatggacagagagttctatgatgaagaagttataccatagcattcaaaattgtatgaccaactccagtaaataatgaatcaagatacacgaacttgcgttccctattgttaatcactcccagggtccaatgtatatctatgtggattggaacaaatatctgcacaagttcatcatcaatcaaattggactatacatatacttctgacaaaaagaggaaacctcactatgtcacagtcaataagatcatatccaagctttct

SEQ ID NO: 15432 - DNA, 1764 bp, Arabidopsis thaliana landsberg
atttaaaaaccttttttaggggtacccctacacaagccaccataaagctgcccatggaagaacactggtttggccaagtaaagtcctacatgttctagagatggacattgactcttatttatagtcatagcgaatacaacagagagcggaaactgtcttctacgcatcttgaatagaagtttagtgtctgtaggtgtaagattcattgtaggaatcaaaactatgttaccaattctgtctcctgtaataactttagcttcaacaatctgagtacatagctgcataatctgaagcctagtgccattgcatagaccacctttaggatccaaatttcgtagtaacataataggagcaccgacctttaaacgcaaagaatggttaggcaaacctggtaacttgatactgtttaaaaaatctggagtgataacaggattgttaagtgaattagaatctgtaggatctatggtatcagcagatagataaattctttcctcagctggaaaaaaaacaaatagaatgtatgtcagttgtatattcaataaaaaatatattgcatataaagattctaaactttaaactgaagagtaaaacatgcaactgctctagcaaatactcattgattgtgtttacgtcctcattctttggtgctaatatagctctgccttgaaagaatttgggatcagtgatttcttgtaggatttgaggatctccataaaattcattggtgatcgattctattggcttgtctgcgttggtaatcaacaaatcttctggaatatctattatagccacaccgtcgttaggctcatttatccgaccatcaccaacagccaataaccaatcagaaaactcttgaatttctttagcttcagtttcactcaaattgtttgctagtagtctcatgttcttagtcaactttaacaccttgcagtgatcccaaagatacgaagcattaagcgatgacattactatttctgctctccctgcaccattaattactggaaacacctgtctgaaatcaccaccaaaaacaacaacctttccaccaaaaaccgtgttgtctgtgttttttataatgtcggagaaagatttatctaaagcttcaaaacaaaacctgctcatcattggtgcttcatcccatataactaaagacgcttctttaaccaaatttgccaaatcagactttggttttatcttacatacagagaactcatcaggattcaatggaataccaaaccttgaatgtgcagtccgaccaccttctaacaacaaagaggcaatgccactggaggcgacgttaagaacaatctgatctctatatctaatagtagcagacagagttttccaaataaaagttttccctgtacctccaaaaccgtacacaaaaaagactccacctaaattattaaaaactgcctctgtaatctcattgtatacgcctctctgctcaagagttagcatctgtttccattcttcatgcttctcttttaggttggattcacggttatatcttaactcctcaacaatgagtctatttgaattatcaataccatctctagtaggcttaggaaactcatcaatatcttctaaggttgctccatttgacagcataattttctcgatttccagtagtgtgtaattcttaatttcagcttcagtgagtgttaggtctgcaaagatttagatgaaaaaatgtaaacaaataacgtgaaaacattaaaactctattagtaacgaaacatggaatgtaaaaaatataaaatc

SEQ ID NO: 15433 - DNA, 1157 bp, Arabidopsis thaliana landsberg
tgattgagaagagaaagctcactcggtccgagggaccgtttgagagagggaaagggttgaaagagacctggtctttgtgaccacctcaacggggagtaggtttgcaagaaccgaacctcggtaaaacaaatccgcgtgtcgcacctcttatttgcttgcgatttgttttgcacctctctcacggactcgtttatatttctaacgctaactcggcttgtagttgtgattatataaaaaaatatcagtatcgccctaatcacccccccccccctctaggcgactttcaattggtatcggaacccggtgcttcattagagcctaaccgctcgaagtgatgtcgggagatcacgcccaagaaggagatggagaccgacgaaaacccactacaagccacgggagcacttcatcggaagaatcccgcaccaagaggaaggagaagaagaagagctcctccaacaaaggaaaggagaagaaatcttcttcgcaccacaaagagaagaaggagagatcttcctcccacaagccacatcggagaggagacaagcacaaaaggatgaggaaagtggtctactacgagaccgacacttcatcaacatcgacctccgactccgatgcgccctctgtaacttctaagcaccaagagcgtaagaagtttagtaagattctcctacactaccctcgcatttctaaacatacacctttactttccgacccattagcaaaccaccaacatttgatggtgaagattatgctaggtggagtgatttaatgcgatttcatctaacctcactccacaaaagtatatgggatgttgttgagtttggtgcacaggtaccatccgtaggggatgaaaattatgatgaagatgaagtagcccaaatcgagcacttcaactcccaagccacaaccatacttcttgcctctctaagtagagaggaatataacaaggtgcaagggttgaagaatgcgaaggaaatttgggatctactcaagaccgcgcacgagggtgatgaactcaccaagatcaccaagcgggaaacgatcgagggggagctcggtcgcttccgtcttcgccaaggggaggagccacaagatatgtacaaccggctcaaaaccttggtgaaccaagtacgcaacttcgggagcaagaaatggga

SEQ ID NO: 15434 - DNA, 4155 bp, Arabidopsis thaliana landsberg
tcttcgatctgttacaccgacactggagatttgaatgagctttcggtaacaaccaacggaaaggagctgattaccgtgcatacccttgcgcaacataaacaaagcgaaccgcgagctgaagctctcccattttcttcagtccgctgcttcccaacttcagaattggatacgagcaagcataaatccagtcactttctacacggttcaatgaaatcctcactttcccgatcggaacatcgttcgcctgatcctctttaaagatttgtcgattgtcgtagattccaagggttaataccgtacacttctcgtaatcatcccacgaatactgctcgttccacttgggtgtgacactattaaccacggttcgagtcctggcccatttattcccgtatttagccactacataactgtcaatgccctgttttctctcgtcgcttccctttaaacccgtcgcacccaaaatcccaatttctaatttcccgagcagacatggccacaaccctttaacaaaaggtctatagtcgctcgagtattgaatgctttcctcagcgacgtgataagcttgatcagtggctagtttcatcttgagtctgctggcgaacctcctagaatcacctgctggttcgacctcaatgtcgtagaacaaagccggtgcggaacttggaactttgagcggagtcatctctgagagcttcttctctaacttccctattatgcgttcttcgtgttgatcgtcgactctgtctattaacctaatgtagacagttccttctaacggctctgatgcaacaaagattagatccttgttccatgacgggttcgtcccgaaagaaacttccgtttttagagtgacttgacctagagtagctgtcacataaaccgaaggagtccggtttctatccgtggaaatcaaatcgtgaccagaaacaatggtaaccctaacataacagagccttggagctaggtagaccttaggtcgcgtgttgatcacgcgagaggcacacacttcacaggcgtctgagaccaagccactggataaacctcatcaacttgtgtaccgaaccaaactgacatcagcaactccatgtaaaagtcggtttcggtattatgcatagagtaccactgcggtgcgattcttgcatcgggaggaaccctagtcggaatttccgaggccagcttgaagttgcgcttgttgattacggtattggtcggaccgtctttaagagtaaccgacaagacatcacctttggatttgtcgaaagcaaagacttggttccaatccatatttggtcccattggcagatttttggtagaggatttgtagttcccgagagtgatttcgacgacggggcaacatatgcgggcactagggtttacaacagagttgttgatggcttggattacttgtacgtaaagaaactccatctgttcgacgaggtcgtgtgaagaagttggaccgtaacgagggtttcgagctcctctttctcctcccagctttggaaagatttgcttgacggagaattcatctttattggcagccatctctgaaacaaaaacaaaaaaagaaagatatgaataagaaactgaatttcagacataagtaaacacacgaattagtaataaagctttaaacgaactgacttagatagctaaacaagaaccctgaagcaaatacaaatctatggggaataagaattagactaccaaatttttgatcctttaacatatatcaacagttttcaagttccgagtgaataaattaggtattggatcttaggggaaattaaagatcgaacctttagtagagaaagaagcagagaagaatcgagatgaagcaaataaagcggtaaatatttgagagatgagtcaaaggaagtaactcacagacaatgtttgggacttgttttgcttccgtcttctccggtcagcttccttaggtttcttctaaagcaaggcttgattattctttttgatatatatatatatatatatatatatattatatatatatatataactcatatagaatatacacaaagagttgaatagagaaacaagatttagagaataatctataggatatttacaaagagtcgaatgcttatatgtaatatcttctttcctaatagaaacaatgtaatctgctattatttgtaaactaaaattgttaacaactttaaaacgatgaaaatgtttatatgaaattaatttgcaatactttcccattttcgtggtttcatagaatctgccgaagaaaatctacgaattctctcattggcatttttacttttctcttggcgtttgggtttgggtttggttttgacatagtatttaatgcaattatagagagatccaaattccaaattctatacaaacgttacaagactattaaaaacaattaatcgcgcgccgacaaaccgggcagaactatgcaacttgagccacgcatcaatacattcggtatggaagcaatgttcacattcaggtaaacacctaacagtttctttggttgcgtattccgacaaacaaatgggacatacaacatcactggacccggtcgggagtctcctactctcccctagctcaactttcttgtatgactcaatcgtagactcatcgagacctgtcctcgcgacttcctcgcttggctgcggcattacggatccagagaggcgtgcaaccactgcgtgttgtatctgggaagagactctctaggactttacaatcagggcaatagtaattgttgtgctccagttccttaaaacgataaccaaattacaactgtcagtcattcggcagttgtcctaactacttagaatcaaaagttaagaagcacggagatgtataactgcaccttaaagcgctcattcgtaatgatgtcgcacccagcatgaacccatacgttacgcccatcacaacacacgtaatacatcaaatcacgtcagctacatattgtagatgtaatagtttataactcaggtcagtatttcaccgagcatggtcaaagagactcttgcagatgccacaatactgattggatttccacaactgaaacaaaaaaaattggattcaactctttttggccaaagaaaactgaagagtgaggaaattttggtaagaacctttgaacagtgtctgaaccatgcatagtagattaatgagcagaagttgagaaaaaaggatagtagaaataaatggatatgaggcccatattatttcaagcccaattgtgtgggcctcagattttgtttgaagctcattaatttaggcctaatgtggtaagcccacatttattctcaccaaattttgccaaacacatatatttcctgatattacctattctgattattttaacaccaattgccaaacacatttatagaatcctaaacttaccagaaaaaataattcaaataataaactagaattaatgtgaacaaaacttgtaatatataaactggcattgatgcatttaaatacaaaacaattaaaatggttatattgaaaccataattaaatgttcatacaaaacaaagatttgtaaatttagactaacaaaagttaggtgttgcaactgctttgacgaatgtcttttatagtgataaactaagtgttctaactaataatatgtgcttagactaaattttggctcaaattcaaatatttatatgagttgatggctcttttcatcgcccgtggtgaatactagaaaggactacttttcattttcaccgtaaaggtaaaagattcatacacccttggcatcatctgtaaactttgttattttggttttcttactctttgtgcagactccatggttagataacatgcattgtgtttggacaagtcattgaaggtatgaagcttgtgaggacacttgaatcccaggagaaaggttgcagaatctatgcctgcggagagctcccgatggaagcttaaaaaccaccattaaaaccggtgcattgtcattgatatccttgttctgttttcttattatgactattcttaatagagtttctctttaaacctgaaccatggttgcaaccatggcttgttgaacaattggcttttctcgtcttttttgtcttcccattattgaaccggaacatcaaaccagctcatttttttttttttttgaataaaatgtcggattatact

SEQ ID NO: 15435 - DNA, 1464 bp, Arabidopsis thaliana landsberg
ttgatattatatgataccagttgttgtgattagatgcaactctcctgatgatcttaatgaaaatgtttgtttggtaaaatattaaaaaaaaataagtttgaccgagtcacatagtaataccaccgacattagtatgtctaatctctatatatttgtgggctttgcctctctactctattcttcactctcgattccattatctctctccgtaagaaacaaaacaaaccctaataatgtcgtcgtctgattgcacaatgaggaaaagaggaacaaaaagaaagattgaaattgagaaacgcctgactaaacaacaacgatctgtggcctgcagcaaacgccgtcctacactcttctccaaagcggctgatctttgccttctctccggagccaacatagccgttttgtaacttctcctgatgagaactccgacgtcgtttattcattctcgggctactctcatgcctctgaaattgttgactgttacctcaacggcaagtatacctcccaagactactattaaccccgaatcatccaagttttggtgggaagaccctaatctctacggtgattgtgacgatttgtctgagttaagaatcatcgaagatcgtctgatgagaacgaagaagcatctcatggattgtcttgagaagaaagaaaaatcatactctgtttctaaatctgatcaaaaccctaagaacaacggtgggtcttcttcttcttcttcttcttcttcttcttctcaaattgcttctgattctggtcaaaaccctagtacctcttatccgttttttgatcaccactcttactcctcgcttgagccttcgtcacaagttactacttgttttgatcaaaaccctattttctctgttggcagcgagtcatcatctgatcaatctcgttacttggtgaatgaagattctggatttgttgacggcctcttatgtgaaacagaggaagagaataacggaatgcgtcttccccaagaaacacaaacacaaccgatgttcacagaggaggatcagagcttttgggaaaacctagatgtcgacgacgtgtttggtctttttaaggacgacaacaatcttgaggttcctcttcaagatcattcctcaaccaacgaagacgacgagttattgatcgacataagtgaatacttaagcgaagaagcaatggaatgcccatgttttagttagttctcacagcttgattaagcacgatctcatagttaattacggttttagttagttcattaggtaattaccatttatgttgttgtgtgtaacgatctatagatatctgttttatctcaactcttttgattctgtaatttcgattttggttatggctgtggttagtgagactaattgtggtgaattacaatatctttatgttccctttttaggcattctttcttgtctaatgtcaaatggatgatgccaaaagaagaagtagaatggtgaaaac

SEQ ID NO: 15436 - DNA, 1658 bp, Arabidopsis thaliana landsberg
gagaacatagttttaatcatttgtaacttggaaaagattttcccaccatcattttttgatgttatgaaacacttacctatccatctcccatacgaagctgaattgggtgaccctgtccaatataggtggatgtacccatttgagaggtttttgaaaaagttgaaaggaaaaccaaagaacaaaagatatgctgcaggctcaattgttgagtcatatatcaatgacgagattgcttacttttcagagcactactttgccgatcatatacaaacaaaatcaaggtaaatacatttatttatttaactatttactatacttcaattttcattcaattacatgaatcaggttaacaatattcgataaaggtgaagttcctgtttatcatgtccctggagtacctagcatatttatgcacgtcggtcgtccaagtggtgaaatgcatgtagaatggctttcagagaaacactaccagagcgcacatgcatatgttttaagaaattgtgactattttaaaccatttgagaggtatttttaatcactattaattcgtttgtaaattttcactaagatcactttgatttatttttctttgtttgtaaatatagtatgttcgaggattgtctttctgcaaaatatccatgcttgaccgaaaaagaactctacgcgagaagagctgaagaatatcatctatgggttaaagaatatgtaagtctacatcaatttcttgcattcaaaaagtgagaatcatatttatatgtattaatattatttatctattatgtaggtaacatattggaacactacttctccatttcctacttgggttcaagaaattgtgcaaggacctttgaataaggtcaaaacttggccaatgtatttcacaagaggatatatgtttcatacgcaaaatcacggcgctggacgaaagacatgtaactatggggtatgtgttaaaggtgaaaattacgctgattcatctaatgaagcggatatctacggtaccttaactaatatcatagaactcgagtatgagggcattgtcaatttgaggatcacactttttaagtgtaagtggtatgacccaaagattgggagaggcactcggcgaagccacggtggcgttgttgacgttctatctacgaggaagtacaataaatacgagccatttattcttggtacgtaatttttaagaggtcaattgtatttctcttttaattattaatactcttgtttgatatatatgtataacttgtgtttacaggatctcaagcagatcaagtttgttatattccgtacccatatacgaagaaaccaaaaagcatttggctcaatgtttttaagagttaatcctcggggaaacatttatggagaatatgaaaataatgatccgactcttgtgcaaacaaaaaatgatgaagctgtgttgctgactacaattgaagatctggtattagacaatctggtagaaagcttaaacccaatcatactcgattacgatgtcggagatgctgaaccagaagatgaattccgatgtaatttatcgtcttcaaacgatgatgaagtcgaagatgatgaagagtactaaatgtgtgctttatatgtatattaattttcctatttatatgaaatttttttgtttaagaatatatcatataatg

SEQ ID NO: 15437 - DNA, 3866 bp, Arabidopsis thaliana landsberg
  unsure (1)..(3866): unsure at all n locations
gtaaaactgtataattttataactgaaatagagatggtaaaaaaaaacctagaataaggtttatgtttacaaannnnnnnnnnnnnnnnnnnnttttatgataatttgagattacaaaatagtgagagtagtagtactgtataatgcaatatcacacagagagagagacacacatatatatatctacatatgtatattatcatttttgatataatggtagtaaaaaaatatggatagtttttagtaacaaatatattttttatagtatccatatgttttcttagtaacatatatatatatatatatatatatacaagtggaaagtatcaatttgatataaagctagtcaagtttagacaacaaaaactagtcaaacaagataatagaatttgtttttagatatttattatgagttttaaaaatattagtgactgctttacaaacaagtaaagataaatattattatattttcctcttgatcaaattaatattttgtgctggtaggaaaaaaatcaaattaatattttgttgtttttcattttaaatatcatatgctctctttctcgtataatagtttcaattctctttttattatcatggaacactgaaaaaaatagatatagagaggtaaaatccgattaagtgtcaaagttgctatgtaggcaattgtatagtttatctaagattataaaataatcctacgctttgaatcgttgaaaatgtttgacacatgtatggtctcgtctcgtctttctaaagctccaaaagaaatttattaaaagcgagagactttagtcaatacttgcatttattggattgagtcatattggtctataactacaatattaaaattgatcaatacgaaagttgggcaataattcagacggtcaaccacaacaacataatttggatgattccaaatcaagcctttaaacttccttcacaaattgaaatctttgataaattttaatggatacttttttaaatgataaatgactaaatcagacactgagaaaagaaacaaaataaaaaagtttaccgaaggtagaaaaatacatgttcaagtttaacaaactcattaaaagattttcgtgttttttttctttctaaccatgcttttgctttcttctaatgtgtatgtacctgaagacaaatagagacatgaatgctctcttcaccattcgtgtgattacagtgcgttttattttccgtttctgttcacacacgtctcttcttttctcagttccattccaacgccatgatcttgatccttgggttttgtcgtcaaacttccttcacggtttgtgtaatttgaacccaaacactctttgaacatagttttgtgttgccttcgctggcttgagatgcccataagtcatcaggaacagatgtggaaacgttgtcccaaagtaagctccatcaatgtctgttcattcttttaaggaaaaccgcaaaaaaaggtaacaccaacacctgcaagatcactagaaactcaaaagaaaaatcatttcttcatgcaataagaatcaaacatcaaagtttttcagaactgcatttatataactctatatcagcagaagtgaaactgtagaaaaaaggatactgccttgatactttgatcgtgggtaataaatgtcttcgcatttcgcgcaatatatcttcacagtgctagatcgcggtaagtctgattgaccaaccggaagacaaggttggccacagcaataaactcttggacatcttccaaagtcatagtttttgtatttgtctaactgcaaataaacagaatcaatctgtgaatcttttatagaatgtgaaagacatgcaaatgagtgtttaaggattttgtttaccattgctgccaatcctttgctagtcaatatgtaacgagcatgaatcagtccatacaacatctcagctgctgactcgatcaattcattctgttcctctgtaaacatctctcctgttaccgaccaatccaaatcaaacattcaagagacacaatcgtaaaagcgaacccatatcggtttccctactatccctaaatgcagatgctgtgcctgtacctagctaaaccgcaaaaactaataaaaggataacaacttaccctgagaagattcaacatccaaaatcaaatcaagagcgtactcgtagtagggaactagactgctgagtccacacaagttgaagtcatcttgaatgtaatcatcatcaacttcacaaaagaactcgtttcctcttagattacaaaaccaagatatccatgaagtgtcctctccatcagaaccactcacatctgattcttcactatctgtgtctgattcatctattcacatcaaaaattccataggctaataaaggaatttgcttaattcagctcatggagataagatactaaacataaagatcaaaacttgattcccaaatcaggaaactctagggttaagtatctgtttctaaatgtagattcgatttcaatagagcaagagagactaaccatcagaaaccgtattgttcttcgagagagaagcagaacgagaatctctatggttgatgttattcgactgctgcttcccaatcaagttcgccgtcgtcgtcgccgccgtaacggttcctttgcctttgccgttaacttgacgagaggttgaaggagaaggacgttcaagagcgtcgttgatccgtttacgatccacaacttcaggtctcgaattcaccgttcctctgtctctatacatgattctaaaaatacctgataaatctctctcttacagcagctattgtacaactttcatcggcatgtaatcgccggtgagagattgagaaatcgacggcgattaccttgagctctagggttttgcttcttcttttattttatttttagcttttgtcgaatcttgttctttcgcgtttcgcaactagtctgtttcgtacagagaaagattattattttatttttttggtcaccgtttatttttgatttgaaagaaaaaatgataggggtaaaatgggaaatagagaaataaaaagctcccggagacgagggagtgaatcggtagctaagctagccactagagagaaagtagtgggagagatgggtcgaatcgaactaaccactaacttctggttcaacacgtggcatttcactgcacagcaacgaccgctcttgtttctttaattgccattttgccaatgttgcccacatttgtttttagaaatatgctcacttaacaagatagacataaattacttacataaaagaataaaaaattttgtattatttcttttgtctttttaataacatagttggcacatacattattacaatattttatacagtttactaatgataatctttcatgtcacgtatattattagatttttttttgataatctttcagtttttcttgctgtaatttgttttaaaaatgaccgatttgtcttttaaccaattcatcatccaaaacatcaattagtggtttaaatggcccaagaaagcccaacaggtgatgaacaccggcaaagtcttgtcacgtgaccagcacatgaacgagacgatttacatctttctttactcagtcggtcgagtccgagagaggagaacaatggaagagaagaagaagacgatggagatggaagcaacaacaatgaaaggcacggcggcggaagatataacggagagactctcttctctcgacaatctctattttccacgcgccgtccaattaaccgctgcatcttccgaccaacgcaaatccatcctcctcgacctcctccgtcgtgatcccgccgtttttctaggtactttccattattctgctccaattcctcgattctaatttcaattttgtctaagtatgattggaagtgtt

SEQ ID NO: 15438 - DNA, 1967 bp, Arabidopsis thaliana landsberg
  unsure (1)..(1967): unsure at all n locations
ggttcatataggcattgttgtggcttgttttcaaagccaatgacagttgttaggtccagtttttaaggacgaatcatccaatcactggttctttctgaacacaacaaagagctatagagttacgttactgtagccgagacagagccagcaatctggttatgccacatactaggttctttcttaaagttgactcactctatcctaagttctacttacaaggagctacaacaaattggtcataaccggagagcgttcaaggaggtaatatcccatcttactctgtagcaaggctacaaaaggagagctaaagaactaggctacaaaaagagagctaaagaactaactatctagcaaaactacagagctatagtgtaaagatttcataaccggtgagcgttcaaggatactttgaagagaagaggtaatatctcaactagcaagactacaaaaaaatggagatataaaactaactgtctaacaagactacagagctatagtagagatagatacgttcgacacttaagcatgaacattcacataaactgtctcgctggtcccagtaagttctacttacaaggagctacaacaaattggtcataaccggaaagcgttcaaggatacttttaagaggtaatatctcaactaactctctaacaagactacaaaagagagctgtagaactaactatctagcaagactacatatctatagaagagaaagacaggtgaagacattaaagcatgaccatttagcaaggagacacagaggtttaagaatgaaacagctctttgttcaaatagtctagggtggtgcattagaagattgatgcaatagacaataagtatcacaacagaggcaattcaaacaacctaaacttgagagttaccaaaggatgaatgcgtatgtactcaacataatcacagaaactccagtgaaccagactgtataaagttataaacatagtaacggtatcacatatgacataacatcatggaaaaaactttggatgcagataaagctaacgcgaatcaagtaaacctgtagtaaaccatgattatatggagaaattcattttagctaactcttttttctcaaatacccgataactgtgatagaagtaacagagctacagagaagaactgggaaatccaggtataccatattcgcccatgtatgcaatatgctctaaacagaaaacttgcatactaaaacttgaatgattgaaacactacgaaaaatgaagtcttttaactcttaatccatccaaaaccacattgtcaaaatacattgattactcatctactggcgaaacatcacgacctatagaatgctaaagacatattgattccaacacatttataagttttttttttgtagaaactaacaaagatgaaacctcattctcattcgaatttaggctctgccaccacgaaatggtatgcaatgaccattatgaagatgaaaatccccagaaaattggcaaagaagccgaggtcttggtcgtcaaacatctgtaacaccacacacaattaacaatacgagaagcttggtatcagacttagacaaaacttgttaaaaatcacccaccaatctacactttcaacatcattttctatgaagatggagcacatagtccaacacaattaggttcatacgtcaggaacaagtttctttaccaaaatcactaaaagaaaataactttgacgaaatccagacatgagtataacatcaaaaacatggaatacacaaaaataaaaataaaaaattgattgaatctcatagcagtaaataaagaaagagttgcatcatcatcacatctataagtaattgatcatatgaaatagattcaagccttaagatctacaaattcgctaccatctgagaatgacgtatccaaggtaaagaccgaaaaaaacaaatcaaatctctgagtgtttttacctttggagagctcanaagatacagac

SEQ ID NO: 15439 - DNA, 3007 bp, Arabidopsis thaliana landsberg
aatagttcatctttttttaatagcaagtctcaaattctttgggggaacaaagagtccccccattaatgagcatctgaccccatgggaaatttttttaataacttgaatgataattattttcaatagacgtaaagacttgaaatatactacgtttaataatcatatgtagtatgtatgattaattaagtaaatacaaaaatagttacctcaagtttcaaagggtgctattgggtaattatctcagtagaaataatattagatcaaggcaaaaataactgaaaattatccagaaaagaaggattaatcaaaggcatccaaaatctataattgggttttttggagaaatgaccatagagatttaaatcaatggttgtctaatctatgttaattctcaatcctctattgactcttctcatctccttttctctctccccagttcctggttattaaagcaatcaggtgattcaaatctttaatcttttaatcccggcaggcctatctgaaacaacaacctccgtttgaggttttgccgggaaaatataaagttcacaggctttggtctctgcatttgcaatatatttaaaatggcagcagctttcttgaatcttggcggctatgttttcgttttcttctcttcgttcttagctatagtggccccacaggttcgaggcaatgttgctgtctttgatagctactggacgcaacgacaaagtgatgcattgaaacaaaccatcggctcttacgatcctcatccacttaacgtcaccaaccattttaattaccatgtcaatatgtgagtttttgtctttgttaggtcaaatgtttaacctaacttcctaaacaagtactaattaaacacttttttttttttttaacagagcagtggatgcatcggaatcaaggaacgatacaaggagagagcttactcaggtgagaagtggtcgtaaaacgcacaaaagcagcggaaaatgcctagcttataacccgatagacaactgctggcgatgcgatcgtaactgggctaataaccggaagaaactagccgactgtgtgctcggattcggccggagaaccaccggaggaaaagacggaccgatatacgtcgtcaaagacgcgtctgacaacgatcttatcaaccctaaaccaggaacgttaaggcatgcagtgactcgagacggaccgctttggatcatattcgcaagaagcatgatcataaaactgcaacaagaactgatgataacgagcgacaaaacaatcgatggaagaggagctagggtttacatcatggaaggtgctggattaacgttgcaatttgtgaataatgtgatcattcacaatatttatgtcaagcacattgttcctgggaacggtgggttgatcagagactctgaggctcacatagggcttaggacaaaaagtgatggtgatggaatcagtttgattggagcaaccaatatttggatcgaccatgtctcaatgacaagatgtgcagatggtatgatcgatgctattgacggctccactgctgtaactatttccaacagtcatttcaccgaccaccaagaggtaaaaagattcctttgttttcgctcatgtgaagttgcatatgaaacaatcaagacctctaatttagagtcttgttttaaattttgtgagagaacaggtgatgttgtttggggcgagggacgaacacgtgatcgacaagaaaatgcagataacggttgcgtttaaccacttcggtaagcgattggaacagagaatgcctcgttgcagatacggaacgatacatgtggtgaacaatgactacacacattgggaaatgtatgcaattggtgggaacatgaaccctacaattattagtcaaggcaatcgtttcattgctcctcctaatgaagaagccaaacagattacaaaaagagagtacacaccatacggtgaatggaaatcttggaattggcaatcagaaggagattactttctcaacggagcttattttgtgcaatccggaaaagcaaatgcgtggagctctaaaccgaaaaccccgctcccaaacaagtttacaattcgacctaaaccgggaacgatggtccggaaacttaccatggatgcaggagtacttggctgcaaacttggtgaagcttgctgattacataaccattttgcccccttccaacaaacagccaaagcttttgccctgtttttgcttgttgttcaagaaaaacaatatggagagagaggagagaaaacgaaagagaatgtttttctatgaatggtgttttgtaactaagactgcacatataatgcgcagttttcggattattattcttaataggatccaggttcctttttctacggaaaaatgagaaaatcaaaataccttagatctttatactaattatacaatctcctcgtaatactttcatcaattagctctcttatcttgtctcgaatgttattagctatatggaccaaaacaatatcttgaagagttgcaaaatttgaccaacaaactgttgatggaagaagcaaatattacaatatgcattgacaataatcaaattactgaatagagaccaaacttgggaaataacagagaacaaatccagtagatatggatttattccagaaagcataatcatatgaattggtttcgaagtcaagtgtcaacagtgttcttgttgagacagcatagccaagtccaattgtatatagatctatggaacatattttgtctcatgtcttatcacttggtcgggccagtcgttggtcctaaaatcgaaaacttcgcatgtagtagcgttttctagacctattaatgcagaggtacatagacaaacgaccttgtatgtgcctgcagatgtatatagacaagtttcagttcaataaaagtttctctttcgttcttttgtcttctctaaggagaagagatattatctcttactctggttcttttttctctcaatattccaacacaatttataaaatttgggtctatatgcaatttttg

SEQ ID NO: 15440 - DNA, 540 bp, Arabidopsis thaliana landsberg
cctaattatacacttcattgcccaaagaagggctttcacttatgtatgtaggagttgttatttttttaaatattttattattttcaatgtgcaagtattttttatttaaatcattttctttgtattatgtaattgggactatgaaaaaggaaatatttgcatcttaggacactttatttaagatttcaatcatttataacacttttcgaaactgacacactttttcatcttctcccaacctttttcttatttaaaattaccgtctcgccctcgagtgaagttcagtcgtcccaacaaaaccaaccctaaccggtcctagtcacattactcattttcccttatccaccatctcctgaacataaccttcttgatccaattgccgcgtcccgtgtaaaattcatattctctcccctcttatcggttatttctctcaaatccatcgtggtccccctccatttctgtccaaaaatgaacgaaattactgaagatccgaacatagttaccccactccctacattaataggttaagatttttaacct

SEQ ID NO: 15441 - DNA, 3144 bp, Arabidopsis thaliana landsberg
atgtaatttaatctgcgtaatacacatgacttcttgaattaattgaatacctcgatattgttttaatttgaaaacaattatcttttagacatactgtatgtatactttcctgtaattcaatctcacctttaaatcaatcaacattattctcatttatctaattatattatgtatatattagctaacattttgttgtgtacaaagtatactaatcgtcaggatctttgtttaatggtaagtgatacgaaaatatacgaaatcacaaaaccttaatcaaccaacataaaatcatgagaagcgaggagaattcatttttttgtgactctttgtcatggggaggttgcatgaattaaattattatcccatgcatattgttagatcatgccttgattaacgaagattgtcacgccttttttatatacgcacatatgcatgtggagtatttaaaataggtggcaaacaatctccaaggtcaccaaatcacctaatttagtgataattttttctccaacgtaacactataattgacggtatactttttcttttggtgtttgttaacattgttacgccataaataaatattttttttttttatatctttgattaagttttatattcaaattgttggttttcaaataaatgacaagtatactatcaatattttttgaatgttttcgtttctgtaatatcaaatttttaatcaaattaatataaaatgataatgtgcacaatttttttcaaataaatatcacattagttaaaattaaaaatacatgataaaacttaattaaacattaaaaacataaaattataacatttaaaccaaacaaacataaaaaccaaatgcaataaggtaaatttaaaattcagcagttctaaattaattagtatttatcaaactattaaaaataactattattaaaatattagtatttaataataaaaattttgtttttggtgtgagatttggtgtttatggttggagataaaaaaaatctgaacaccaaaacaccaaatttgatgttaaaatttggtgttttggtgtcaatggtaggagttgctcttaaaccgattttgtttactattggttcaaatgtcttttggtttggaaaaaagatcaagcaccaataaattattacatcaaatataattatttttttaagatgtatctttaaacattaagttaaatttagcacatttttttttgttataacatctcaaaagaattaagttatgatacgaaataaatcaatattttaaaacaaattagaaattggtatacaataaatttgctaagtacaattactatcatatgatatcacaaataaaactaataaattatttagtaatgattacattagtgattaaaataactttgtttacatcttcataatggttttatagaaggtaaattaactataaaaaatggggtcgtggccgcaaatatacagaaacaatccaaatatagaaaacacaatattataaaaataaaaaataggtggagggtttacattggggttttgagagaggcgcttctctgctgcaaattgcctttactgtgtttctctcttcccctttataaaaccgcttccgtcgtcaatggcgtgagcctaaacaagaaagaaaaaccattcttctctcttttcgtttttttcattctctctctctctactccatcgttttcacacttttctcgccgccctttatccttatccgataaacccacaaataaagacagactcttttgttctttaaacagagattgtaaatccagagccgccggaaaatacaaccgccggtttactctcaggtctctctttcactctctgtttctatctctggttcatactcttgtgtcttctgggtttgatacaaatgataatgcaacagcttttgctctatttgaatactgatttgaaccaataagttttcattttttaatctttttggtcataccctgtttctgattctgcgataaagagatgttaaatctagaaaaatccaaattctctctctgttaagcatttctcaaaagcttcacgctttctcagttaccggagaatataccgttgcaaacagattccaaccccacttatatgtgcaggataagttcataataatcgattttacaaatcagtttgaagaagatgaagtacgtacttgtaacaggaggtgttgtgagtggattagggaaaggaatcactgcaagcagtgttggtgtccttcttcagtcttgtggtcttcgcgttacttgtatcaaaatcggtatctttctttcgttgagttcaaaatgtatatgatgtttacttgtggggcactcaacctaaagccatttttttatatctctagatccgtatttgaactatgatgctggaaccatatccccttacgaacatggagaagtgtttgtcttggacgatggtagtgaggtaaaaacaaaaaccaacttgcctgtgttttatctaccttttgtattcaaacacttgaaaacgtttttgatggatttgcaaaaaaaggtggatcttgatcttggaaactacgagaggtttctagatacaacattaactcgagataacaatatcacttacgggaagattcagcgggtaactacagaatgtttatctttgatattatctgcaacaagcccataactaaagtacctttgctgttgttgtttgtcacagtatgtgatggagaaagagaggaaaggagattacttaggggaaactgttcaggtaaatgaaagtttcaatatttctattttgtcatcataaactttgagttttaagttttggttggtaattgatattagattgttcctcacgtcactgatacaatccgagaatgggtggagagagttgcaatgattcctgtcgatggaaaagaaggtcctcctgatgtttgcatcattgagttaggtggaactataggtaacattaaaaccgagaatttcaattttctttgtttgcttcttctctatataaaacagagaaatctttgtgtttgcaggagataatgaatctaggccttttgctgacgcacttagccaattatcatacagtgtaggccgtgagaatttctgtctgatccatgtcaccctcgtgcctgtgctcagtgttgttgagtgaacaggtttgtttataa

SEQ ID NO: 15442 - DNA, 2328 bp, Arabidopsis thaliana landsberg
  unsure (1)..(2328): unsure at all n locations
ctgagtcatatccattataatttttcttttgataaatataactaattttctaataactatgttatttaagatatgttatttgtaataaaattatagctaaatataattaaatgtacccgaattacatttacatataaattgtgttcttaaattttcaatttcgtaaaattattccattaatttttgtttttttttttcaggtttgcattaactacgaaaattaggtttggagaaagcaaaattagaatacttttgtaatcgaatgtcttcgaagatctacagaacaaaagaaattaatcaaagttattacatgttccccagatgagtatatatggagtttagaagtaaccaagtaagattaaaaaaaaggttggcttcgaagaactggagtgcatttaagtggatgaaccatgcttaggttcattccttcaaaagtctcttccatgttgactttatctcctttgattttccagtcaaagcactgcaccatcactccaattgcagttccaacaaatatataagctagattacctccaggacatcctctcctcccgccgccaaaaggaaggtacttaaacggtttctctttctcgtcttcttgcccacttgaagaacttagaaacctctcgtcaggatcttcccaagaatcaggatctctcatcatggcataagcattgacaacaaatattgtcttctctggtatgcaaaactcattgagttcacgtctccgagtttcgcgaggctacaagctaaggaaaaaaaataggccacataatatatttaatttcatgatttggttgtaaaatatttttatgtttaaacttcactttcaagggtcgaactcattgagtttaaactattagacgacaagaacttaactagaaaatgcccgaaactaaatgatattctaggcggccgcaagcatgtgttttgcttgcttggccttatggccggctttggatgcaatcttagcccttctttgactaccgcttgctagtaagagaggtttggtagatcagttttttttattaacgttgttaagccctacaatcgattcgcaatctctccagaatgttagggttgttagtgagctcctccattgtccactgtattgtttgcgttaaggtgtcagtgcctacaacaataagatcctgtagtagcaaacagaaacatttagggattccaaacatttattcaaaggtttcacccgaattcacaaccgaaacgtttcttagtcaggtcaaagcaatagtgttcactcacgaatccacctaagagaggagcatttaccacgatcacggacttgatatggtttcttgtgattttatactctgtattttcatctctataagcttccaacagcacatccatcatgtcactgtaccagttatatggtatgtgtttgttcctttaaatgctatggagattttgtcactataacatgttatatggctatgtgacccaattcatgcatacaatctcaagtgttagtataccagttataaacagcttcttcgtctctacgggagaagattctgaatcatcttgatctcgtgaatcttgtgtacttatcgccttttggaaaggaaaagagagcgccaaagttactacaaagtgagattatacactgatactcatcaaaataagctaaaggtaagtttacaaagattctaagcaatatagtagcacattgtttttgatccgtaagatcagtatccaagacagaccttcgtaatcaggaaccacaacaagatcaccacgcacgcgtgcatcaattaaacacaatctgttttcatctcctaactttagtttagaacaagtcaacaaacattgttgtctgacatttccatttgaaaaactcacaacaaaaaccgaaatcagtctgccaggaaacatgataaagacacatctgcgcatccttctctaaacactaataaatctcaagttcttgccaaaaatgataactcataaagatatacaacatcacaattgatttaaacaaattttgttctcagcactatttatagaagaagcaacttggtgtatttcctaaatggctaaaataatgccaattttgataaatttggcaaactaaatgtttatagagtttgcagagctgacactgtctgcctcttggcttgaagcatctaaaatttaacaataaaacaaacttttgtgtataacaagattcttaacagctcanaataggccaaactgaactcatgtgttatcatgaggttatttaaaacaacagaaagcaagtaatatttatagaagaagcaacttaaacataaaaggtaacccaataaacaggaatcacgcgtaatt

SEQ ID NO: 15443 - DNA, 567 bp, Arabidopsis thaliana landsberg
  unsure (1)..(567): unsure at all n locations
gccattatgagttttttttttctagacatcttcattttttaataggaaaaaataaattaaatgccaaatgtgaatgtgaatgctaatttactttattaatgtccaagacaaagaattttataatggcacccttttttggattatgaagttttgatccgtttcataaaaataataccacattccaaattcacatggaccaaccatggattttacgtttaattaataaatgagatgggttactaacttatcatgtgaccaacagacaataggatttcagagctcaagcaacgtcgtggtctctgggctaacgtcannnnnnnnnnnnnnnnnnnnnntcgtcatcaacggttgtaacaacgtaaagcttcagggagtcaaagtattagctgccggaaacagccccaacaccgacggtatccacgttcagtcttcctcctccgtctctatattcaatactaaaatctccaccggagacgattgtgtctccattggtcccggcactaacggactatggatcgaaaatgtcgcatgcnnnnnnnnnnnnnnnnnnnnnnnntatttttacaa

SEQ ID NO: 15444 - DNA, 543 bp, Arabidopsis thaliana landsberg
tcaaagctttaataagcaagaagaagcttcgttttcgtgttctgatgtcagttttaactagatattgggggtatgagggagtataataactagaaccacaaccggatcctgaaagttatagtaatgtttccctgttagtagatccaaccaaaaactcataggtacttcggccacattatcaaagctttgaaaagcaagaagatgctctgttagcatttttggagtcaaatatgactacatatcgtgtgtatgattgagtatgggaactagaactgcaatcggatccacgaaactatagtagtgttttcctcttagaagattcaaatccagaaactcatacggacttcgactacaccatcaaagcttcgaaaagcaagaagaaggttggttagcgtttctggtgtgaaatatgactagatgttgtgtgtatgatagagtataaaaactagtaacgcaactggatcccaaaaagataagtagtgtttcattgttagaagattcaaaaccaaaacatcatacggactttggctacaccatcaaagc

SEQ ID NO: 15445 - DNA, 680 bp, Arabidopsis thaliana landsberg
gtatcgagccaggttctacgtagttttaggtctggatctaggttcatgagatggatctacttgatgcacggtttgattagatcaattggttataaagggttgaagtcgattacatcggatatgactggagagatcagttcgtccttctctgttatgtgcgcgacttgcccctaccggttggaatcaccatcggggctaactgcgtacacaaccagcagattgacgcaacagatcgacgtcatgagtgtaatcttcttcgggtcgaaagtctcggatttgggttgatttgatcaaccgcatgagatttccagtggaatttccatacatacgatgcatgaatcccccctcgaccccccgcccgctgaccggccagcggggccgccgtggctatctgctgtagtggcgaacgtatagaaacgtgtttgtctaacctgtttttgcaggacatgtgatcggtatggctattatgtgtatgtgatgcatgttaacaaattattcatgacctgcgtgtcgtgaccagggcaatacggctggagccacatgtattgtccaaatttaatgtaatgacttgcgtgtcaacatgtgatgatccaaagcgtatatgtaatttgtttaccagcatacgttagataggtcttgaaggactcatcacctggaggatggcatacctatatcatgga

SEQ ID NO: 15446 - DNA, 2381 bp, Arabidopsis thaliana landsberg
  unsure (1)..(2381): unsure at all n locations
accgaacgccagaaaaatccttatgcatcaactgtaaaattacactaatcatcctctctcacacaacaacactacgcagatccagagatcgctgatccttcacacgcaagctaatgaagcctctcactaatggcgatctgttcaaatccccaactctgatcaagatctccgccttagttttcgtcaccgtcgctttcttctacttaggcaagcattggtccgacgatggctaccaacagctcgtcttcttctcctcttccacctccggtagctcgatcccggaggtctccgtttcaccgaatagtaacagagtctttaatttatcagcgataattcctactaaccatacccagattgaaatccccgccacaatacaacaacaacctccgtcggtggtggcggacacggagaaggttaaggtggaagctaatcctcctcctcctccacctccttctccttcacctcctcctccgcctggtccggttaagagctttgggatagttgatgcgaacggtgtgatgtctgacgattttgaggtgggtgaggttgagagtgatacagtggaagattgggggaatcagactgagatcgttgaggcgaaaagcgacggtgattctaaggctagggttagaattaagaaatttgggatgtgtcctgagagtatgagagagtatataccttgtttggataatactgatgtgataaagaagcttaaatcgacagagcgaggtgagagattcgagcgtcattgtcctgagaaaggtaaaggcttgaattgcttagttccacctcctaaaggttaccgtcagccgattccatggcctaaaagccgtgacgaggtactcctttgtttgcatgagttttgcattttggttggataacatgtcttgggatttagtttaagtagtatttggaatttacttatggataggtatggtttagcaatgttcctcatactcggcttgttgaagacaaaggaggtcagaactggatttcacgagacaagaacaagttcaagtttcctggaggtggtacacagtttattcatggggctgatcagtacttggaccagatgtctaaggtggctcatttttccaagtagtagttcttgtttttcgcgtcaactgtttatgtatcttttcatctgatgttgagctctggagtttgtgtctgcagatggtttctgatattacgtttggcaagcatattagggttgctatggatgttggttgtggtgtggcgagttttggtgcttatctattgtctcgtgatgtcatgacaatgtctgttgcaccaaaagatgtccatgagaaccaaattcaatttgctcttgagcgtggtgtgcctgctatggcggcagcatttgcgacaaggcgtttgttatatccaagccaagcttttgatcttattcattgttcaagatgtagaatcaactggactcgtgatggtaaggttctatggtgtgcttgattcttcacctaatacatcagaaaaagattaagattgcacctactgtaatttttaactccctgtgtgaactatgctctagcttttattacttgtacagaaaattctcactctgctgtttcattctttgtgataaagatggaattttgctccttgagatcaatagaatgctgcgcgctggaggatattttgcttgggctgcacagcctgtttataagcatgaacccgctttggaagaacaatggacaggtaacatccttttaatctgctttgagtaggcctgtaattcagggttgataaaattctttggtcttaataaactttttggagttagtaatcattgtacgtggctttattatttactacagtttgtctctgtgggtttaaggagagtttttttttttctttattgctactttgattcagccaatatgtgtactcttttaatctcacattttgttttccagaaatgctgaatcttactactagcctctgctggaaattggtaaagaaggaaggatacgttgcaannnnnnnnnnnnnnnnnnnnnnnnnnngctatttgagtcgtgaggctgggactaaacctcctctttgtgatgaatcagatgatcccgataatgtttggtacagctgctaatctttctgtttttctttgtttgtgatacaaggccatatcttgctacctgcatgtggaagcataacaacagaagaataaaggctacatgttcttaaaatgctgtcagagttgcatcagaactttttttcaatttgatttgttttgattgcatctagtctgtctgttaacttgtctgtgacaatgtgtgcaaaatatcacattttttatgcctcatgttgatttattgttgtattaggtacacaaatctgaaaccttgcatcagtcgcatacctaa

SEQ ID NO: 15447 - DNA, 1360 bp, Arabidopsis thaliana landsberg
gaatatatttgattgtacaattttttttttccgttaaatcaaagaaatatttatcccaacgttcatgtgtctttaacattgggattgtgaatggtgtgacggtgtaaaaacggccggaaagcgaaacggacacacatgtgttgtcattcatgatgtttataaaaagaataaaaaataaagggcatatcgaaatatataacaaagagaaaagaaaaacaagaactgtatgtgtctaaataaataaggtgtggtattactacgtagttgatatttttgtatgttgacgaagacgaacgagcttattaagtattattcacaggcgtttttttctttaacagatttgaaccaaagacataagagagaaggaaaaacagaatatgaacacgacagtgaccagttggagaaaacagaatctcttgggaaacaagatatcacttaccttgaattctcatagcagtcaagataagcctttcctttgagttcacgggaaaacaagccattcaagtagtctttagttttcaggcttataaactttgcagcctcttgtctttgaacaaggcttttcgacggaccaatttctgttatccattcccgtgttgtgaaatgtcgcaatttatagcctctctttctccaagttcaccattgcccggtgctcgatgcttcggtatgtcccgttcgttatgatctgcattacaaacggcccaacacccatcatcaaaatatttatgactagcgattagctgccataaagtctatcagggtttagcccgaccaaattcatcaaaacatctatatagtatggcttacctctaacacgtccccaacattgacaatgaaagcattttggagaggtttgacaaaaaaccacttgccattttttttgatttggagaccgtcaacttcattcaggtgggaaagtatggtgagcccgactgcatcggaatgcggaattagacccgtaaccagattaggttgtggacacgggggatagtagttcatcctcatactctgcatcatatcatcaccaaatatttcttctacctcctctggcttgatctgcaaggctttcgccattttcgctagtaagatcttagctatactctttactcgagtggaatacatatctaacgtatccctgaaaaacattaaccaaaatgtaaatagagagactttgtggtgttagttgagaatgttaacactttttttgatgcatgcaaaacctaaagggaagaggtagcttggggaacaagtgaggcttgcgtaattgaacaggttgcattataaggaagaataaatctgcccagtcgagtttctgatcttctgaaaccacaaaagcttgtccaaaccctttcatcaccgt

SEQ ID NO: 15448 - DNA, 550 bp, Arabidopsis thaliana landsberg
  unsure (1)..(550): unsure at all n locations
taactataataatggtcatgatcctttctttgcacacattaaccaaaatccagagctaataaatctggacttaccatcttctaccccttccagtttcatgcttttctccaatggagctttagttgatgccaatcacaataattctcacttcttcccaaatttattgcacggtgaaaaatttataattttattgtttgtgggaaaaactgttatatctatgtttatgtgtgttctgatgaagctagaaatcgcaggtaatacgagaagaaaaggaaataaagaagagagtgggtcgaagagaagaagaaagaggtcggaagaggaagaagccatgaatgaagatgagactcagaagccaaaagatgttgttcatgtccgagctaagagaggtcaagctactgatagccatagtttggctgaaagggtaattctacaaatacatatatactcaaaagtacaaaaaacatcacttttcttagttgngttggattctctgtggcatgcataaaggtacgaagagagaagatcaatgaaaggctgaaatgcttac

SEQ ID NO: 15449 - DNA, 4602 bp, Arabidopsis thaliana landsberg
ggaagtgtataaggttttgcttccatcctgagaagaataaagaagaaggttgggtttttgctgttgacatctgctgttaaaatggggattgagttttcagattccgtaatgagaagagagattcttcataatgttatgaaatctgcttttgaggttatgtggttagggatggaaagagagtttgcgataagagggcttcaatatctcgataagtaccttgcgaaagaagcgaagttgtgtaaatggagtagcaaacaatgcggttttgttgcagcgtttgcatatgcgatcgcaggagttggaacaagtactaaggaagaagccaagaagatctttgtaatggttacaaacatggataagtatgttctgaatccggcttttaaactcgaacattttcgtgttgataatcaagatcttggagtagactctgaccgtgaattgtactacatgtttaggcaatgtactccaatggaagtcttgagtttctttgcaatacctggttctgattataggtctagagagatagcaatcaaaagactctatgattcactttgtgatcatacttcaagccagtgggaaatagatgtttcagagattagaggtcttcagccattgctcattacttgccttaaggaagaaggattgcctgagaacatatacaagattcttggtcaggtggtgttccacgttgcgcaggagacattcacctacgagaaagacccgtggttcgatctatgggactatattgggtgaggaagcaaagtggagttcgagaaagcggtttatatcttccagtgtttaacaatgaggcttgagtttaaagatattgttgttcctgcgataactaatcttcttccggagattaacagaaacctaaccccaccaagagagttgttggtagataacagtagatgggtcttggcgtttacaggtgcgtactgttcagctattcacttgctagaggtcaaaagtcacgcgggatacgttaaggagattgcatataagatgattgattcagtgagagagcttgtggaaagaggaatggaagttggacttgtgacgagagctttcagagatcttcaaagtattgtcaaaaaacaatgggactggtacatgacttgtgaatgcagattccttaagggtttgctttggaggctctacgcaattaaaggtatgaaaatggaaagtaagagcatcttcattggtgagatagtacttcataatatagtattaatatttttatgtttaatttaagtagaaaaatttatactaaaattgtatttccattggtatgagtatctcattaacattaacatattattatatgttttttatattaaatttaatatatctacaatattttcgaacatatcaattatttatttttacaaattatattattaaatagttttattatttttaaaaccataattaaacataattaaacattactttacatataaaatcaaaataaaaaaatatataaattaaacataaaattacatataaaaccatgataacataaattaaatagaaaaaatatataaattaaacagaaattacatataaaaccatgataacataaatcaaagctaactatattatctattatggttttactcttcatttgatgatgcaccaaacttttgtcatatatgctcaactaggtcatcttttagttgttggtgcatatctctatcacgaagtcgaattcgattgccgagaatgttgcaaaataaaaatagaaaattttaaatgtttgtttctaattaaaaaaaactattgtatttataagttattattatgtttaatgcttaactaacaccaattaaaaaatattcgtatataatttaaacatatacataatagagcttgttatatagataatttaattttatgaattttaaaaataaaaaataaaaaaaataataaacagatcaagtatttaattgatgttataaagtatagatgattttatttataacaaagaaaataaattaataacaaggtgacatgtggaagagagagaaagtttctccaagtttctcattttaaaaacgattctaagaaaaactgattaaaaaaatattattttaatattcttgataaatttttattggagttttttcagtgagaacccaccattgaagatcgtttaagtatgtgttgcggagaatcaatgttaatatgaagaggtcagtgaatgaaaatcttaaaatcctcccaacgagtgagtttaattggcttaggtaaattgattctcgttatcaaccaagattcttcaccgcctaaaaccttccggctaagtcagtagtcttccaaagtcaacgacagatttttcctcttttccttttttagcaagtttcctttttacttttctttagcatctgaataagcaattttccggtataaagattagatttacctttttctattgcacatgaaaaaagaaaagatgaccttttccttttaataagcaaatcatagtcttactctctagtctctatataagaagatctttcaccatagttgttgttattcacgattcaattcttcatctctcgtaaaccctaatcttgctgcaaaagtttcctgaattcttcctctctcaacttttgttacttgaaacttttttttcgtttcaaagatgtcgatgcaaattcacgcaaagactctcacagaaaagaccataaccattgacgttgtaagctccgacaccatcaataatgtcaaagcaaagatccaggacatagaagggattcctctagaacagcaaagactcatcttttccggtaaattgctagatgatggccgtactttggccgattacagtatccaaaaagattcaatactccacttggctctcaggttgagaggtggtatgcagatatttgtcaagacgcttaccggtaaaaccattaccctagaagttgagagttcagacactattgacaatgtcaaagctaagatccaaaacaaggaaggaatccctacggatcaacagagactaatctttgccggtaagcagcttgaggatggtcgcactcttgctgattacaacatccagaaagaatcaactctccacttggttctcaggttgagaggtggtatgcagatttttgtcaggacacttacccgaaaaaccataactttggaagttgagagctcagacacaatcgataatgtcaaggccaagatacaagacaaggaagggattccaccagatcagcagagactcatatttgcaggcaaacagcttgaagatggtcggacgctcgctgattacaacatccagaaggagataacacttcatctcgtgatgcgtttttgtggtgggatgcatatatttgtcaacactttgacgggaaagatcatcacacttgaagtggagagctctgatacgattgacaatgtgaaggcaaagattcaggacaaagaagggatttcaccagaccaacagagactcatctttgcaggcaagcagcatgaagatggtcgcactttagcggattacaacatccagaaagagtcaactcttcaccttgttctccgtctccgcggtggaagcttctgaacaagaagtctatggcagcgctttggttttctttttttcttgttatgttttaacttttgatggattcaacttcagagtcttttcgataataattcaaagtactttcttatttatctgttctataatctaaatctcaacaacaatcacaataatttccggctcctgaaatacttgataatgcacaatgccttaaacttggatggttaaatccttaaaccattttttcaaatactctgttttccttttacaaagaaacttttgtcaatattactctgtttagtgctcagttgtgtatatttttccttatttttttagctgttaagggttattattgctttcgataagcagagtgatctttttgcacttgctctcgcacatatatacaagtgcttctctttattttatttttatctaaaataaggtgtcaggaacaagaaacaaacctctttacaaaactgaaacatcagagcactgtttactttcccttctacatactaacaggttgtgatgcagttggttagtccacggaagacaactttcatgtttgtcatatgagataaaacagagacgggtatgttctttcgaaccccattgttgagtctaacgagaatggttgatttttccatggttacgatacttttttccgccatcaagcttaatccaaggttacacaaccaacagagtaagcagcagtgtttaacgtcttcatcaagctatatcttcaagataaaccgtttccaacaacacgaaagatgactagagaaagccagctgagatgcgatatcaatctttaaattccattcacctctctttttggtgttgatcagaaggaatcaaatgtatatattattcatatacatatatgtatctcgagaaccgctggttatgttgcatgtgccaagagtatagaaaaagtggtcttgtagacaaagatttgactttgtttgatgcagacaaaacatcgtggtctattggaatcttctttctaaggtggtataaacatgaaaaaggacagcttctgatgagac

SEQ ID NO: 15450 - DNA, 589 bp, Arabidopsis thaliana landsberg
tcggtatgaaccaaaattgtaaagagcaacatgaacatcaacgaatttatcaggttcatccgttttttatgtataagtgtaacatcaacattttcattatgaaaagaaaacattaatcaacttttacgtaaaacaaaaggaaaaaaaaaaacagaacacacgactagaataaaactaaaagttaacctctgtacaatggagatctttgttgaaaaatcatcttggagactcttgattgtctgaaaaccttaatcggacttggaaagtaccaaccatttcccttactagtcaccggcgtcggtgagaatagaacttctccggcaacggaattcgacttcttcataaccttagcagcctttattttcgtctcttcttctctgtttcctctgaacaatctccatagccaacgtccacgacccggtttaagatccttctcagtttctaatatcggttccggtttagcagaccagaaataaggacccgtaatcgatgtcgacctccgaaacgccggttcgcattcaatcaagttggcaacacggccaaccgacccaatacgggcgaacgaaacgtcaccttctccacgggaaga

SEQ ID NO: 15451 - DNA, 576 bp, Arabidopsis thaliana landsberg
  unsure (1)..(576): unsure at all n locations
aagatgatacttggtcttgctgctgcaacgggatggtcttttcacaaatggatgtgtccaatgcattcttgcatggagagcttattgagatcttcaagagtattcctcaaggatacaccccacctgcaggtgtatctcttccccctaatccggtatgtcgattactgaaatccttatatggccttaaacaagcttcacgtcaatggtataaaagattgtcatcagttcttcttggtgcaaacttcatccaaattcctgctgacaacactttattcatcaagtttacttctgcatcttttgtggcagctttggtttatgttgatgatatcatgattgcaagtaatgatgataaggctgtggaagaacttaaagctttgttaaggtctgagtttaagattaaggatcttggtcctgctagatttttccttggattagaaatttcaagattttcacaagggacttcagtctgtcagaggaaatatgctcagaacttgttggaggatgcaagattacttggatgcaaaccaagnttgatacctatggatccgaatctgcatttggttaaagatatggaac

SEQ ID NO: 15452 - DNA, 3813 bp, Arabidopsis thaliana landsberg
tgtttaaacttgatgatgccattatgctttttcatgacttttaaactcatacattcaaaaactaatttcttttggtcgatttagttcacattgtcttctagcatttttttttttttttttttgacataatgagaagttgtaactttgaaggtaattgatactgtttcgagagaaatgttgtttattatatacttcagattaagttttcaaactcttaatctctatcagaaaaccttcttttcctttactatggtctatggctgatgagctttgggatgaattgcaaaatcgggttttggtgatacagagtctaatgaagcctaatagtcgtccaagtctgagtttgaaaaaaaaaaaaaaaaaaaaaaaaaaaaaggagtcgtttaagtctgattgcctgacctctcaatccttcagtgcaacagcttcagacagttcatggaaaagtgttctcttctatctgtccaaaggagagatcgatgggttttcaataatccggaagatatgaaataatattgatgtaaacatcatagacatgttgagaactctcaatctcagaattctgacatctctttcccaacctcccctgcctgatactcctccactcaactatgagcaaatagcagttggctactccccttcaatatgttcaatcttctatacaaaggtttctttactcaggttgctgcaccaatcccacaagtcaacaaggaagaattactccaaaccatgaacatgaagttaaatctacccctagtaagtttgaaattgcagagttataaaggaagcaaccagaagcgtcaattgtgaccataaggaatcatgattacaaaagacagcgtaaggttggaagatgataacgggttgaactgctcaaatgcagacgaactgctatgtctattttgcaggttaaagagatgcttttcgattgtgtcaatttaggcttaaatttttagactatagagaaaaaaacatacgaaataagaggaaactatagcaagtagagatgtgagatacggtcttttccataaatcaagagaagcaaggtagcagcaaaatcaaagatttaaggataaaaactgatgaaagaaaagacagtctgatacacaaaattcagttccaaaagttgataagataaaagtttcttctacctaagaagaacgacctcacttcttctcttctttctcagcctctgcggctctcttggctctagctccggcatgcctcttgttagtgcgctcaaggcgtatcttgtcaaaagccttgaaagacttcatttctgaagtcagcttgacgagttccatggtaggcttctcacgtacaataggcaagtagtctccttgaacttgggtagcattagccaactcttctggtgtagagtcaccagcctaacacacaaacgaaaacagaacaagtacgaaatcagtaccaaatccaacaattcattaaacaactgaaccatagaccaattgtttataatgattaccttgaccttgcgggcacgacgcgggaaaatgactaacttggtcttgtaggttttcagcctctggacatttgtttgaagaccctccaaagatcggttcttgcgacgatggtcaacagcaataccaattgtaggcgccaacttctttgggataccagcagcctatatttatcaaacaatcagaaagaaaaaacaatttaaacgatatccaacaagaaacaaaacacaaaagctaatgaagaacagagagatattacaaacctttagctcttcaagagtgaatcctttaccggctctgactttcatgttgtacgtaagagtctgagcatgtacaacaggtcggataggtccagcagtgggacggggaaagatcttcacagccttattctgcctcgctgagtaaacattacacaccaaataatcaaattgagatgggattatggtaaaacttctaataaaaccatggcacataaaaccaaaaaaaaatatagtagtggtgacattaagatagcaaaagcagtagtagtggtgacattactactaaccaattcttcttctggttttcatggcaggttggttgaacgaagttttgacatagttttcccacttctttttgaagtgaccattggggataacattattgtgcttcatttcttcaagtcaagctgcaaaatcaaccaccaccaacatgtgaatagtgctgcattaaaccattacgctcaagagaagttaaatggtatgacttcaccctacaaagctaaaagccatctaaatgctatagctaggctaacatcaaacaagaaaaaacagattagaaaatagaaatatcttcaggttgtagaagacgcttattaaaactatagtaaaggtgtgacttgttagcaaaacacaccacaaacaaacaaaaaactcatcaattaatgaaattctaacgcagaacacacaaccgatcaatgaactcagaaaaacgcttattatattatcacagactcacactgatgcaatcatgaaagagagagagaattacagaaacaatacaaacttggaagaccgaattaagatgaagtcgaaaacgaataatacgatcgctcggtcttatttacttcaaaaaccctgaaagagagaagagaactcacccgagacaactcgtagagaaaagagaattctctcacacgttaccaaaaaaccctaaattctaattcttatatatgagcttcttttattggcttctgaaacgacgtcgttaggaaaccaatcggtcttccaccaattccctgaccaacttggttattgcctctctaattcacttgtaccggtttttacttgaattgaaccaaaaccttccctgcgtaatctaatttcggtttagcacacttaaagagaggcttagaaatcatttacggtcttgtaatttcagtttcgtagtggttcggatcttgaaaaactacaaatcattttaatcgtatgaaagagattttgaatcggattgtatttgtttagatcatgttgatccaatttattcagactaaaacacaacatatatattttactttctcattccaacattagttgtacaaaaaaaatcacatcaaatcaaatttggacgaagaagatgaactgaaaacatatttttgtatactaaaagactacataatagtacaagcatggggattatcatcgctaaacatcgaagccgcgatctcatctccagccacagcaaccgagtaatccgcgggagtgtggaagaaagtgtggacaccaccggtgggatccgtacggtgtgcatcagagtaatagtggttggtcacgtaagaaggatatttatagaaagaggcaaaatggctattacctaaccggtatggccacagttcagctgccttaccggcacgtcgtaccgctttcaataccttcttttcctctaaccggtatcctcgagccgtcactttttgggtttccatctctacttccacttcttccactcctgtacgtaaaccaataacaaccggataaattagttaaaccatctgaccatgtgaaagaaccggaaagttgatgttccatttgaatcggttcattattcttaagaatttggttgagatgttaaatttagatatctacaaaaatgaaaataaaagcataccaaactgaaaaatctttaataaaacatatattggcttgaaaaattaagaaatatttgataaaaataacagatagtttaactttggttaacatcttaaaagtcaaaaccaaaccaaaatttgtgtaagcactcaatacttagattgaacgaagaagaaaaaacatatttaaaactcaaaagctttcaatac

SEQ ID NO: 15453 - DNA, 3642 bp, Arabidopsis thaliana landsberg
  unsure (1)..(3642): unsure at all n locations
ttgtgagatgtccataagagagggaaagatgcaccgtaagctttggtgaaagtttagacatctcccatggcatgaatgactttgaagccacttctttaaggacagaaaagtctcacaacgtgactacaatgcttgtagaaccgacttgatggaatatagataaacaaaagatcaaatgaccaaattatgttaagagaaactaagctcaggattttgtaagttgtgaagtttacacaccaagaagtaatgcttagaattcttcctaaattttgtaaaatcctttctgaatttctatttttttacgagaaatttttaacgaaaattgttttagcgagaaaatattgtctgaaattttggtgatgaatttatgtattatttgaatgttatttttgtccaaaaaacttttgagtgctatttttgtccaaaaaacttgaaatgttgctatttgtgggaatttcctataaagtaacaatcttttgtttttcttttttttcttgcagtcactaaaaataataatttaattctcttcagttaaaacccaaaaaagaaaaaaaaaaactagaaaagcttttctcctatatgtaatcgttttcttgaaaatgtattgtgatccatgtaaaattatttaattctttcaacataatacatattttgtttgatatgttctctcaaaaattaatcataatttttcttatgtgtttaggaataaaattgttaaatgaaatttacttttctgattttataattgggctatgtggacgagaagcaacacaaagtggcaacaaagtcatcatttagtattggaggtcgggttttgatccctttcagaaatcgcctcctttctagaaatgttcaaaccttgctacgtattagaaatattcaaaactgacttagaaggtaaaaaagaatagactattttttatacttatttttttttatttattgatttatatctttaaattgtaggtgacattgttcaagccttgctatgttctagaaactgaccacgtggttttgcagagttagaaggtaaaaaaagaatagtctattttttatacttaatttttttcatttattgatttatatcttctaattgtaggtgacattgaagaatactttaatgatggaattaaaggtactacatcggtagcaagtagttgtggagtatgagaagaagttgtttagattttttcactacttttgtatttctgttttaaattagaatctttgatgaaattctgttttgtataatcttttaaattattaatgtttgagtgaattttggatttataaatttgttagaaactttgattaaattaaagaattaaaatcaattaagggtaacaaataaagttttttatacaaaatacaaaatacatgattcaatttaaatacatatgacagtgaatataatatatatgtcaaatacagaaataaatacaatttaaaatatctatataaaatacagtttttttgaatccttttttttttatgaagaggcctgttttgagtttgggctgggctgaattgtttttacccaccacaacattcctaaggataataatacagtaaccctagaaaggtttcctccaccttcctcttcccctcctatataaaaaaaatcgacatcgcttttgctcacttctctctcttaggttttttttcccttctcccaatctcatcttctccgaaaacctttcttctctcaaatttctgtgaaaacatgtctgacgacgagcaccactttgaggccagcgaatccggagcttccaagacctatcctcaatcagccggtaacatccgtaaaggtggtcacatcgtcatcaaaaaccgtccctgcaaggtctgatttctatttcatcatcaaacatcgttctcgatctctttttcctgattctagatctcgtctctgtatagtagctccttgattttgtttttatcctcggatttgacctggttctgtgtagtttgaatttttcttatagatcgctacttagatgaatatgatgaatcttatcctgttattttgatggtggtacctctctagattcgcggaattctgggaaatgaaaatgacaaatggatagaaatcaagcaatatcagacgacgccttttgtgattttgaatctaagtagtctattgattgatttgatttaaacgtttatggagaacatagatttgattttgatattttggttttgattaggttgttgaggtttcgacttccanaactggcaagcacggtcacgccaaatgtcactttgttgctattgatatcttcactgctaagaagcttgaagatattgttccatcttcccacaattgtgatgtaagttactacacaaactatgtagattcattttcacagtatttgatatgattgtgtgatctgactcaaatattgttcctttctctttttttctcaggttccacatgtgaaccgtgttgattaccagttgattgatatcactgaggatggcttcgtatgtttttctttatactcactttcctcatcactccagctttatttatctattcttgccataacttttgtacttgtttacattataggtgagccttctcactgacagtggtggcaccaaggatgatctcaagcttcccaccgatgatggtctcaccgcccaggttattttcttgtcttttcatactcgcacacaaatgacttgactttgtattcatctctcgaattgtgatattgaaaacagttgttgtgttttgttaatgcagatgaggcttggattcgatgagggaaaggatattgtggtgtctgtcatgtcttccatgggagaggagcagatctgtgccgtcaaggaagttggtggtggcaagtaaacaagtatcattcgatatattattaccagtttgacaacggacgtcaatgttataagaaccaaaagatgtttttctttttcctaatttagaccctttgtgtgtgtttcttgttgcaagacaaccatatctattggttttggattgttggaaaagtttgtgttgaaacattcaaagtttcttatgagatgttattcttaaaaccactttttgtttgttcactggatatgtttgttcatgaagcttgttttaagcaactctttacatgatattcattgctatttgcacgattcaagagtgacatatacattttatttaacaataacagtgtaagatatgtgattgaatacttgtggaaacatagagttacacaggctgcgatagtattcgacattttaactggttttgacattacacgattttgtattccttgcacaaagtctggtaaaacagtaatagcaagaaaaggtcaatgctttcctttgttgaggaactggaattagtgtatttgtcaggagattattctactttgagaatctgatgatagtaccaagccaatcttcaggaacactatctctcaaatcaccgtttagtgctctctgtgaatgagttgtcgcagcctgtttgaggagattgaaaaaaagagcatgatggcggttaaaagctccatctttatctaagatatttagttggttaaaggcaaaagttgtctataatctaccttcacaatgtagacatcgactccaagttttgcaatcatagcagcttctgatatcttcgtttgcattcca

SEQ ID NO: 15454 - DNA, 671 bp, Arabidopsis thaliana landsberg
agaaaagggcacgcttgacttcctcgggagatatctctttggtgagattctgattcattgtttccgtgatcatcactggcacatcccaaatcgcggaatggaaatcttgtggattagaggttgaaaaaggtctttaaagtaatcaaccgttagaccttcaatgcccacctccttgtcgacccacagaccatcttggttcaggagcccaataatcttattctttgctcgtctttgctttgcaatagcatgaaaatactttgtatttttatccccttccttaaaccaaagttcacggcttttcaaacaccaaaatatttcctcctctctataagcatcgcaaaacttcctctttagagctaataattccttagcaaagatggactcgtcttcttgggcgttatcaatttgattttgtaattttagaatttttttctctgagtttgaagagcttgactttttccaaatagaaatagaccttttacaatttttcactttttgagaaaaaataactcctccttgaggagggacctcacaacctccatgaaccgactccttaaagcccggtttgctaagccatcttttataaaaaaataaatggtttgaaaaggcgatgggggctattctgaattgaagataaaaggggtctatggtcggaaccccatatttgagat

SEQ ID NO: 15455 - DNA, 3587 bp, Arabidopsis thaliana landsberg
atatatgacctctccaaatttatttttcgatcaaatgatgaacaggtgaatgaaggaagtgctagtgcaagtgaaattttggcaggtgctttacacgataatggtcgagctatacttgtcggtaaccggacatttgggaaagggaaaattcaagtatgtacattaatcagctttaaacaatacaaatttattaatattgatcttatgaattttttgttgttgtatgttttgtgattttgcaagagcataacagagctaaacgatgggtcggctttgtttgtgacggtggctaagtatttgtctccgtctttacacgaaattgatcaagtagggattgcacctgatgtacagtgtaccacaggtatgatcgattctttgaccgctgagatagttgagaagatgaacagttcggttccattgcttgaagcagactcatgtgttatggtcgctgagcacgaacttgaggctcgacgatctaatggaacagcttcttgagggttttgggcggtttcatcgtgaatatttataggacaagtttatgttgtatatattgtgatagttccatgtacaaatctatctgacacttactgttgtttccttctatacgtaaagtttagtgaatttagattagtaaaagagtcttaaggatcttctttttcttagatattgtaatattgatatacacccaaaataacccaaactgaaacttttcatattattctcatattgaagtccccgaagattagatgaaaaagaaaaagaaaaaacgtcatgaaaagaaatctgataaccggatggtgatatgaaaaactcatgttcatgtaacaagaaaatacaaacagaaatgctaaaataaatctaagccacatgttgcaactcttttcaccgtgattgtagttaaatttaacggcgaattagttattattgaccatcataagttttgttaccctcctaatgttccttaaacttagttatttttaggtaaatcaaagtaaatattactaaaaataacactagttccacacatataaattcccgatcaacaccatccatattcctcagacctgcaagaactttaaaaagcacaaaaactaaataaaaagaagaaaagaaaagcctttcaggtctcaaacaatggagatgaagaagattgcttgcggtgtgcttttcgctgctgcctccatgaccgccgtcatggctgctgaggaagtcggagctccggcaccaggacctgcatccgccgcctcggctgcgttgccagctcttggctctttggttggagcttcccttgtctccctcttcagctactacttgcactaagctatctttcattatgtaataacaactcattatgtgatcttattcatttcctatttatttccatttcacttgtttattaataaaacagagaaagtaattcaagaataaattttctcttcttgattatgttcattttaatttttgactactggtttttgaaatgtggatggtcccttgattttcaaaactggttattggacaaatattatagcttataataatgattataaaaaaatattcaacatatttgtaaattagtcattacaaaatgtcatcaagtgaaaaatcttatgattcacattatgtttcataagttgttgacttagaccaaaaaaaaggagaagttgttgacttttgaagtgacctcgttgacttgatttgttcttgcgtctccgactctctttctttcttgtgtccctttcttcacaactcacaagacaatattcttttctgagtttagagatgttgcgtctgttcagaaagaagaagaagcagaagaaagaagaggagatcaatctccagaagaatgggagcttactgttggaagaactcattgcaacttcaggaggtatatacaatcccatccgtacgttttcttccgaccaaatcctacaagctacaaatcactttgactggaactacgtaatctctgaagacagattcgtgtggtacaaaggcatgattgaaaacagacccgtactgatcaagaaattccaagactgttctgttttcgacgctgacaacttttaccgtgatattgctgtttcatctttgatgagtagccataagaatgttctcaagctcttggggtgttgtctagagtttcctcgtccggttctcgtgtgtgaatatccagaacatggagctctaaactgtataagatgtggaaaagaaggcgtccggtcattcccttggaatgtaaggttgagaatcgccaaggagattgcagatgctgtagcgtatcttcatactgaattccccaggactataatccatagggatttaaagcttgcaaatattttccttgacgagaattggtccgctaagctctcttctttcagcctcagtatagtgcttccagagggtgaaactggcgtaaatgacatggtttgcaggacatcaagctatatcgagcctgattactttaatacaggtttggtcaccgagaatgtcgacatctatagtcttgggatcatcatgctaattattttgacaggaaagtctgaatacaattcagaagtcgctgtttatcttcctgtattgcctgtctatgttgggaagtttctggagcgaggtttgttgactgaactcatagacccgtcgatattggacagcacgagtgatgacattcccaagcattcaagactgcaaatggaagcgttcattgagcttgcttttagatgtgtaagattcagaccaggagagaacgtgcctcgcatgatagacgttgcaaaagagcttaagaagatagagaaacatatatgaccatgcaaccttttctaatgcgacttgaaacaggtctatctattatacaggcttagtagtgaaaattgcaatcactgtatcttgtttttgatcgagcttttattaaatatgttgtatgtaagaatctgagtttccttgctacacaatgcaagaattgtttacttagatttatatagtccaagcaactgatacctcttcttttgggcaccaaagatgctcctatcttcagtcatgttcttgtgatgcctactccgcgaagatatctcaatatccaaaaagttccttgcggatctctagctagaatttttcaatgatgcttcaatctgcttgagttctttagctacttggatcatctttggtctgtcttcatctctctccttacagcatctcaaagccagcaccacacatgcttccacttgcaacctttgaccacttgtgatatctttcatcaacctcggatctatcacttcatcaagcttcccattctcacataactctctcactaagctaagaataccttggagatctccatcagaaatagtcatgatagccggtttaccagtaataataaccagcaaacagattccaaagctgtagacatctgtatattcagtcacaaaacacgtcttatgatataatggatcgatgtacccaaatgttcctagaacccattcagcttctattctcgattttccctcaggtagagatattgagaaggataaatcagacaactttgcggtccaattcttgtccaagaaaacatgcatcggtttaacgtctgc

SEQ ID NO: 15456 - DNA, 567 bp, Arabidopsis thaliana landsberg
ggatctttctgagaagtacccaatgacatgcttgatcttgaatggcaaagctgttagctgtatgcaaatgggtaacttcgatgaagctgaaacactacttcttgaagcactcaacaaggtaactacaaattaggcttgtgtaccttaaatttgctctgtacattagcattctcgggaacaatatgaaactagggacctctctaaatttctcacactgcacttgtctcttggcttttctgtatatggggaagtgtgtttatactaatttgtggtgattgcaggatgctaaagatccagaaactcttgcaaatcttgttgtgtgcagtcttcatgtcgggaagtcttcttcacgctacctaaggtaaattttcattatctactcttatattaggcatcatttgcccaatcaatcagtagaactcactgaaaagttaatcgagagtaactgtgtccttaatcctaataaaaacattggtcggtctcgtttgttaacttcatttgtatcacctatccttcttgcagccagctaaaactttcacacaccggacacatacttgtgaagcgtgt

SEQ ID NO: 15457 - DNA, 4034 bp, Arabidopsis thaliana landsberg
  unsure (1)..(4034): unsure at all n locations
aaacccaatgcatcagaaacacatacaagggtagttctcgccttttagaattgttttcctttttccgtgcttcaatttccttccacagattgtgtgggatgacggggttagactttccaaacggagaattgaacgtgaacaaggtcgcaatgatgcagaagaggatcttctttctgagctttctgaaggagagaaggataagaatgatggagagaaggagaagagtgaagttgttacaactctcgaaccacctcgagatcacatgccccgtatccgctctgaaatgcaaatttggtcagaagatgataaatcaagtcgaaacctttacattgtcttaatcaggcaagtagagattggtttatctgacttatttgttgttttcaatatgcttatgggacttacctggtgcctctatttggttccatactttgccaactgcagcatgcatggactcgtgcgtggagaaaacatggagcttggaagagactctgatactggtgggcatggtatttagccatcttctagtagacctctttgtaaagcttaaattatttaaggtgcttcacgtgtcgactctggctttcttatatttgtatcaatctgaagagtcttgttaatggacgaataggtgaaatatgttgttgagcttgctcgtgcgttggccaacactgaaggtgtccacagggtcgatctcttaacacggcagatcagttcaccagaggttgactacagctacggcgagccagttgagatgttatcatgccctccagaaggtagcgacagctgtggctcctacattatccgcatcccctgcggttctcgggacaagtactatcacataagactcctttgaatttctgtattaaaatttctactttgaaaaaaaaaacagctagtttttctatactcatgtttgttaaatgcaggtacataccaaaggagtcactctggccccatattccggagtttgttgacggggcgctaaatcacatagtgagcatagcaaggtcgctgggagagcaagtgaatggagggaaaccaatatggccttatgtaattcatggccactatgctgatgcaggagaagtagccgcacatttggcaggagcgttaaatgtgccaatggttctaactggtcactctttgggaaggaataagtttgagcagttgcttcaacaagggagaattaccagagaggatattgacagaacatataaaatcatgaggaggatagaagctgaagaacagagcctagatgcagccgagatggtggtgacaagcacacgacaagagattgaggcacagtgggggctgtatgacggttttgatatcaagctggagaggaagctcagggttagaagacggcgtggagtcagctgccttggtagatacatgccacgaatggtggtataagtcctttcccgcctcccatagcatctgataaatgacaacataattattatcaaaataaattataatcacatagacactgcagttgactggtgcagctaaaagaacagaaaatttaattgaaagtaaagtcattcaccaatctgacctgtctttgtggcatcaggttataccgccaggcatggatttcagctacgtcttgacacaagattcacaggaacccgatggggatcttaagtcgctaattggccctgaccgaaaccagataaaaaagcctgtgcctccaatatggtccgaggtactctttttttcattattgtgttatatccaatctcatgcaagaaaggttacactcttgtttttccccatctttcaatccattgagcaagtaactacatgaaccttttacctgcagataatgagatttttctcaaatcctcataaaccaacaatacttgcgctgtcacgtcctgaccacaagaaaaatgtcaccacattggtcaaagcttttggtgaatgtcagcctcttcgagaactagccaacctggtaggtatctcagcatttattacacatgcgttatccagtgaactcacatatgtataagaagattgtgaatgagcatactactaatccacctaaattgctaataaaactgtgccaggtacttatactaggtaaccgagatgacatcgaagagatgcctaatagcagctcagttgttctcatgaatgtactaaagctgatagaccagtacgacttgtacggccaagtagcttatccaaagcatcataaacaatctgaagttccagatatttaccgcttagcagccaaaactaaggtactttccacgaaaattctattaaacaatatgagtatataactcacattgtttactacttccgtgattccagtagaacatacatcagagacttttataatgcagcatctacaattattagttccatgtggtagacctttggtagtttctcctgagtctacatggtacaaaaacaatgttatcgttagtagtttaccagaactcttagctcatccttctttgcaaaatgaacaccgtaattataaggtggttttctctcttaaagggggttttcatcaatccagctctggtggagccgtttggtctcacgctcattgaggtaactagcatatatatctatgtgtttcccttatgagatacacaaccttgtgagatcttcatgccgcgccatttgttgtgcatatgacaggcagctgcttatggtctgcccattgttgccaccagaaatggagggcctgttgatatcgtgaaggtaatcaaatctcttattacaaagctaactgtataaagacatagtcacacctcactgatcccataaagcttattaacagtgcatatgttctatcgcaggcactaaataatggtctcctagtcgacccccatgatcaacaagccatttctgatgcccttctaaagctagttgctaacaaacatctctgggctgagtgtagaaaaaacggactcaagaacatccaccgtttttcatggccagagcactgccgtaactacctatcccatgtcgaacattgcagaaaccgtcaccctaccagtagtctagacatcatgaaagttccagaagagctcacaagtgattctctacgagatgtcgatgacatatctttgagattctccacagaaggagatttcactttcaacggagaactagatgcaggtaccagacagaagaaactagtcgatgccataagtcaaatgaattcaatgaaaggtcgcccagctgctatctacagccctggtagaaggcagatgctctttgtggttgctgttgattcctatgatgacaacggaaacatcaaaccgaatttgaacgaaatcatcaagaatatgataaaagctgcagatttgacatcgggtaaaggaaaaataggttttgtgctagcctcaggttcaagcttacaagaagttgtggagattacgcagaaaaacctgattaatctggaagattttgatgcaatagtttgcaacagcggaagtgagatctactatccatggagagatatgatggttgatgcagactatgaaactcatgtggaatacaaatggcctggtgaaagtataaggtcggtgattctgagacttgtatgtacggaacctgcaactgaggatgatatcacagagtatgcgagttcatgcagtacaagatgctatgcaatttctgtgaaacaaggagtcaaggtagctcttttaaagaatatctttctcatcatgaatatatgtgtgaaactcgtattgatgtatatatgtgtgaatggcagactcgaagagtcgatgaccttaggcagaggcttcggatgagaggtttaaggtgcaacattgtctatactcatgcagcaacaaggctaaatgttataccactatgtgcatcaagaatacaagcactcaggttagaaactgtcacgaaaaaaaattcttcaatcataaactctatgtgtaaannnnnnnnnnnnnnnnnnnnnnnacttgatgtatggctacgtttaggtatctcttctataaggtggggcattccatgtcaagtctgtttcttttagaaaagaaggaggccag

SEQ ID NO: 15458 - DNA, 2985 bp, Arabidopsis thaliana landsberg
gtatgtactcgaataaagatggattaagctcaaattgcaatgattgccattagttcatagatatttctgttgattgttggcatttctctataatactttgaattgtgtaatgtctgttgaatgtattgaaattttgtatatgttgctaatatttattgaatcacaagtgttactcttagtatttgttaatagacagcttaagattcaaatgcttgggattaatattgtgatttgctttgttacgtctgttgaattaatttacactagcaattacaatagcttgaatgtcaagctccactttttacaattgttttggttttcacgagaccataattgtttgtttcagatcgagcttcccacatggacagacattgtgaagaccggaaagttgaaggagcttgcaccatatgatcctgattggtactacatcagagctggttagttctctttcatcctagtttatctcttattatctctatgcgtttataaagttttcaattagcaaaatgacttcttgtgcagcatctatggcaaggaaggtttacctgaggggaggacttggtgttggtgctttccgtagaatctatggtggaagcaagaggaacggtagtcgcccacctcacttttgcaaaagcagtggtggtattgcccgtcacatcctccaacagctggagacaatgaacattgttgagctcgacaccaaagggtaacattactactactactactactactactactactactactacgttagaggtgtttctctttaaaaatgtttttatgctaatactagtatcacttttgttcttctttcagaggaagaaggatcacttccagtggccaaagggatttggaccaggttgctggccgtattgcatttgaaccttgaagatcttaatgttcttttttgttcttcttctacttttgaggccattgtgcttttagtgtttatctttacttttaagaattgttaccatttcattctcaagacttgcgctcataatgttcaaaaatttatctttttggcgatggctttggacattgaaacttatgtcttcaaccgtatttttgtgttcgtccgatttaaggataataggatatggtttcttcatccctaaattgctaatttcatccttctttagtgccactaatctcacttttatgcttcacttttaaccgaaatttctttgagagaagagaagcaaagattagatatcttcatcacattatattctttgttgtattctctcctaggcaaagagatgtcatctttcttcaatatcatagctagcttttggtttccttagagatagcctcgacctttcttattccaaactagcaatgatgctctctgttgctctcggcggaagatgtagccagtcccaacgtacatggactttgaagtaggtactaacatgaacgtatacagtgttgtggttagtatacttttgaggatcggatcatcaaccttatcagttgattcttcaacttaattaaactcattatataaaaaaacaaaatatttatgtgaccgttaagaacttaattgtgaaagaagaggaactaacagagaaaaaagggaattgtaatgtgaccgttaattgtgattagcaatatccctttttctctcaaataataattggggcatttgcaaatcttacacttgacttccttgaaaagaaagcctctgttgcgtaattacaatttgcattttggttgtatgtttgtgattgtttcataggtctattccacaactttttaccttttttatttttttactctccacaactttgtacctataactaaataatataaagtcacaattttgtacggatattctgatgtttcattagtcatttacatttttattgattatgttcgcatgtacagctactttcgtaaacagcttcttttgtacgaattgttctagagaattttcgatcataatcaaaatataaacaaaatgtttaacaatgcgcttcaaataggtgggcctttgttataagtaatttaaaagtcgaagaacccaatggcctatatgtcattcaaatacatgggcctatgttataagtaattaaaaatttaagaaccttaaaggcctacatgtgattctcacaactctaattcatgccatgttttattttaaaagtgttaattttcattaacataaatggtaaaatcgtgtattaaacgtactaattcatttcaagtaaatattccttttataccgtaaatatactacattgtatcattttcatattttatctttggtatttcattattttcttcacattacaaccataaattatgaatttcacattagaggcgtatacgtatttaaaaacgattaaaagagtttccaaaaacgtgtgtaaattacgtactatataaatattaaaaatggatcggtgatccaactccttctccttcatcatcatcgtattcaccgttgtcctttctttcattgacacttgccagtttacatcgacaaacaaaagaaatcagaatggatttctcagggagcttctttgtcatcttcgttaccttcttctttctccctcctctgtcttcagctgggagctacgattctggttcgggtctcgagtcactcgctcgcgggatgcttcattcagccaaggatcctgagttcttcgagtggatgagaggaattaggagaaagattcatgagaacccagagacagggtttcaggagttcaaaacgagtcaactcgttcgagacgagcttgactcgcttggagtgaagtataagtatcctgtggcgaagactggcgtcgtcgcttggatcggatcctgttcgaaacctgttttcggacttagagccgacatggacgcacttccgttacaggtttgaaatctaataatcaaagttccgatttttactctgatttttagattgctttgtttgactaatgaatttgaaaaaatggggacaaaaaaaaggattagtggaatgggaatcga

SEQ ID NO: 15459 - DNA, 1717 bp, Arabidopsis thaliana landsberg
tcgctgatcgattagcatagaacaggtcaggcctgttgaaatccccaagagtacgacgtggttccgcagctagaggaatagctacatgaatctagtgtttgtgtcgatcgacacatgtgttgtgtcgttcgataccaatcgcgtcttcattctgctcccatgggtgtcgatcgacatctttgttgtgtcgatcgacagcgaaccctgcatctcaggcagctaattgcgcattgaggcttgctgattcttattgacgtcctcaggtaggacgagtccataatcatccaatctctgaccagcctcattgtaggcttgcccatcctcatctctcaaaactccttctacatcagctcggatgactctgtcagccattgctaatctctgagtttttcggttggtgcatttaagttttctcaagtctaagacagacaagttgataagctacttttgttgtgtgctccttgtttgcctaggcatacacctgaaacatagaaaagaagaaaacaagaaacgcatgagtaacaaagtaaaagtaaaaaatagacaaaatctctaaactaaactcaatgatgattctcaagaactttggcaacggcgccaaattaaataaggttcaaattaccctaagaactactctctcaaataagagatcaattgtaatattttaggatcgaattcacggagttcttttgttcaaacaatgagttgaatgtcaagattatgctagcaggtgatgattgaaatagtaagaaaacaaagtaagaaaacagcaggttgattgtgttgtaaacgattaggaaaagagttaggaacatggtattctcatgaaactattggttagtagatctaatgaaagctaggttattatcgaacaattcttaaactcaaactctaattatagaataactggtggcattccgcgaaaatccctatatctatggctaagaataaccggagaagccgagaaattatcaacctaaataagcattcttaacgagttcgattgttcaccttaataactaggccgattcttattacacacctaaaaaccaggttcatcaaataatagatccaactattgatacctatggcgagcatatctattgtctggattcaagatctagttaattactctagatctagcattaagcacaattaaagatgaagaattttacagatgacctagcaaagggggcaatctactaaaccatatgaatccctaatgagaaaccttattcctaacaagcagactactcagacatattgaatgaagcaaacaacataattgagatagaaagcataaacacagtaaatagagaaggggaaagaagggatctctcactgtattaaaaactggaatgaatctctcaagaacaatggatgaatagcttatgtctctcacaatagggttttgcaaaagcttgattaaaagacttgataaaagaaacttaggtctaaaaacaatatatagaccctaaaaacgtctagggactaataatgcaaatagggaagtcttcgggggcaaatttgattttctgtaaactcgaaaacgtttagggtttttgcggggccaaaattggtgtcgatcgacacaagagtgtgtcgatcgcactcctcgctgattcctgaaccaaaatcggtgaaaatcgggttatatcaactagcataaacccaaattcagaactcttacttatgttccaaaccttggaagagttgt

SEQ ID NO: 15460 - DNA, 1098 bp, Arabidopsis thaliana landsberg
  unsure (1)..(1098): unsure at all n locations
gacattgcacactgtcataaacttaagtctattgttctgaccctatcgctacggttaaaaagatttgatatagataatccgggactaaagcagattgtggcaccacatatccattgtttgagattgaaacactctaagatacaatatggtttagtgaaatccacgtgtctatttcttccttgtctattaatactatgtgtatgcaatgatcaaattattataacacattatatatttatatattcttataacaaattttctaatttgttagatcaatttttatagaattagaaagaaatttttttttgtagatattcttaaaataaaattgttttatgattataagattggacccatctaaaaaatgatacatatctaaaggagagaaattacgtgtaagcttctcaaaactttttgtttataagaaactttaatatattgtattatataagattcattaactatatactgatgtttaaagatttaatattaactttagttaatattttccttaagtgcaatataatatgttagcatgtatttctcattacaaatcaagaaaatgatgtgagatatttacattatgagtgtatccacaaacaattgataataagaaagttaatatcaatataaataactcctaatcatgtatgttttaaatctcaaacctattcgtagtcgctcaacatgttgttccgatttcttcaaacactggctcggttctgccgcttcttgctcatttcggttcttgggttccgtttttctcctttgcttcttcttggttacgtaaaactgcaagacgaaaataagcacaacagggagtcagcacttgcatcagggactgacgcaaaacaaccagaagcggcagaaaacgtgacatcttcttccattgattttgcggtaaattcagtggtgaaggtcttcaccgtctatagcatgcctagcgttttgcaaccttggcggaattggccgcagcaagaatccggcggctctggtatttgatgtttatccataattcttatcaactcttttaagagtcgcgcgcataagtattttcctaactgatcctngnaactgatgtangacttgtaatctcgg

SEQ ID NO: 15461 - DNA, 4504 bp, Arabidopsis thaliana landsberg
gctcttttctttctcttacagacgttgttttgttgttgatataataattacctaacttgcagcaggggataaatatgcgagacattgttccttgtatggtgacattatgctgtggtcactggaaaatcctccaccatcaaatattattgtcatcgcaaaaataatcgatgacgacttggctgatcgtattggatgtttgactaccgtctggtcatatgggcttctcatatcccaagttaagccagaatggctagaacggctttttcctgttggaagctatccctcgtttttggcagccatatttgatggaggattgccgaaatcatcgaaagcgaacaaggatcgctttcctctcgatgagtccgacgactaacttttgtgtctatgttattgttttgtgcctatagttgatatcaagtttggattgaaatgtttttagtattgtctatctataatatttatgtgattttggacatcgttactgtgattgagtttttgatttgaatcaatcatgagtgactaagcgcaggtggtggaaattggataggcgttcattgaacaatacagacaaagatacaactagttagcaatcatttatacatagatagtgatgtacaaaggttatgtttatggtccgcttaagactagataggaggtgattgtgaaaccaaaaacaacaaacgcaacgggtaaaaacatgccacaaacgagatagtatattttctgttcattttcttatggtccgcttaagactagatagtccaaagtctcgatatatagttagctctcacggataaatcaaatcaaattaactgatcaatcttcccaggggcttataagaccatcctttgtgccccttgcaaatctatctcaaggatgttctatctacttagatatcaagcctttgtgccccttgcaaatctatctcaaggatgttctatctacttagatatcaagcttttgtgcccctttcaaatctatctcaagggatgttctatctagttagatatacggcttgttgtataatattttcaaatctatctcaagggatgttctatctagttatatatcaagcttgtgtttattattattgtctatctctagtatttatctggttttggacatctttagtgtggttgagtttttgacttgaatcaatcatgaatgacttgtggttggggcctgaagaagctcaagcggtggaaattggaggttatgataggcgttgagtaaacaatacagagaaagatagaaaaattaagcatcgtatatagcataaatagtgcatgtgattaactaaggatgacttaagaattgtattaattcaaagcgacagagcaatatatatatatatatatgatacaagttgcgatttgtcttactaatttacttctgcgccaaggaaaaagaaattcgatggctgccctggacattctttacctctaacttctttatggttagctctgtaagtttcagattcttctttgcgccagtaagctaacttaagagcgttgtcaacagttagttgtaaaaaaaagactaaagaggtttcataaagtaagatatgtgaagaccaaaagccagctacctcgttaatcaaatccgtctctacaagcacaagagagtttgcataggactaggagtgaaatagagcaataacttactatctttctacatttgcgttaaccaaagaaacttcccaattctcatggctcatgggattacattccattctcaaagccacttaactccaagtgtcagccctaatataaaaaaaacttcgatcatagtggtatacgaggactagactaatttgtaaccgtgtggagtagtgcttcttttttcatcgtccaatcatagttaaagcatgcccggagaaagggattacctgcaaccaccatgtgtccggtttaaccgcgtagatgaatactagctcactttggccttggaattcctttaagcggtgtctctctccaaaagagagagacttgatcgtcgatctccacaattttgaaacggtgttgaatcgtaagaatgatttcacaggaagtctcacgagtatctcctctattagatcgtgcatgtggtagttttggattctgttcttttttcattggtgaagtagtgattagaaagtttagggtttttattttctttcttatagatcatgcgtgcatgcatgtatgtaactaaaatggaaattctcctttcaatttgggcttcggaccttatgtgtaagattttattttttttcaacttttctaggaagaacaacattatcgtcatcgctacatttagttcatatagtttttttcgctatggttgagtaaatggacaaaaacagcttgttattgacttatgcttccatgttttttttttttgccatgaaactatttagaatgataatctacgattgtaaacctaaaatttttcatttttatgaaatttttacaattttagcaaaaaaacatagatatagagaaatcgtcttaatatatatggctgcagcgaataactaattgtatcaccattttctcttttcttgattaatgttagctaataaaaatagaaacaagtattcaaattatatgcatgtcgatactctctaaacacaaattaaaagagcttctttttttttttttttgtatcaatcattatgaagaagatgcaagtgactatattggtttcaccagcaccacatcgttgcgtgaatcagtggattgacccattttgcagatgccaaaatatttcaaactcaacattccgataacttggattgtttgtcaagttaaggaaccctagaaccaaaggcttcaaccgcagaattatattaccaaactagtagtagatatatatacaaaattacataaacttcacaaatcttagatgttgatctaccctataaaatccgcattacgcaagtaccacgccaaaaacatctaaaactatatcccttcgtaacaaacattctcttgattctaaaacataaaatgaaaaccatgtcaatttctgaggggttagggtttgaggaaacctttggtagtgctaaaaggtgtacacttctttttgtttgtttgttaaatctacaaatctatctgtaaaagatacaaaataaaaacagcaaaatttcccgtgttttcaagaggctaataatctggttagcatcttcgtcctgatgcctatatctatgtcaagatcccttcatgtgtcaacaagacatatatgatcatgaggccatagaaatggctagtggcatctcactttcatgcgaagcgatagtagaattactggaggttgacattcgtttcttcgattgattcccttcaatcgacactagaacttggccttgtgggtgagctattggctctggatcatcatcatcaggagactctaaagattgctcaggagggtcaagatcacgcgtcatggtttctccattcgcgttgttattattaccaccggatccaacaaccatcctaaatccaaaagtacgtgaaacaatgcggtaggcaaatgttaggatccaaaagaaccaagggagacaaacaaagacaatgccgaggtaggagagccaaactggagggtaaggaagaattgtatatgcaattagacaaccgcctccaaccgcgattgataggaaaagaaataaagtaatgagacagatgaacgcctgccccgcccgtggatctggcacaggcattatgattctaaggaaggatcgatctcaaagatgaagaaggatctcacgggacgcttaagggtactactatatcatcctccatttacaaattgctctttttcttcttattcctcaatcttttttctttgtttttgttataatgatgttgataggttgaggatgaatcagatttgaaacaagaataaacagaataaatcccacgcacaataaaagagcgatgaggaaaaacgaaaacacaagagggtatttctgttttgtttttaatttgttttgtttgtgtgtgacttataatttgacaagaatagccaatagtcattttgttttcctccaatatttgccattccatagaagagggacgtccgcagatacaggacctataacattgaatattgttagttcaaaatcatttcaagcttttgcaatcttaattagatagttgatatatgctcatgttagaccaaaataatatttgaaacaacgtatatatgttttaaatgatttttgtcaaagaagatgtaccaatatagagttacatatgattgcattttaatataccaattgtgaatatatatccaattatatatgattggaaaccagtttgatggtatgattttaattttaaacacatgttccaatttcacatactgattttaagtttcaataacttttaaaacagaaattcaaggattctcattccatttctatttgtttgtaaaaggaaacttgaatcattgaatgttgttctattcaacaagtgttttttttgttcatatggtataggtaagcatatatttaccctttata

SEQ ID NO: 15462 - DNA, 2791 bp, Arabidopsis thaliana landsberg
  unsure (1)..(2791): unsure at all n locations
atatccaccagaaatcgcgtttgcaaccacgaaaaacctataaaacagagcagtattattatatatacacaatcaaattcatgattcatcgatatactgatcactgaatattttacatgagcgttggtaagtcgctgtatttaactttcagaagtacgagctgactcaaagagacaacagattcatgtgttgttcccatggcaagcgcgcttcctatagttccaaaaacagcaaataaccgcagaacgaatccaagaaccgatattcctttgtttataaccaactttggctcaaaagtaatcaatttcctagatgatcttgaagtttccccagcttcaatctgttttgcttccctagcttcaatcccttgtgcttcctcagcttcattatgctttgcttcttccatttttgctctgtgactgtttactaaacaaaaagggtctgcagtttatataaatctccacagtgaaacacttcaagaagtggttaagactttgaagtagctgattataatgaagaatacaagataaaaaaaatgttaaagcataattaattgtggaattcacatataaagacagagaatttaggtttattgctgaggacatataatgagcaaagatttatttgttatcttgtgtttttgcttatcctctctgtacctgctctatattgttacatcaaacaacaaccaataagaattctcattttggcattgtattcatgtccgtagctaaataataatctaagctataaactttgaagtgtttactaaatttgactgtgattttttttagaatgatgaatatattttattcgtagagaaagagagaagaaattcaaaagattaaagctacccagattgaattcagtgctttaaggcacgacgacaacttatgatgtttgtctttcataggcgtttttgttcaagaggttctttttgaattgtcccacatcgatagtttagaagagctttagtcatagctttgggtataaaacagaagctgagccgtacgaacaattcatacctttctcggccttttggctaagatcaagtgtagtatctgttcttatcagtttaatatctgatatgtgggccatcggcccacacgatattaactctattttttgagggagaaagctcactaagatagcttgctatctgggctttcgcgagtcgcccatgcgttgcactattgcacgggcttggctcaacccgccaattttagagtcccaatttttaagaatcgattcttcttattgcaccgtcaaggcccaaggaataccgatttggtgagattctagcttgcaaacgtaacttcatcccacatcgacgattatgaggatatctagtgtatttatatatacatctgaactttggtaagttcaactcgtcactgtacgaagtgattggactataaacttgtcaaagttcaggcccagataagtccgcgggtcacttttccgtagagatgcggaacctcggcaacgagagaatctttacgtcggatagacatatggctgagacacgtgtgtggagccttctctcggacgaatgatataatatggctgagacacgtgtttggagccttctctccgacggaatgataatatggccgttcgttacaaaacagttattcacttgggtctttcttctgaccaaactgaacggggcttacgttccagtgtcaacatctcttttatgagctttgatgtacaactaagaaactgatggaaagcgtaagcgtgagatttttcatatgaatgactaagacttctgtaatcttgtttgtgtcctcttcttctcacctactatatagtgtacatccactaacttgagctaagagtataattcttgcaagaacaaagtaaagtggaaaagatccagagtatctagacattaatctcacaaacaataaaaacgtagagagtattgaattggtattttttatgtagtgcaatagaataatgaaatgttggttacaagtaatagaaattttacaaaatacctgcgaagattcaatagagtagcccgacgtaaaagaaaaaaagaacaaagatgaaacnccccatctcttgtttacatttcttatgtgaattgcatagacaacttttttttcctacaagtaacataatattgtataaaaattgcatcaacattgaagttctgaacactctcaatcttcctctctaagattggttttcttgatttaagaaacatggtttcttctcttagaattcgaattctgcaaaagcatataaattacttaagtgaatatctttgattgattgatgcatattacatttgatattttttaaaaaaatcttgtggaccagtacataccagtttactgtggtcatcgcgttttgcgtatttggatttgctcgaactttcagtcacttgagggatatatggaaaagatgttggtagcaagacaagtccatgatccatgtcgaaagagttagctcttaatcgcaagattacttgcgtgagagctttcatagcggcatcaggacttcctgtaatctaaccacagcaatataacaggaaacattggcttagtttcactttcacaaaggaaacaaaaccaagtccaaacacaatccgaatgtgtttattacctgaaccatctcttcatcttcacgagcaatttttggtacatcttctttttgaagaatacgaatattagctcttgttacactcctcatctcagatataactgctccaccttttccaatgagacacccgatttgggaactcgatacaagtaaacgcgtagagagtggttatcat

SEQ ID NO: 15463 - DNA, 1729 bp, Arabidopsis thaliana landsberg
tctagtccaacatagaggtcggttgaaataagtgaaactctagttttacttgtcttttactattattctgaattgaaataaataaataaacatatgtttttttataaggaggctaactagagaatgtttaaagctgagggggtggactagattaaaatcctgaaaaaggtgaggagataaaggaaaaatcaattgcagggatggtgaagaagatgaagtgaaaaacaaaaaaaaacgaaaaaaaaataactaaatgggaaagaggcggggttcgaacccgcgaactgaggattatcctacattattgttaccaccagaccaagacaacacgcacgcaattttttgcaaattcattgtttataaatatcacaacatgtagggttaaaatttaacactgtcaaatgattccgttacggccatcaacgcctgttaagtggtaggttcgaaactaccacaatttaaaagataatggttttaagagacaataaaaaataagtaaggtatttgtattccaaatttaaaactataggtattaaacggccaaattaaaaataaatggggatttttcggtttttttccctttgctaaaacgacagcggaggagacgtgacttatacgacagccacatgagcttagtgagttcatttttttgtgttggtggtaattttttgctgaaattaaaaacattacaatgttgtagtaataaaaattggaatcggacttatataaaaataattcaaacgttagaaaatggataggttttgttaataggtcacactcatagctattatgagaaacgcgaaaacatataaattcgacaagtacgacctattaatggtaccaaatggatttaaaccggtttagtggattaataacatttggtataaatcgcattcaaccaccggtttgtctttaattgcggacgtttgaatatgtttgacattgaaatagtcattagtcacgttgttttagcattgaagaaaaagtctaaaattgatcattgtttggtgcatattagaaaaataataaattttgggtcttacataaataaaataaaatatcctttatcgtcaatggtttaatcgtctgtcctattcggttagttttagtactgaaaatcttcgtgagcattcgttctcttgtcgatgtcgtaccaaaagtaaccatcaccggcaatataaccgtacgattgcggattatcattgtgaaatgacaatcgctttctaaccaatcttaatcttggttcgttgttatctaaacaggtccggtttgatctctgttttggtacgctttgtggtcggcggaacctagccacggttgaggcagtggtagacatgtaatttggaattgaatgggcttgccgtgtgacgaaagaattgccacgtggcgtctggtcgttgagttgttggtggtgtgagtacgtattaatatacttatcgatctcgactatcttgaccggttcaacgatagcctgatcggttgacattctccttccggtttcttgataaccgtacccgtttaatctactcggtcttttgtcctctaattcactttcactatgagcttctctttccattgttctccacatctttgatcataacccaaaaagaagatcggtttgtctattaatatacttaagaaatggaaaaatcggagtttgatttgatcgaacctgtttagagaaagcatgagagtaggaaatttcgtcgccgagcttggtcgtgagttt

SEQ ID NO: 15464 - DNA, 683 bp, Arabidopsis thaliana landsberg
gtcactattcttggcccataaagatttaagggtagtgggctgtacggagcaacaaatggtccataagtttctcacgggcatctcaagagttaggtatctcatcgtctctgaagatatgatggaggtatgtttttatgaacttcatattgtatatataatcctatatagaacttttgctaacccattgtcttctcttcgtttctttttttgcaagcaggtcatcagttcctacttgaaagaagattcattgccacagtttggcaacttgtcctatttgaaagcaagtgtttggttatcatcctttgacttcctggacatcctgccaaagcttcttgaaagctgtccgaatctaaaatccatcgtcttggtaatgacttgcaccaacttccaaattaatcttgtagttagagaaatgatcttgttatatatctagtttatattatattcatcttatgtatattgtaggaaacaacttgtatagttgatcgtacgaaagctacggtagaaaggagagtctcgtctgtgcctgagtgtttgttgtcatcgctggagtttgtagagataaaaaacagaatcttggtagatgatggtgcattggaagttgcaaggtactttgtagagaactctgtgaatctacagaaagttgttctgcgttgggcatcttcctttctaagacgaggaaa

SEQ ID NO: 15465 - DNA, 1565 bp, Arabidopsis thaliana landsberg
ctttttctttcttttccaacaaataaattgagataaacatatttgtactattctatcactatcatcgtgtcaccaccatattcaaatccatatatacacaaatgattaaaattttaaaagtaatttttgtttataatacacaaaaatgaagatacgtaaactatcgtaccacatcttacaaaattattcgtgacattttatcctttgttgtcccaaattagtgctgagatacttcaaatgtctgattaagaacggtaataatatttataagtggcgaggcccaagaattagctcaaaacaaatgggccgaaattatacatttctttcatattagtaaagcttttctgggagaaatccgggcatcaattggttaccggttcagtatttaagcctgggttgtgaattccaacataataccgaaccgaattgatcaaaacactgcgttttgttttcagtcattgcaaggttactgcaaggttaaagcgggaagtgagcaacgagaggcagcggcggccgtcatggattcatcggcgaacataaacaaagctctaacggagacgcgtttctccgacctcgaacctccactctccggagatatcattgaggctcttaatcagtctgatttcgagttctgcactccggttcaagccgcgacgatccctttactctgtagttacaaggatgttgccgtcgacgcagccactggttctggaaaaaccctagctttcctccttcccctagtagagattatccgtcgatccaactcctaccctccgaagccacaccaggtaaggagaattagccgaatatcaagagtagtagcttatgctatatgttaacaatttcaatctcaggtaatgggggtgattatatcgccaacgagagagctatcagcgcagatacataaggtggcaagagccgtttgtgtcgactttgcgaaatgtgaactctgtcctgcttgttggaggtcgagaggtggaagctgacatgaatactctcgaagaagaaggagccaatctcttgatcggcactcctggaaggctttcagatatgatgaaacgaatggagtttctggattttcgaaatctcgagattcttatcttagatgaggccgatagacttttggatatggggttccagaagcaggtcaattacattatatctcgcttgccaaagcaacgtaggactggcctcttttcagctacacaaacacaagctgttgcagacctggccaaggctggccttaggaatcctgtgagagttagatcgggagctgagtcaaagtcgaaaacgccttctggtctgtattgtgaggtattattattgtaaggtcaatatttaaatacgtatatgtgtttcgggatagtaagtttatttcttcttcgtgcctctgcagtatttaaaatgcgaagcagatcaaaagtcatctcaactagtgcatctcctgatcgagaacaaaaataaaaagcttgtcgtgtaagttttgacacaacggaaaatatcaaattaagcatccttttcaggcagtctaacaagtatctcttcagcagattcttcgtgacatg

SEQ ID NO: 15466 - DNA, 1303 bp, Arabidopsis thaliana landsberg
tcgtcgtaatcgttccaacgccgtgaatccattttcagctaaatacgttccgtttaatgcagctcctggatccacggagtcttactctctcgacgagatcgtgtaccgtagccgctccggtggtttgcttgatgtcgaacacgatatggacgctttgaagcgattcgatggcgcgtattggcgtgatctcttcgattcgcgtgttggtaaaagcacatggccttatggatcgggtgtttggtcgaagaaagagtgggttcttcctgagatcgatgacgacgacatcgtttcagcttttgaaggaaactcgaatctgttctgggcagagagatttggtaagcagtttctaggtatgaatgatctgtgggtgaaacactgtgggattagtcatacaggaagtttcaaggatcttggaatgactgttttggttagtcaagttaatcgtctgagaaagatgaaacgacctgtggttggtgtcggatgtgcttccaccggagatacttctgctgctctatctgcttactgcgcctccgctggaatcccatcgattgtgtttttaccggcgaacaagatctctatggctcagctggttcagccgatagctaatggtgcgtttgttttgagtattgacactgattttgatgggtgtatgaagctgattagagagataactgcggaattgccgatttatttggcgaattcgttgaatagtttgaggttagaagggcagaaaactgcagctattgagattttgcagcagtttgattggcaagttcctgattgggtgattgttcctggaggtaacctaggaaacatctatgccttttacaaagggtttaagatgtgtcaagaactgggacttgtcgataggatcccgaggatggtctgtgcacaagcagctaatgctaatcctctttacttgcactacaagtctggttggaaggacttcaagcccatgactgcaagtaccactttcgcctctgcgattcagatcggtgaccctgtctccatcgatagagctgtgtacgctctcaagaagtgcaatggtattgtagaagaagccacagaggaggagctgatggatgcgatggctcaagcggattcgacaggaatgtttatctgtcctcatacaggtgttgctctaactgctctgttcaagctgaggaatcaaggagtgattgcaccgactgatcgaactgtggtagtgagtacggctcctgggttcaagtttactcagtctaagatagaaaatcacaacaatgccatccctgacatggcttgcagattctccgatcctcccgtt

SEQ ID NO: 15467 - DNA, 4197 bp, Arabidopsis thaliana landsberg
tggatcccccaacattcttgaattgatgcaatttacccttgaatcgtttctgagttgttggtttatttagcgaaccagtttaaaccggaacccgttcgatttatttttagtgtttaaatataattgacttataggttatgtcaccaattcgataagctcccaagtggttgtgtcatctaactagtttaacatgccaccttggttcgaatgggtgtaccttcgtcagcagtgatactgggacgttgcttatataaaaacctataatggtagggtcgttgtttagcgttctaccatctagcttgaggtaatctaaattaccttatttttttgcttttaattcatttaaaaattctaatctcatgagatctatgttaacaattggatcggggcttagcatacaattgatataaacttgaatacatctatacgggaaacagtttttacatgattttggtagtagtctctttcaagagatcatctaaaaaagaatcttcaaccacaagttacatagagagatcattttaattgacgaatcctcacgcattgagtaacacctggacgtcagtcacacgaacatgtccaactctgttcattaggtctttcatcatgtgacactcttgcagatctgaaaactgttattagtgaatacgatttagattggtaatttcttttgaacaagatgaaggatttttgggtcttaggctatgaatggtgacatacaccgtacccaaaaccgcaccgcaacagtgtcaaaatttctacatatacatatgtatttatatatttttgttactatttgaaccgcaccgcacttcttccgcaccgcaaaacgcagtcgccattcggacctttaattaaaaaataataataattaataacacacaccatgacttacaaaagttgtgaaccaccaaggcactaagtttggagtcgtcgagcagtgtcagtaacggtgctctttatacattatatctctaccgtttaacttgtattggagccgcgttttaattagtaagtggtgtattttgcatcgcaccgatacaaatgttagcaatcacacacccatggaatctatgggttttgtttttgtttgttttttttccgaatatgtgtaaaaagacctcatttgactggtaaattaaaacctatacgagtattaacaatgactaaacgagttaaaatggaattgcatagcattagaaaaaacttttcggaaaatgaaaaggtgataaagtttccattgatgattagtctagcgccgggtggaataaaaattgactggggaacaagaaagcgacagaatctgaaagccaagagggcaagaggattatcttcgtattctaacgttgacaaccaaacaccgaggttaagcttgtaaaatgtgtcattttggactaattaattcaagaatcttcatgggatcatgtgcatttccttaatctaatgttttattggttactgtaatattctaaggatattttcttatacgcaaattttaaatctttgacatttaaggtgacggttcttcatatgccattatgcttttccacttctctaagaacaattatttttaaaatgtaatacataataattcaatgactctaaccaaataaataattacctgtaaagaagaacttgttatgtggccatgtgcatagaggtttagttccctaatgaagtattcacttccaatggacacgccgaacatacattgacacaggaattaatgcggaaagtatcaattacttcttcgatggaattttatattccatttgttatgtactatacattcttaagaaactaagcatttattttaaaaaaatttaattagataattcattaacttaaaataaattttaattttatactattagatttaatttattatagtttaatttaatttaactcaaattaatttaatgaaaataaacttaatttttcattttattttaaattgctgattaaaatcaaatttatttatttagttttatttttattgcatattaaattaactagttttttttttgtaatcgttatgttgttcgtttagcattcgctggcaaccaatgactaatgaatgggaccagtcgcaggaggtcgatgaaatttcacacgtatatgtattctcattttcttttatttacgaagacaaagatgatatgatgatttgatgatgctgcggtcactactcgctgcttctttacatccaattcaaattataatgcctctatgattttctgcaaatacttatctcttaaggagtattaaaatgggaattatttcatcttatatatagttaaaccataatctctcaaaagtaatgttcgtgatcgagtcatgcattgaaataaattaaccatattttggatatgcatctttggaagtgaaagcagaccaaatcagagatgagtgttgcacacgtttgtttctgtttgaccattctcatattacttcaacttttgtcttttatgttgtttttgttctgccctgttttctttctcattgctatgtctctatcctctgtttcttcttcccatcttctctctgttttacttttaatcttttgtcctgtatatgaaactttttatttgctacattggatatgataatttttatttcaattcttgcatccaagttttatttactttctctgagtttttctaatgggaaattgctttgggttttccgcaaaagtaggtaatagagaaagtccttatcgtggtatgcaaccaaacatctctcttctctaagatttctctacttcttgtcatatcttatttctgattataaagtcttaaattgagttgagacatctttgatttgattaactgttgattcatcaggttcgtcaagaatctctgccaaaagaagtcaatcgtctcggctttcaagcttaacaatacaatcatcatcttacaacgatgacacgagtgtggcgtctcttcaaacgcctagaagtgaaggagagctcttagcatcgcccacgctaaaggcatttacgtttaacgagctaaagacagccactaggaatttcagacccgatagtgttatcggtgaaggcggtttcggttatgtctacaaaggatggatcgatgaacgcactttatcgccttcaaaaccagggtcaggcatggtcgttgctgtcaaaagcttaaagaagaagggtttcaaggacacaggcagtggttggtacgcttatataattaattatcctctgaatcagttttaggtctttagccgtagaaaccaaaatcgaaacctaaataaggaattgttgatttaacaggcggaggttgattgtcttgggaggcttcaccatatgaatcttgtgaaactaattggatattgctcgaagggtgatcatattcggcttttggtgtatgagtacatgccaaagggaagcttggagaatcatctctttagacgtaagaaaacttgtctctcaagtaaagatcaatgctcaaattatctcgagagcctttgcgaatgtgatagcaagattcaaatgtatagttgttattgtataacagatttagaaaatttagttggttttatattcacaaattttcatttattttaaaaagttgaaatcaggactattatgtaggtggggcagaaccgattccgtggagaacaaggattaaagtggctatcggtgcggcgagagggcttgctttccttcatgaagctcaagtcatatacagagacttcaaggcctccaatattctacttgattcggtacaactggataacaaatttacatgtttttgttcatcaaatttcaatcatagaaattttgagatttaatgcaaaccaaacaaaataatatgttgagtttgattgaaaaataaaactaatcggttcatgacatattatggtttaagttttggttttgaccgagcacttccgtttgatttatatgtccatctttacgtaggaattcaatgcaaagctttctgattttggattggcgaaagtaggaccaaccggagacagaacacacgtatcaacccaagtgatgggaactcaaggctatgcagcacctgaatacgttgccactggtcggataacagccaaaagtgacgtctacagcttcggtgtggtcttgctagagttactgtcgggacgtctgaccgtagacaaaacgaaagtaggagtggaacgaaatctggttcattgggccctaccttacttagg

SEQ ID NO: 15468 - DNA, 3292 bp, Arabidopsis thaliana landsberg
aattttcacactgcaattttaactatgaacatagtagatcataaaccttacaaaggttcatttttttattttacttttttttttgattatacgcctccatattatgtgttttatagcaatttattgtttatacaaatcttatagaaaaacagaaacaaaataaattatagaaaaagaaaaacacaagaaattaatcatttatatgtagatgaacgtgtttattttgtccacaaaaatgtcttcaattttatattttgtcttttttgataaagattattatttttgatgaatgattttttataacatttttttgtcggccatatatatataacatttttttttttcttactaagaccataaatacaacatttgtttgctaattttagtacacagaaaagtacacattaagaattggatctcttgtttgacaaaatatactgaacaacattctttgacattcaaattaaaaatgattattaagtttgaacatggctagcttgttggactgttccaattatatcaatcaaatgtcacacttcatcattttcctatgtgaaatctacgaagccaaattttaaactaatgttgaatatcaaacgattacttcgtctaacttagaaaatagctcaaaagatctacaatataataattttaattatgtttttcaactctaataataacataatagtaatggattgcttacagtcaaagcctcaaagtaataccttttcctggtacagaagtaaatacatttattactacacggtttttgtccagaagttacgtttttccaggtagtttcgcaggcaaaatacgagaggcaaattcgtaattactcacaactccagagtcataaatataaaaaaaaaatcttacgcctctcttaaatcgtcccctccaatcaaaatcagatcacagtaagattcccaaaattcgaaaaaaaagcttcccagagagaagagaaaaaacttctctgaggcggccatgacattgcagagaggtttacctcttctcttgcaacagtacacggcgttgttcaagaaaaaccttttgctttcatggcggagcaaacgagccacgtttcttcagctcttcgcttctttcttcttcatccttctcatcttctgtatccaagcagccatggagaagagtttcgcttcctccacggctctcaaaactgttacggatccgacggcgctgatatcgccgccgattccgccttgtgaagataaattcttcgtgaatcttccttgctatgactttgtttggagcggtaatcgtagctccaaggtcacgcagattgttaatgcgattatgaagaataatcctggaagaagtattcctattgagaaggtattgtcttcttttatttgatttagtcaaattgtgtaattaagcattcttcaggagaaagaactagagtagattttgattgtgatgtgatgcaattttagtgatgttatagatatagaaaaccaaattgttaggtttaggttttgagaattaaccacaaaaggttacgtgttggatactaaaagtggaagtcaaattgtatttaggtacgatcattcgtggatcctgaagcggtagatacgtggcttatggcgaatcctttgttagttccaggagctttgcactttattgaaagaaatgctacagtgataagttatggtattcaaactaactcaactccagagatgaatagaggaaggtttgaagatcctacttttaagtttcagatacctcttcaaattgcggctgagcgtgaaatcgcgaggtcgttgataggaggtatgcattttatcttgttgaatcttttgagtgtgtggtcatgagtgttgagttcttgacgttgagaagttgttgttacgtttttgcagatccgaactttaattgggttgttgggtttaaggagtttcctcacccaactattgaagctattgttgcgttggacactataggaccgacttttttccttgcggttgctatgtttggttttgtacttcagattagttctttgattactgagaaagagcttaaacttcgccaggtataacgttgtttctatataggctgctgtgaacaaagtctttatagtagattgattgtgttgtgcaacaggcaatgacgatgatgggtgtttttgacactgcttattggttgtcatggcttacttgggaaggaattcttactgccatctcggcgctcctgacggttctgtttggaatgatgttccagttcgactttttcttgaagaacagtttccctgttgtcttcctacttttcatgcttttccagtttaatttggtaaaactctcttgctaagactaatgtttacacctcttttggcacatcagttaaattattaacttcattgtttgtggtgctagattggactagcattcatgctatcagcttttatcagtaaatcaacttcagcaacaactgtcggtttctttgtgtttctggttggctttgtaacacaggtgcggtttctctcatgcaaaaaacaaatagctggaactgtttcttcgaattaacaattgtgttgctaatcatataatctaactgcagcttgcaacatcaagtgggtttccctatgccaagaagtattctcgtatgatcagggcactttggtcactgttcccacccaataccttttctcagggtttaaagttgctcgctgatgcaacttcaactcctcaagatcctggtattagttggagtaaaagagcagaatgcggtcctaacgacgacactggttgtgtgcttacaattgtaagtcaactctcaataaaatttccatctaataactctgtctaatagttctctgatcattactttttggttttggcagaatgatatctacttgtggcttcttgggactttctttttgtggtttgttttggctctttactttgacaatataactccaaatgcttctggagtaagaaaatctatcttctactttctaaaacctgggtactggaccggcaaaggtggcaaccgagtagaaggtactttctcctcagtcttgtttctgtattcattagtaattttggtgtcgtaaaagtgatcctaagtaaacgtttctattatgaacagaaggtggaatttgccgttgtattggttcagttccacctgtggatcacattaccccagatgacgaagatgtccttgaagaggaaactttagttaaacaacattcaatggagggcttagttgatcccaacgttgcagttaaatacgtggtcttgcaaagacttatgctcggacgactaagtttggatgc

SEQ ID NO: 15469 - DNA, 2273 bp, Arabidopsis thaliana landsberg
gagtttcgtgcgaagatattgaaagattatgagacatcgcacagatctcgcaatctatacttacaaccaaaaagattcatcatgggaatcagccatcttcgagcaccacacgaccttcgagaccttagccatttagccgcaactcaagaccactatgattgacgatcttgatgctttttctaaaggaaaagacttcttcaagagcgtgggacgcgcttggaaacgtggatatcttctttacggtccaccaggtactggaaagtcctctatggtggctgctatagctaatcacatgaactgcaatatctatgatctccagattcagagcgttaaagatgatgctgagttgcggagggttctcaccgccaccaataacagatcaattcttctcattgaagacattgattgtggtactgattcgtctcgtagacgccagaccaaaaatgaagaagatgatgaggtcaaaaagaaaaaaaaaaagcctgaccttggggtaagttgaaattgttagagtaatagataaatattaatcttctatatcttcttatttaaatctctagtgtatattctctagatcctcccttgtaatctatatatagagatttctctattcatcaataacatacaattttaccaatcttacagaaatgattcctctgtttctaattttattaacctctctgtttttgaacctaatgaatcttctttcttgtggacagatatctttgtctggtctattgaactttgtagacggtctttggtcgagctgtggagaagaaagaatcataattttcacaaccaatcacaaggagaagctcgacccggcattgctaaggcccggaagaatggatgttcacatttcatggactattgcactccattgtcttgaagaagcttgtggctatgtacctcaaaattgatgaccatgtcctgtttgatcccattgagaagcttgtccttgaggtgagtgtaactcctgctgaagtcgcgcagcagctcatggtgagtaagaacactgatattgcgctcaaaggtctcatcgaattcatcgaaaaaaagaagatagagaaggaagaagttaccaaagttgaggaagagggtgagattgaagatgctgagactaacgaataaaagatgctcaaccattagtagctctttggtgccataaatatcttcaagacttcattagaagtaactttatatttcagttttactacaaattgttgctgaaacgacatgttggttgtctatgaagagaaggctacgacatgttggttcacagtagaacaatatcacttggattctttctcaagaaacctcgaatcaaacaacagtatcccatgcgtatgcttgcttgactatctgagatatcttgtgctattgccacggcatgctgcagaattagatattttcttatttaatttggataatttgttattttagttttgaatatttgtggactttcattatttttaaaatttaatttattttaatatatagatttaaatttaatttatttatagaataaaataaatcaatataattgaaatgatacgatctatactaacatttgcctttgtaaaatattacttatgatgcggataacggatcgtagacaattaatttgctaaatcattttgctacaattaatttcttagagtgaatatcactacaagaaaacaattaatttgctaaatcattgtgaagtaaataatatttcacaaattcatcgtaaatttgtgagagatctgtttaaaatgtcacattcttaactagtgaggaacatttatagtcctttggaatgtgttgcttgataagtggagactgtgttccatttttcttcacaaaaaataatgctaagacaaagatgtgtgttcagatgtttttggtcactcgcaaaacatgaatcaaacttttattttttcccgaaaaaccaatttgaatttgttagtaagagcaccatcacaaaaatcatgaaagagtgtccatctctggaaataaaagcaccttcattagaaatatcgtaataaagttttttacaataaaaaataataataaatgaaggaagaaagcaaggaagatttcttaaatgagaaattttgagatacctataagaaccctataaaacacttgtctcacatatattagttcaatttttattttaaagttatgaaaatgttcaattaacgcacaaatagtgcctttaggcaaaacaattatcgattgagaaggagaatgagatatttctttagacatacaaaaacacattaatc

SEQ ID NO: 15470 - DNA, 4373 bp, Arabidopsis thaliana landsberg
ccggttttcctcgctgagtttgtcaatttacctacgctaattactaatctgtaaatgttcttattttgcttaggacgctgagaaatataaactaagcaaccctcgtcaatttcattatctaaatcaaagcaagacctatgaattagaaggagtcagcagcgcagaagagtataagaatacaaggagggcaatggatattgtgggcataagtcaggatgagcaggtataacgacttctaattgaattttcatatgtttttcttctgccagcttctgaaattccttgcttgtttcctgcacaaatcatttatcaggaagggatatttcgcacacttgctgcgattctacatcttggaaatgttgagttttcctcagggagagagcacgactcttcagtggtaaaggatccggaatctagacatcatctgcagatggctgctgatcttttcaagtacataaaattttctgatagtactcatttttaattatgcatacgaagaaatagcttgtttattttgttgtatccatgcaaaattaatcaggtgtgatgcaaatcttttgctggcttcgctctgcacacgttcaattctgacccgtgaaggtatcattatcaaagcacttgaccctaatgctgctgttactagccgggataccctcgcgaagactggtttacgcccatctatttgactggtttgctttcgactttcttaatcctttcatttaatggatgttttgttgatgtactacacttatgttttttctattcggtttatgcttctgtcaggctggttgataagatcaataagtctgttgggcaagatccagaatctcgttttcaaataggagtcctggacatttatggctttgaatgttttaagaataacaggttagcgatgatccatggaactaattaaatgatagttctttcctttctcagccccaattctttgttagttatatatggtgcactatgtttagctgtgaactgtgtaaacttaatctgggctgattcattctgcagttttgaacaattttgcatcaactttgcaaatgaaaagctgcagcaacatttcaacgaggtaatatagggaactcattttcaaatgttttgccagatttcgtatattgcttcctctccttatggtctctggtctgttttcagcatgtattcaagatggagcaggatgagtacaaaaaagaagaaattaattggagttatatcgagtttattgacaaccaagatgtcttggaccttattgagaaggtacgtttctctctattttaattagattaagattttagatcctgttctgttctactttcttgccccttcgccttttgtgatctttgaaacttgcaacagcttaaattgtatcagacctttaacatgggattttgatcatggtgtcaatatatcatgtcgttttatttatttattatagttttacttagattgtcgagtaaagagttcaccaccctttaaacaggggatttgttgaatcatgtcaactcaaaaaaattcgagcggttcaatgttaatttttctcctgtgatattactcaactccatagttttgaaattaacggtatcactaatgttacattgtactgtgtcatacgttgggctggttaatgtagccaatacatttaccgtgtctaaagttactcaagctgccattgctattcccatgatagaatatggatgataaaggtcccagtctataaatgcaagaatgatagaattttgtgaaagacatttccctttttggtcaatggttttattgcattctggtatggtagactttgataccagagataacatagaatagtttatcttcttttcaagttttctattgtagttgccagcctcaagaattgtgtcctttttttaatgtttttgctttgttataatcaagcagacatgacagtaaaattgatctatcttcttctaattctactattattatttttgctgtctgcagaagcctattggggtgattgcactcttagatgaagcttggtacaatattcctgtctcatcttgtttgtccacatacgtgtattttcttcgctcgctgacttatatttgtttgccttttatgcagcatgtttcctagatcaactcatgagtcattttcaatgaagctgtttcagaactttagatttcatccgagattggagaagccaaaattttcagagacggattttactctctctcattatgctggcaaggcaagtcttgctcgaggacatagcttaatgttattttgtttcgttaagatctcaattagtttgtgctacgccatttctgcaggttacttatcaaactgaagcctttttggataaaaaccgtgattatactatagtggagcattgcaatctgctgtcttcctccaaatgcccttttgttgctggaattttcccctcagccccggaggagtctaccagatcttcttacaaattttcttctgtatcttccagatttaaggtagagaatttttccagctagattttttttttcacattgcaaggacctctgtcatgtaagttgtgtatattaagaactattgagcgtaaaaccaatcatcgatctgatcatataattttgattttagcaacaacttcaagccctcatggaaactctcagcaaaacagagcctcactatgttcggtgtgtgaagccaaactcactcaacagacctcaaaagtttgagagtcttagtgttttacatcaacttcgttgtggggttagtggattacgtgatcttaattcatcttctcattttccttggtaatcatggtctttctataatgagagaggctttttgatttgtttcttttttgtagctagtctggtgtctccattgttcttttatatttaacgttgatgtgtgtcgagtttttctagcatgcttatatcttttcttgtcgtagaatgtgtatgtcatgtcaggctataaacttcatattcttgctcattaatttttggtcgtggtcatctatataaacatagagtttgtacacatcgttggtattactatcgttgtgcacattcgttgacgtaattaaaatgtaatgttagcgttctcgtctctaggccattgtcttatttaactgctgtagtacatgttttgcgatacccattttctaaattgcctgattgtgtccttatagttcaccaattgaagtgattttagcttacactcagccggttgtactagtcttttcatgttcttgccttatcttccatttcctttgtttggtctattaactttaatgatgtctttggatagggtgtactggaagctgttcggattagtctagcagggtatcccactcgaaggaattattcagacttcgtggatcgttttggtctgctagctccagaattcatggatgagaggtacgattattgatcgatgatcctaagattattgttagagtgttattcgtcctatacttgtcattgcaaatttggatacctgtacaaatgttctttgacatttttctgtgaccactgaccgcgtgattaaggaaaacaaggtgacttatttagaaaacataagcattatttatagcttttggccagacaaaacaaataccctggacgtggatttcattcatgtttctaatttcttgtgtcctgcatgggataatccttattgtcaagcaagagtaatttgttaatatataatttatatgcagcaatgatgagcaggcactgactgagaaaatcttgagtaaattaggtcttgggaattatcaggtatggtgggctgagaaaccaaatgattttcgctattgcatggctcttgttagatactctaattgatttgctaatacttggaatatctttcacagctaggaaggacaaaagtgttcctaagagctggtcaaattggcattttggactctaggcgggctgaagtccttgatgcttctgcaagacttattcagcgaagactgagaacatttgtaacgcatcagaacttcatctctgcacgggcttctgcaatttcaattcaggcatactgtagaggttcctttcttatttactattattcttcttctttcattgtacatgtgattttctcttgcagtcgaaatttttgtagtctttatcaattcttgagaaatattcagttatcaaacaccctattctctgatttttttttattgatttcttttgccaaaaacatgttcacatgatcacccatgcaaatcgttgtcacttttgaattaatgcaattgtatttttttcctatccgtgttttatttctaagcctaataatagtctctgttggcaaggatgcctgtctcgaaatgcttatgccaccaaaaggaaatgcgggcggcagctttttttggtccaaaa

SEQ ID NO: 15471 - DNA, 3019 bp, Arabidopsis thaliana landsberg
gtcccgtgtagctattcgaccagtagaactctctaaccgccgaccattatcagcatcaagcatctgaaatatttacaaggtcaagtcactgcatgtttactatttgcaaagagacagatataaaacctaacttgacaaaacaaaacttgtacctccatttgtttgaagtctgtgtttcccacaccgacgataagaactgacaacgggagatcagaagctctcactaatgcatctactgtacccgccatgtctgtaaggactccatcctgttcacacatccattttttttgtcattgaagctatagatttactagtaacagatgcacattcgatctgaactgggccaaagtcattacgtatctgaatgttcagtctcttaccgtaatgatgagcagaacaaagtacttgggactgttttgtgagagtgactgtgaagcagtatgagcagccttgtcgaccacattgctaaatagagttggtcctgctagagaaacattgcgaagagcactcgcataagctaccatgattccttcaactccaacaacctgaaaacgaaaagagaatatgaagcaatgtgaaacttaacatgcagttttgagaatgcaatgtttcatggttttcaaataatggacaccagtatgcacacaatatcagctccaataataaagggagataacagtttctgtctcgtaagttacctcgtcgccatatgatgctccattcaagttaaaagcatgggacacagaaccatccgatgttcttcctccaaacccccaggcaggaaaccgcttatcagaatcataaaactggatgacctctcctacttccataatagcctggaaaaaaacagaagccaaattatgtttatacatacaatagatcaagggaatcacgacactgaaagaaaaagtaatgagacgatggttttatactgagaataagcatatagttaaatggccaaatctatgctatttcattagccgctgtgagagaactaaccattctagtccaagcaatgtattggtattgaggatacagatcacaaacaaaagaaacgaaggggtaacaatagtacctgttgatatgagtttaatctgcctgatggatcaatgtagtgcaaagaacttggagttcggggatcgccatttgaagctgaaagacagaccatcaatcttaatgatcaaggtttctaagtaaagataagatatatatgaagtagaagaaggtgaatcaccagtgaagtcaactgcaaccatgaaattaagttcaaagccactggatatgtaatcaagaaaactgtactggactttctccacataacgatccacaatgagctggcctttcagaacctacagaaacccaataaaatcttaacgaaaataaatgaaaataactgtattaagatttcaatcaagtggtacgactaggcaccttgtttctaccgtgacttagagatggatagacaaagtttgcagcctctttctggagacaaagtctctccaattctgctacagatttctctgtctttctgcaaggttcagtataattgtcagtaacaaaaatcaaaaatggtgagacccggtagaatgttaaaggttaacatgttacccaataagttcatgattcccactggtgttaaaatctaagcactcgataaccaatggggtgtcctgcataaacaaaacaatcaatttaacataatgattatttcaaatgtatacattgaattacagtgaaacaactagcttactttgcttccaaattgttgcatagtcaagcacacaggcctccacatggggttgaggttgttgtccacgacctcagtccgacaaattgggactgcagcacttgtctcaacaactcttgatattcttaagaaaggatcctagaaagagaaaataagataacaagttaaagcttctgcaagaaatcttaatattgttacctagaaggacaagaatgcataagtttgtacgtacactcttagagaacaagtccttgttatccaaattgacacagcgaaaattaatctcagcgacagttttagaagcaactgtttcttcagcttggatagagagtgttcccaaatttctattcacaccagctctaacgttgccagtaagagttaatgtcagtgtccggttttgtcttgtcataatctggtgattgaaagaggaatgtaaattgtaagtattagatatgtcgtacacaaagagcagtaacactgactaatggccaaacaacaatgaagccatcacaagtagcagtgtctgattactgaataaatttacctcggatagaacacatgtgccttctcccaagaaatcctgatcctttagctttaatgtctgcaaagttatacagtatattgaaaccacttttgatgtgtagcatttattatcgatatgcaaacttcttgatgttactatcaatgaaaatattaccttcactggcacattatgatatctggtatcaacatcatacacgtgaaaactgaaaagaaaaagattcatacaagtttaaagatgagttcaacatgtgcaatttatcagaaaagaatagttaacagttgcatacactaatgtctggacagcttcaaactgaaaagagactgttatcttctcaatccacttaggattcaagttgttaagtatgacttcagtacggccaatttcctcaagtctcccatcctttttcctcaaatacatgacagccatcggatcactctacaataaatcgaaaactcatcagcttcacatgtaactaaagtaaatggctctaaatctcatacgaccatgtccaaaaagtttaatctagtagtaatattagagatgattcaattctaggaataccttagacgttatgtcacagtccaacaagtttgaagccgacaaagttaactgcaaaacacaattgcacaatgttaaacacaacttaaaggtaaacctgtgaaaaaagtttatgatatttcatgataatgaaaatccctaaagaagagtgtaaactcaaagcaacatgc

SEQ ID NO: 15472 - DNA, 1768 bp, Arabidopsis thaliana landsberg
agaaaatattatggaataaaagtctaaaaaagcaatattttttgttcgtacattcaaatgattaaaacgggagggggggagaaattcttaggaaatatcacaatagtagttctagcagtaaagtaggattattatcgaaccattctataattcaaatcactaatatagagcaaccggtgatgtgtcgcgctactcattatgcttaatagtattgatcccaactctcttgtaaatccctagaattaagcaagcattctaatcaggtttgataagttcacctaagtatctaaaccgacgctagcatgcatctagatactatgctcatttaagatagttctggtaacaggtacctatggtgggtatacctattatcataaaatcaataactagttaattactttagaactagcatttagaacaatcaaagacgaaaaattctaaatatattaccctaaaagggttttcgatctactaatttatctaaatcactaatgagaatccctaaacccaacaagaggaggactcagacatgatcatagaagaacaaaacattattgaataagaaatcaatgatgaaattaataagagaaaagagtttagaagaatcttctctaaagggagtctccacaggggtttgctctcaggaataaaagagataataagagttatgcctctaaacaatgaccataaaaatcaatatataagtcctaaaaacgtttgggccttttttggatataagagagagttctgagccgaatttgaaaatcttcaaaacttcaataagttgcgcaattgaattgccgtcagatctcggtgtcgcgctacacctagggttgtgtcgatcgacacctacgcaaagtttggtctctgaattgcttgtgtagcttaagttgtctatgttactccagaatgctccataatctccaaatgcatcccaaacatgtaaagacctgaaaaagagtagaaaagactctacaaataacaaaaagactctaataactatacctaaatcatagctaaaagcagtgaaaatcgaggtatatcctcctcttccacgaccacctaatgttgctgctaggcagtctgcttatgttccacgctaagacgggccgtcctcaacgtactatagtcgattacgtacgcgcctaaccggtaccacaagatcgagatgctatacgagtacctagtccaagacatgattttgagatcaacctcaaatcattggccttgtgaagcaaaaccaattccatggtttcaacaaggagcacccgatggattatatcgacctcttcgaggctatttgaactgtaagctttttcctttctctttgtttgacaaggcgactagatggttaaagtctctgcctcccgggtcgattacttcatgggaaggatgtaggccagccttcttaaatcgcttctacacaaagtcaagatccaactctcttaggaacaagctacaaggatttgaacaaggattggttgaatctttctacaaagcatgggaacaattcaaggactatgaacgcgattatcctcaccatggcttccccaaatttaacctcataagtaccttttgtaaaggattgcatcccaagtttcacctctctctcgacccggctagcgatggagaattaaccaccaagaatatcaatgacgcacgagcccatatcgagaacttgactgctagcaacagtaacgcttccactgattttgatagaaccatccgttctaaggactccgactcaaaggagatctcaaaactgacg

SEQ ID NO: 15473 - DNA, 3413 bp, Arabidopsis thaliana landsberg
ttaaattttagaagcagctcaagatcttggatcgaatcattcttcttctttcaatctgagagtaaagaagagaagaagaaacagtttttgtcctatttgcagttatggtttcatcaagactttactctgtttcaatggtattgaaacggccttcaagtttcatcttgaataaactgtgtgaaccgaattaaagattcacaattcgttttttttgttcatcaaataattggttcggttggaatgagtcggttcaatttaagcagacgaaaacacacaagacataaacttatatttgcttcgtaaggataacatatccgtgttcaggataaaaatatccttgtctcggacaaacaagaacccaacttggcccattgggcttgccagtcttgttctggaacaaaggaatagcaaaaaacactagccgttacacacacaacaacaactcactctgtcggtgatctgtccttcacttctgtaaagcctcaacggtcatatttggaaaatcagaccgtttaaatcgctctctacataaacccaaattcataactcacccaatcacaattcgcaagctatcttcctttcttcttcgcaatctcaaaatccaaaattttctgcaacccgaatcagaaacctccaacatcgtcatgggtttaattcctcaaccacaagaatcgatccaagaatctcattactacacacataaactcttcctcactgcaaactacgtcctcctcggtgcatcgtcaagctgcatcttcctcactctctctctccgtctaatcccttcactctgcggtttcttcctcatcctccttcacgccaccacgatcgcagccgccgtctcaggctgtgcagccgcatcttatggtaagaaccggtggtacgcagctcacatgatcgcaactgtccttaccgccattttccaaggctcagtctctgttctcatctttaccaacacttcgaatttcctcgagagccttaactcttacgtccgtgagaaagaagcgtctatgatcttgaaactagctggtgggctctgtgttgtaatcttttgccttgagtggatcgttcttgttctcgcctttttcttgaagtactacgcttatgtcgatggtgataacaatggagttgctatgaaaaggactggtaaggttcagagtgaagagactctcaaaaattccccatgggcgttccaagtttgaagaaaaattcacttcttgtaatgattttgtttaagagaagagaggttgtatcaaatgttagtttgatctgtgtttcagggtttggtttatatgtattgaagaattgaattggttgattactttgttgatgattctatatgtcttgcataagaaaattttaattgatgatattcaaggaatatgtgtacccaagttctctagaacattattgccaaaccactctttatttaagagagaacattctttagactgatacaacaaaaagagaatcaaaaaggtaaaggaaaatcttaagtcttgttcttggtaaaccatacaatatctaagaacactcaaacacattttctttggtcttgactgattcaaacaagaaacataacctaaccacataactttatctacaatgttccgtataaaacaaaacacattcatatgaactttcgtggtcttaaaaactggtccttcattggtgaaatggttggtgaagacctttatgacttacttgggataattggaaagagaattgtgtagtaaacttcttaagccctgatatttcgaccaaatatccagctgaatggtatgtttttggcagcttctttggctcttccttgagctctctcttcaattttacggattcttgcaggtagtccgcagacaaagtcctgtcaaaggaaatgatagagtcagaattcaagtttaggtcccgatcagatcatcaaatacacaaaacagtatatctaatatagtattcatgaccaaaaactactacaagattgttataagtattcataaacttggaggtttcatcacaagaagtttcatggaggtaatttacctgggccctgtgtccttcactagaaaggtctgtcaaagtctccacattccaccgttcaacaagaaactccagaatatcagcatagtccttggcagtgtagacaccgagcctctgggcaacggttgagaagtgctcaaacaggttatcatcttggccatcatacattaaatgtgcaggcattgatatctttttcttcatcatatcagcccagcccaagatcgtgccatcagggtcaatttcaaagagcttctctacaatcttggtgtaggcgtgttcatgacgcctctcatcagcagcaatggtgccacaaatcttcccaagtgtcaagtctccaagatcctttgccagtctagcagtgtttccatgggagatgaatgtagctctttcttgaaaagaagtatatatgaatcccaagtaagggttgttttcagtttttggatcctacaaaacaaaacacaatcaatacgaccaaaaaaagagacttgtaggtttagcctttataagaaaagctagccatcttattatactataagagcttaccattccagaaccaatgaggtattgaatagttttttcaatctgtctcatgtctactcgtccagacagataaaggtacttgttaagaagatcaccatgtctattctcttccgcagtccatgccctagtccatacggcccaaggagttggacttgctcccgtctcatctctaaccccgtccaatgtattaatcatggtctgataagtcggaagtgcttcctctgtgatcatatcaccaacaagcactataaggtagtcatcagagagctccttacacctttctcttaactccttaacttggtcatagaatccttctgactcaggttcagggagaaaatcagttggttgccatgatttctcaacaggttttaagtaagccaacaagttctcattagcccatccttctaaggacttgaaaatctccagcttttgtggtggcattgaatacttcacttgaagatgaacctctcgaggaggaatatacagtttccttccaaccgctctgcaatttttccattaaagaagattccaaaatgatcaatagaataagaaagttgagagactgaaaatactgttataattaacatttaacacagccaccagaattagatgatagggtttcgtgttattcaggtaaccaactgcaaacaagttatagtctttaagacacctccaaaaaggagatatcccaacacgagaataatcagtttcttaaaagaaaaagacaagctaatgcgtgattcagtgttcatcatagatgatataacaacagtgaatgcacttgcagtactacaagacaaagcatgctctaaatcaaaatttcttctgaccaaaacagt

SEQ ID NO: 15474 - DNA, 2421 bp, Arabidopsis thaliana landsberg
tctaggcatggttcagtgtatttcaaattcattgctacgcacagacaactagcaacgaggcactgagttatcaggtaatcaaaatgcttacaaggctatctcatcatcatcccctatgcatatgcaacaatcctaaatgaaacactctagactcgatcctaaatgtaatgcaactacatgaacactctttttttgtgaaatcattttctgaaatttttcaaaattttttggtttttctatgccttagatgaatgcagactcaaaaatatatacaatgcaacacacactttctgagccctcccccaaacttaaatcacacagtccactgtgcgaataaacttggaagagagtaatccaatcacagaaacaaaaaatgaagaaacaaatcacaacagatgatataatacaatggtgaagtgaggcgcttacctcagtcgaagaatgaacgtagttgctcgtcaatggctgcctgtgattgctcccaggccatagacgaaccaccttgttctgtatcagctccaggaggtgggtactcgacctcatcagctctctggcggccagcaccgctctgaggaaactcgacctctctccttctgctgcggccagcaccacggtcgcgtaaactatgagactgcagaagtcgttcgctcctactgttagatcgagtgagtgtggtcctcctcttccacccagattcacgaggctcgaatgatgaatgcctcgcagggacatgcggaatctccagctctctaggctcaggcgcgtcatatctcttcgaaggcatttcctgagagagatgtccctgcggaatagctgtagtggaagaggagcagctgagcttgttcttcataaacttgatagccttgaggcacttggcgagtaacttgtcctgtttcatgcaccacttctgcagcttgctgttgttcctgtgagcttcgcttaaactcctgctttccctcgcaggaggtatatgctcactgaaatgatacatgctcgtgtcaaattccgcctcatctatatcattcgtctcatcaatatcttctgttgtagctccttaggtatgactgatctcctcagttggcggactaccctcgaaataaagttcttcaagcgcaggcttgaagtcaatgttcctgccctcgagaatcctagtagcgtcaatgcaggggagaagaatgttggcgattttaatcgatgaatgctcgaacctgtagcggtgaaagtcgccagccatgtcaaactccaaaaactcacatcggcgcaaatgatccaagtccatcatcctcggtgctaaccctggttccttgagcggtactccacaggcttgcagaattggcgtcacaacgccacccacgcatagtgctcctctcaccttcttctttccgttcgtcaacgcccacttcctgtatccacacagatggatcaacagaggcattactggtggtgcgttgttgagatcgcctctcaagacattctttcccttcgtccggcggagaatccctgtaagcgcataatctataatctccatgtccgtgttagacacggtgcctgtagactccctggagtaaaagacgttggcaaccgatctctaaaagtagcggatcacaggactccagatttggttgctcttggaccgcgccgagtttagcggtagattgttccctatagtggcccataaatccttaagctcttctctgccaaatctgggttttgttccctttcaactagggaaaccaaatagttcttctaacttcttgatcgatagctgataccgctgttcattcactgagaacgtcaagaagcctaaccccatggtatccagctcaaagtttgtgagtgcctcatacgtctccacttgcagcgtggaaagaaactcgattgtctcccccttataggcagggtaagggtaagacatgagtgtctccagatgacacttctcgaacagatgatgtacgtcctccagtaactccagctgggctaaagtctcatagcacggatacctcgttctccagaagtcattcatctcaaagaacctgatatactcctccactttaacctcgtcgggtttgttcagcagctttgtctccctgcgccatgactctggctcatactcagtctcgatatcctcatcaatcagctcatatctacttgacatcgccctctttcctctggcgatttcagctcttctctgattctctgttcactagaaaaatccccaggaaatcccgcaatcttctgtaaacttgatgaactctttgtaacattccatagcttctgttggtcgagtaaaatgatgatttaaaattgtttaggtttttaaacatcactcaaacacgaccaatatactcgatctctaggacatcagtagagtaaaagttttgaatttttactctaccttcatgttactcctttcttcctgag

SEQ ID NO: 15475 - DNA, 1072 bp, Arabidopsis thaliana landsberg
ctgatactacttatgatctgttccaaatgtcgggcttactcataactcgaatattgataattaataccttaacgtacaagagcaggacagtaagacttctttaaacatatagtatacaatataattaagtatagaagtctatagattttcccttttaaataaagaaagatcatttaattcaccctaatgactctccttattaaagaaactcttcttcttcttccttgcttctcttgctcctcctcctccattgatactctaaaataaacttataaatagcatgcgtgaatgtcccgagaaaggtaaaactaaatcaacatatatacatctatttacgatctttttgattgataaatcaaatcggtggtggtgaaaatgattggaaacaacagggaaggatttggagagtactacgagaccgtcaagaagataaagaaagatccagccttcgagacaacgacggatcatgccgtgatgggaatcaggagacatgtggcggtgcctccggggacaacgttgaacaccgtaacaccatgcgccgcttgtaagctcctccgccgtcgttgtgcggaggagtgtcctttctcgccttacttctcgccgcatgaacctcacaagttcgctgccgttcataaagtctttggtgcaagcaacgtctccaagatgcttctggtacacatattttctacattaatgaatatttattttcttttcttagttaaggtttcttaatttgattactcttttgatatcgtatttgattaatctgaatatatagttgaacggatctaccatttttgatatttgactctttccaaatatattcaaaacatatatttatcccatttgttatagtcgaggtggtttatctaactagtataggtagaaattcattatcctaggatgcacatacatactaagattgagtattggtaagttatttacttttcgtacataatatttgattgagctatatgtatattaacttatggaataagaaaatgttgtaggaagtgggagagagccaaagaggagacgcagcaaatagtttagtatacgaagcaaacctaag

SEQ ID NO: 15476 - DNA, 591 bp, Arabidopsis thaliana landsberg
  unsure (1)..(591): unsure at all n locations
cttcaggatgactgttaatacaactctcttgtttatgacataactcagcacctctatttatatgaaaactctagtcctaatcctactagaaaaacatatattaagataactcctaaagagatttgagattatcacttcctaaaccataactcggttaggatctaaaccataactcggtttagtattactttcttcttaagctttattcgagcttaatccttcaagctaaatccaacacgggatacaaacgattccgaggccagtgggcacggaaacatggtgcacaaataagagtgaaaacacaagttctttagaaactttaaacaatgtaaaaaacaatgtaaagatatatttatttatttttcttcctctaaaccttttttttctctctccctctaaaccttttttttgaggcggcgatgatggttgtttctattcagatttgatatggttatttttctattgttgttgtttgatctcaaggagagatcttcggttgttttcacggtcattcaaggttttgatttatcttttgtaataaggaatctctttcaaacgagagnntgtgttcatttggagaaaggtagatct

SEQ ID NO: 15477 - DNA, 3280 bp, Arabidopsis thaliana landsberg
  unsure (1)..(3280): unsure at all n locations
actatttggtgggcttttgtaatatcagaatttatgccaaattgaaccggaataaaaaattggttaagttcagtttgaaactcggtttgttttgtttggttataggtttaaactcaatttcaaattgggaaatgagactttttcttccacaaatctctttcccaaaggctgaatcataatcacatccattttcttatggaccaaagggggagaagacttcaggaggggttggagatcaaagctcatgttgcagcctattttgaagagataactggctgcacggatatgccacattccccttgtattgttgcgcagcttgtagaccttatttctttttgctgctcagagttgcaaaaggaggtctcagaggaatagatcatttcgacggttttttccttgcctcaaataagtgtccagggcgtgatggatattatgttgaattcttcagaccggcttggagtattgtttgttcagatgttatattggatgtgaaagagttctttaggaatggacggctcctaaaaggttttaactccaccaaaatccctcttactcgcaaatttcatgaggcttgtaacctttatgactatagaccgattataagattaatttataagattgtttataattagctgctgcaacttggtttataagattgtttcgaagatcattgcaaactgataacacggctttttagcccgtttttagctatttttttcttatgtttcagagagcatctggtgccattttagagccaataagaggagaaacacgtattctatgtgtcaataggttttaagagttttgaagctaaaagtatcaaaaggcgatcattctagtacttcagaagtttagcatccgaccgagaccttccctatctgggaaacgtgaattttcggtatgaatggaaagctagaagaatcaagattaacgtcaaagtcgaatcgaagcaatccatgaagccgtttggaagatatgacccaaagagtgaagacatgtcctacaatcgcggttatgaaaatgatcaattttgaaaccgccggtcaaagtgacttgaatccgggcgtcccctcgagtctttcaccaaccactagagcgcacaactacaccttcccttcctcttgccgccgacttccagcaaccctaagaagcccaagagctcggcctatcacttactaatcaacggaaagatgtttctaccctttgacctaatgaagccctataaatacaagtttaggggaaaccctagaagaccacctacggaaaaggctgcctcatgcgcctcttaccgcccccaaagtcgtcctcctcttgttcttctttagatctttcttttctcttcaattctctattctctacttgtaaaaggaagaagaatatcaagctttggatttccaaagaagatctctaaacccttttctatatatttatcaaaagatttatcaagctttggatttatcaattctcgtatgttcgggaatttggaagtaaacaaacctagccatgttatcacctagattgagatgtataccctattattgaaccatgatgcccggagaaaaccctctatgacctagcatttcgttttacttattttgcaccgctcttcttattgacatttactttattgccttttcattagtttccttttattgctttcttaccttattgctttctttanttattttcactgcatacaacaaccccactcttttctttgtcttgatccaagttacttaacttgaattcttccttgtagctacactccttgtggattcgatcctcaaaaactactctgatatactatgcacttgcagtagccgtgtggtctttcaggtaaaaacctgaggcgaaataaaacacgcatcaaggtttttggcgccgttgccggggagagattgttgtttccacaagtctgagaactagagtgaactctaggacactttgcttttaatttttgtttttgtttttctttgttttaggaagcttgaaggatgaattcgagaaatttttccaatagctattacccaaatgtaaatcatgggtcaaaccgcggatcacatttctcaactgaccgctacacgcctaatgcatcccaaatgcatggcgagccttggcagtcttgctcgtctaatggaggagcttatcggaccgatcattactctaatgatcactctgccgccttcattgagaatcggctgcagctaaccgctcggttagcccattccaccactgcgtcccatctcctggagatcaacacatgggaggacctcactcttctcatccttatgaagttgcccgacatgaagatttcggctatgaccaaggatacttgcaagaggtgattagtgtagatgttcatccgaacaactatacttaccaaaccaatgagtcctaccaagccgccgagctagaagataaaatcattggtctcatccgaaacttcgttgatgaccatcaagaagacatgaggaggatcaactcaaggatgacggagatgagagccgaatttggagagaagtttgacaacctcaccattcgactcgagaacatgggggaggcgcttgttgagatcaacaacactctccttaatcaccaagaggatattcaagaccaaaacactagaatggtcaatgtgggtttaaccgttgataccgttgagagccttctagattggaagattgaggagctagagaagaaactcactaactcaaatgagtctttggattggagaagcaaccaatcttgccaagaagaagatgggtttcctaaggcccaagctctttatgaagaggaaacgaaaaaggaaatcagattcctagtggaaaagggaaaagacctagtttcctattccgaaaaaggaaatcccgaccctataaaatctttaagggtttcgattcctttagtttctcttcaagacaaagtcgatcaagaagagggtttagaaaaagaagaaaccgcctctttcgatgaagactctatggccgaacacaaccctagagaagaaggttccgaaaccgaaagagaagaaggttaccttgtgagtcaagaaaaccaaatcgaagaactttcagaagaagatgacgaactcaccaacatctctagtgaagaaagagaagacgaagagctcaaggatgtccactcttgcatgacaatccgactacctagcggggggatatcgcaaaccctagcttcgggcaactcatgtccatagaagaagctaaacctaggagaagtttggatcctattcaagccggtaaggacttgatgcaccagaaga

SEQ ID NO: 15478 - DNA, 2946 bp, Arabidopsis thaliana landsberg
  unsure (1)..(2946): unsure at all n locations
agtgtaggaagaatagaagaatctattacttttctctgccactcacatgtgtagctagtgggccttttagctgtttaataatataaaagaaaaagaagccagcttctattgtcttaaacttttgagtcatattttgtggtaattctttaatacaggaccacgtcaaactctgctgcttccacagaattagcaaacgacagatctgagaaatggaagaaaagtttagaaacttaatcgaggtatggatctctgctttaatctctctatcttactgttattacatatcgtctaaactctccaaaggtgttcttcgtctcctctctattcttccagtctgcattctgtttcttgttcttcctctgttcctctcttgtgtgcacttttgcgccatttcagttctttttctttcatggcttgcaaactttaagcttcttctatttgcctttgatgagggacctttgttcccacttcctccaaaactctcccgtttcatctgcttcgcttgtttacccatcaaaatcagacaagacccttctccaaatgcgataccaaatcttcatcctaaacctatgcctaaatgggttttggctgttaaaattttggtcttgggcgtcttgttacatgtttatgaatacagggatggtttgcctcggtttgttgtcttggctctctattgtctccatatttaccttgaggtagaacttgtcttggtctttgttggagccgtggtatctactcttcttgggtgtaacatcgagccggtgttcaatgagccctacctagctacctctctacaagacttctggagccgcagatggaacctcatggtttcagccgtcctacgctcaaccgttcacattccggttcagcgttttttcaaacgcatactcagtccagacggggctatgtttgctggggtcatggcattgttctttgtctcaggcttgatgcatgagctgctctacttttacatgatccgtaagcctccaacttgggaagtcacttgtttctttgtgttgcatggtgctgccacagccactgagatagcggtgaagagaacacaatggttgaggccaccgcaccggcctgtctctggtcttgtagttctgacgtttgtgagtgtgacgggcgtttggctattcctcgctcaagtgctgagaaacanatgtccatgagaaagcgattggagaatgtttattggttcttgacctagccaagttattcacttcttcatgattctttattaaaggcaaagagcggtagcagagcaaccaaactttgtttctcttcattgtttgaaaacgtatatagaagtgtgagacacgtcgtctagtgtgaaacattcttgacatgctattaaattgaatcaagctcaacaaattcaataaatatggcgtaaatgttttctaagttctaacaaatgatgaaatatgaacatcttactttgtatattattaatgcaatatttgttagaagaattttaaaataaaacaaactctgccaaatctataatcttactttaatcatgccgcgtcgtttgtctggatttgtcatacgaacattccgaatctatttggatttcttgattttataatgtaaaagaaaatgtaatatggagttttttctaagattcatttatcttttacttgcgaattgaaaatctggtaaatacatatatgttatttccaaatcattaaataattgaataatacaagtttaaaaaataaaaaaaatgaaagtacatgagacaataaaccctctaactttgaagttctatccttttacctctttgaaaaaaatagtttttgaatgatccaaaataaaaatgacgcaaacttgacaaattagaaacgtattaccagttatggtttttggcattattcatgttcttctggttgtagataacattatttaagtcgcatcattatgacacagttagcaaccaacagaaccaagagagaaaagatggaagaagagttgagaaacctaatcaaggtttggatctctgccttaatctccatatcttactgttactacatctcatcaaaaatctccaaaggtgttcttcgtctcctctctcttcttcccattttcatcatctttcttcttcttcctctcttcttctcttctgtccacttctgcgtcatctcaggtttcttcttcacatggctcgcaaatttcaagctctttctctttgctttcgatcaagaacctttaagcccacttccctcaaatctcacccgtttcttctgcttcgcttgtttccccatcaaaatcaataaaaacccttcttcaaatcgaatccacaacaaacctatgtctaaatgggtccttgctttcaaacttttgatcttttccttcttattacatgtgtatagaaacaactatgattccggtttatcacggttcgctttcttggctctctttaccattcatgtttacctcgaggcagaacttatcttagccttcgtcggtgccttgatgtctatgcttcttggttgtgaaatggaaccggtattcaatgatccttacttagccacttctttacaagagttttggagccgtagatggaacctcatggtcccagccgtactccgtccagccgtccacataccggttcagcgattttgtgcaccgttactcggtctacaccgggctttttacgctggaatgttagccacgtttattgtctctggtttaatgcatgagctgatttacttttatgtgatccgcaaatctccaacttgggaagtcacttgcttctttcttttgcatggagttgtaacttgcctagagatagcgatgaagaggatgcggtggcttctacgccacatcgggcggtctcgggtcttgcgactacgttggttttggtcgttacagctggttggttgatttaccctcacatgttgagtactgacgtcacaagagagtgataagtgaatgttt

SEQ ID NO: 15479 - DNA, 1306 bp, Arabidopsis thaliana landsberg
gtacctgtacgtcatgtacgtgacgaaagccatttctgcaacaaaccatttctcactttcatctcaaccataggtatcgctttcctctgcccttgtgcatttcaaacaatatcatttgctttatctctgcaattatatatgtgttggatataaccaaaaaacctagacctaccacttcgctaaggtaggtctgtccgtgagttgtctgtgattagatgtttttattgttcaatattgactcttctttcttttatataatgaataatgtaaaaaatttcctaatattcgtctaccttataaattagaagcacaacactctctcctcttcacaaatctcacatcctcactcctcagctcctcaaatcagaatgaatcaatccgcgcaaaattacttttccggtaattatcttcaattgttttctaaaatcatgatcaatgtctaacgtataatcatgatgaacaataattctttactcaccaactagataattttttttttttttggcacagtgcaaaaaccttcagagacttcatccgggccgtacccaagtccgccaccaattggttatccgactagagatgcggtggtgggtgatcctccggcagcagcagtggagacaaactccaagggcgtcaacctcgaaggcataatggattgtatcttctgctgcggcctatgctccagcatctgtctatcagagtaaatcagcatgatgagacagaagtcgttgcccaaacctgaaaaacaacacgtgatagaaaatctatatatatatatatatatatatatgttatagtagtcgtttctatggatttccacgcattttaaagtttatttgtttcactgtttaaaatgaatcatttgcttcgtgtattacatcactatatacataacagaaattaaaaaccaaatagctagtcataactctttactactcaaaggaaactgtgttttagtgttcttaattacatcttgtttctgaccaacagtgaatgatccttgcatgggactcattaacttcaaaattaacgatttcatacaaattattgttgtaagaaatagataaaaaaaatgtttgacgatagtgaggaattaaggatggttgtgtttcgctttaaagttttaagtgaaccaaacggatgtgcgcacagttcgatttacagttttaagtggttgtgactttatccaaatataattattacgtgaaaaatgttttttttttcaatcaccaatcaatagaaaacacatgaaaatattatccagcgggataataatagacgagctagatttggtatttttatgaat

SEQ ID NO: 15480 - DNA, 554 bp, Arabidopsis thaliana landsberg
aaaaacataagaacttagaggtgccgggacttcaaacaggatatcttaagatttttctgacaacctaattaaatacgggaacaggggtaaagttcaactacaaacccttttgcatgcatcgttggaaggatggaaagtgattcaaccgcaatgcaagctaccatttccgaggacattctgcaaagcaaaaagggggagaagaattgttagggaagtcgattttttaaaagcaaaatgttactcagtatggacttatgtattttttttaaaacagggagtaacaccacatttcaagtcacaattccaaaagaatccaaattaacttaggatactcatgtatggaaacaacgctaattgaaaaagagacaagagctccccaaggatgtgtaatggagactcacgcttgccctgaagtattccataaatcccataagctaggcccaagcatgttcataacctgaggccaaaacatagaagagaggatctaacttcaatgatacagacaggagaaaaaaacagaaataggagaaagggggaatccagtaccatgacat

SEQ ID NO: 15481 - DNA, 579 bp, Arabidopsis thaliana landsberg
ggtacactttttgctttacatgtactatacgagaccgcgtttatacgtttgtcattgactcaggtagttgtaaaaacgttattgctgaagaagcagttcgcaagctagggttatcttttgagaagcaccctactctatactccatgacatggctgcaggatggagtttcatttcgtgtttctcatcgtttcctagtaccattctccataggagaattttacaaagatatgacttattttgatgtggctcctatgaacgttagccatttaattttgggaagaccatgggagtatgatcgcaaaatcattcatgatggtgctgccaacacttatgagttcctgtgggaaactcacaaaatcattctcctaccaactctggatattccattaggtccccaatcaccatcttctccgacatgcaaaccgacgctaccaccggttctcaaccgacaggtcacattcaagcacccgtgttgtgttctttttctactttcgagaaggtactccaacaggaggggcttgcgatggctatgatagcatcatcttccaagcgcttgctcacaaagcgcaacatgttgat

SEQ ID NO: 15482 - DNA, 3617 bp, Arabidopsis thaliana landsberg
ctcccctgtctaggtcaattcccgttgttaaaatgttgtttttagatatttgttatctaaacctcggttactatgcgtagtattgggctgttccatccgtttcacacattgatatttgtctgagctcgtctgtgatgaacttctgaacccaatatacttgttgaaaacaacatttctttcatctcctctgtcttgtcttgcactagacatagataacattttgaattttgcagcagaattcttcattaactctgcgattgtaactttacaaagtaaccatttggtagatggataccatgtaatatggttatcgaaaatagtctaactttgtgtacttaatctgtaatgttactgaacttattattgtagttgttattatatctttgttaacaacatctgagaaaatgctggttttgtttatgctatgatagataccgagcaatcacaagcgcttattacagaggagctgttggtgctttgcttatttacgacgtgacaaggcacgcaacatttgagaatgcagcaagatggctaagggaactaagaggacacacagacccaaacatagtggtgatgcttatagggaacaagtgcgatctgcgtcacttggtggcagtcaaaacagaagaggctaaagcctttgctgagagagaatccctctatttcatggagacttcagctctagacgcaaccaatgttgaaaacgcattcacggaagtgctcactcagatccacaagatagtgagcaaaagaagtgttgatggaggaggagagtcggctgatttaccgggaaaaggagagacgataaacgttaaagaagacggatcggttcttaagagaatgggttgctgctctaactagagtggggggattgtagatttggcttgatttggttagggtgagacaacaaatgataatctctttgggtcttgcaatcaaaaaagaaataagaaacgattacttttaaaatcatgtgtatgctttggtaactttggcctgtaaggtcctttaaaatttaagtacatgattggtaatttgtttttcaacactcccaccacttggtaatttgtaaacttgtaataaactgaagaaatgcaaatcatcacctacgtaacatttggaaaatagatcctagcgacttttaatttaagaggatgattatttatccctctagtcttttgtgttgagagaagaaaacaaaaaaacatctgtagctaatcttttggacatgacatggtttaatattatcacctcgtttttcttttgtctctacgtatctgtcagaattgttttacagacaaaaacatatacaaaaatacacgaggaacagtgtctctctccactctccaggctaaggaataaaaaaaaaatagacgcaattatcagcatctgatttctcaaaaagctgaatatgactttactacgggtatagaagctgataatagtcgtggttaatatactgttgaacctgtcaactatcaaataaaagtagtaaacctgcttttctcctctttctcttcagacatgcacagtttttaactgttttgtaatcctgtgctcatttgtcgtctcacatgctcaggtattagcctgttgattagctccattgaagctccacctaactgtttccacatccaaagaacaaattgggttatgttgaagttccactaaagaaacatcatcctttgctattgatttttacctcttgtttgaaattgaacaatggcggtaatggacgaccatttggaagacgggcgtttggctctcggagttcattgaaaaacggatgagcacatgcttcgagctaaaaatagacagagaacaagacaaatgttaaaatgaatcttagctttatccaacacttggaagattcaaaaagagttatcactgacgactactttcgattataaaaaaaagagggagatactgaccgcagtgcagcgtagacttggtgaatattgaagaagccgagatgcaaggtctattgcttctggaggcatccgtttatgaaaaacctggaggtcaagggtacagtatatggttgatgctataaatgaatcgcttcaatgtatactgtgtaggtaatgagttcagtaattgcttaaccaggaacaaaaggtgagatgaactaccttgtgccaagggtgagctttgatttgtgggaacctaaaatctgtgtagttcgggttcatacatcgaatttcttcacgagttggagtaccaagaacctaaaacaaggtagcaagtgtacttatggtaacatatttactagattctagtctaataccaaagacaaaaaagagcacatccattagtctaataaaggagacttcacctttatgatctccacaagctgatcaactgaattttctcctggaaataacggctgtagagagagagagagactggcttaatataacattgggtgcgcactttttgcattttgcagagactctttatttaacaaggtaattaacgcataaaaatccacactaacctggccaagaagaagctctgccagtacacaaccagcagaccatatatctatggatgctgtatactctgtggcgccaaagatgagttctggagcacgataataacgggagcagatatatgatatgtttggttcacctttgacctaatagtgaattaccaaaaatttaaaagggttaccaaaacagagaacatgctgctcgcacttaatggtataactcacacttatatggtagctcagtgaactagatgcgtagatacataaccaagcggaaaacacacaaaaaaggtgagataatgaaaagataacacccttaccaatacttttgcacttccaaaatcacacagcttaacctgatgggtcaagggatcaacctacagtatgcaccagaaagtgagatccagaaatagtcaagattacaaaccacatggcatgctagataacgtaccaagagattttgtggtttcacatctctgtggcaaacaccgggaacagtatggatgtaagccaaacctctaaagatctgcacaatagatatttcaaatcagtttcagagtacattctaataaattataatatttgtgagaactaactgcaaataacagtacatacttgatatgtgtaaagtttgacatagaaaattggcatcctctgattagaactagtatagtgcctcaaaacccggtataaagtctcaggtacatactccataacaaggttgaggaagagctcatctctactcgttgtagagaagaaacagtgcttcaaggagatgacatttgggtgatccattggtcgcattagttgcaactcacggtttttatagcgtcgatcttgcaagacctttttaatggctactgattctccagtttccaagcatttcgcctaaaatcgtaaatttcagacttgatcagaaagaaagaagagaatttatgacctggaaccgctagtacaaagaagcacaaaatacctgaaaaacaatcccgaatgaacctgttccaacaacccgctcagccatgtaactaatggtctgtaggggacagaatgaagatcatgtaagggagagatgaattaatttgacttgaaaaagggttttaattgggaaagtaacacttactggagg

SEQ ID NO: 15483 - DNA, 1713 bp, Arabidopsis thaliana landsberg
  unsure (1)..(1713): unsure at all n locations
agcgaagcacaacacaaagcttgaattaattttgccaatatttagaaaatatcatattatttgtaaacttctgaaattggtcactggtcaatcatcctcattctgtatattcgacaaagttaaaaaaatttgatttgcaaacagtttatcctctgtaactttgaacatgtgaactgaatgtaacagtcacgtagaaacttacaaaattgtctatacaagtttggtatattggattagcatgtgaactgcgcctataagtggacggtgtttgttgtgttactgaaactcgtcaacatctgcagcttgcagctgagaggagaacaacttgtttatcaattacgagtgatgtaatgttgttataggatgagtatagtacgacgtgtattgatgccaaaacaagtcactaccagtaattttagattctatttttttttaagaaaaaacaagtggaagtagaagtgaaaatgtttaatttttcaaaagtggactttcttttggactaaggtgatggcactggaggcacaagttactttgcaaaagcataaaaccaatgtcaatgaaaaaataacaaaaccaaaaaaagtccacgagtcggtctagttgcggatatatttgactcagtggattttcgtcgctcagaactctatagattccttccaaagatccgataacgtgtctaccatatcatcacgaacaacatgctagatccaactgctgccacagcgacgagtgtatatgcagcatacttcacggcctcatattttgttgtttcgaactcagctttcaactcattaaaaccctgaaatacacaaaacatatatatatatatatatatatatatatattattagttcttctgatttccgatttaaggagtaacctcaaatcacgagtgtaattaaaatgaatggttagaggaagagaaaagctataccatctcaactttgtttacgtggatatcatgatcacacctgttttaagtgaataggtcttagtttaattaatgggacaaaacaaaaattaaaaacgagtcaagttaatacctcttctctgcttgcattgtagcaatatccgctcgcaccttattaatatcggctcgcatttttcgaacctcttctgcaacactagttgattgatattcctacacaaaaatacaaagaagcacactaattaggttggaaagaacaaatcttctaacattttttataagtgagaaaactgagtacattgatccgtcatgttcctgtagtagtagtactaataattaacgaaagtttggaaaagaagagttgcctcggatttggcgatgtcggctttcaccttctccaccaccgactccaagccactggtgatggcgccggttaatgcctccgcttgtgttgagggtacgttgatcgcctctagagccttaaccattcctaatttgtcgacatggttcccggaagaaagtgaacgataactcagacctcttccggttcttacgatactaatcgtgcnnnnnnnnnnnnnnnnnntgactctagcgcctggaaagagtgaacaatcgaaatcaatttatttgttaacggatgtttgaagaaactaacaaacgattggggaaacgctttattatgtgttctttgtctcaagaaacgatacaatatataaaacttaactttatgtttaacctaattagaatggaaacagataaacaataagtaaatattcttaaac

SEQ ID NO: 15484 - DNA, 3384 bp, Arabidopsis thaliana landsberg
  unsure (1)..(3384): unsure at all n locations
tctgaaacgtggtctgatatggctcttcatatggaatcatccctaaaatgcagaacaatagagagtgaataaaatatgcttatcctaagtggaaggatccacaaagcatttagaatcatagtaaaagaaattaaaacctgaatcacaaagaggatcctccatatttcggcgataaggttgaagctgagattcctgaatcaaagttttccaatgccaattagtgattacattataagtagaaccactcgaaggggaagaaaagatgagctccttacctggtcaaggacattaccatatgtgtcctgaattaatggacgataatcccccaggaagaactgcaagatgcacagagcagatataagaaaattctatttttgcatatgatattgatgaagccagctagcttagaggaggtaactggggcaagtagaactaaaatatttctataatgtttagtaggaatgtatgcatgtgaatgtttcctatatcttctctacggttttattggtttaaaccctatacacagagatctttaatgtttattgaatgttttgatagaaaggagatattgtcctctccgattaacggaattagttgaagtacagtaatgaagctttctccacaattgaagttatattggtacctgatcatatttagcgtctttttgagaatccccttggccagtacttaatatgtacaattggcccacatcatctgaaagtataattgaagttccatccctacattatgaagatacagattagcaatctgatggagtaggagcataacgagtacagcccaaaacctatttgcttacggtgaaaacttcccatcaaccaacttgtagtgtgaaatgtcgtatatttgtataggtatgccttcccatatctagaggaagagaacaagtgctttagtaatatagatgctgaagaagaagggtttagacagtgaggaaggtaaaacttacatcccacactattgtttttccatcatagccagcactcatagctatacgaggattgaatggatggacgtccataacatatgtctacaatcaaaaagtaacatgttgataacggtaatacaaggaacaaagaggaaatcatatctggaacactaaaacagaaaccagactaactttactagtcatactttacagactataacaaggcataaatgacattaagtagagttgggacttgggagtgtttccagaaaacgaaaagaaattaacttatggttgaaataatgcagagcattatggtcttcttaacagaattatgatttttcgttattttaggcatgggcagaaatttcttgctttttcttctttaaagtacacaggtcaaaagtttttgcaattcccaaacctgccttaagagagaaagagaaatatacagaagggatcaagcactcacagatgctgtatgaccagtcaaagaatgtaccaagctaccatcagaggcattccacacgcatattctacaatctttaacatacaaattgattctagttagaaagagtgcagcgttctagaaatcgacctggataaactcatagccattaagagtgtcaaaatagtattacccataatagcggcaaggacaaaacgattatccagactccaagcaatcatgttaaccccacggggtgtaggtaggatcctttgacgtggcccccctctaggaggttgagggggcatgggcggaggtggaaccttgagatgatatgctcgtgtccatcggcagctttttccctgaaaggcacaagtaaagatctgattttctgctcctatgaaaatatacaatatgtaaataaactattaaagtcgcagttatcttagcaaaactgaatgttacatgagatctccgtaatcttgggatccaaatgattgcactaccatcacgagagcatgtaactatgttatcatgacaaaacctagaaaagacaccatgtcaaaaacaaaaaaaaacattagaaaaaggtgaaaagttaatagtagttgcatgattatctagttgcagcagagaacacacaccaggaattcttaaattttggaacattctcgtcttttgagtagtcagttacagaaaatttagaccccgcagcacaaccactggaaagcacaacagcaaatgaataggatcaagacaattaggatctcatgagaaaagtaatttcaaaagtgaatagccaacctgaactgaacataattannnnnnnnnnnnnnnnnnnnnnnnnnnnccatctcatgatttggctgctctggatcatcagtattggtcttattagcactccaaacctgtaaccaaagaaaacaccttttgtaaattaagtgaatcctaatttggcaaaaaccttatgtggatttgcaatatttgactcaaaccaagatgcagtcagaaaacatttttcagtaccgagtatactctagcaagagtgtcagaactgccagtgacaaagacagatccactagcattgaatgcacagcaaaagatttggtgactctgctgagcattactagaagaagggccactgttctttcctggaataggattcccaagtcagtcctacagcttccaataagtcaacgcaaaataatttaactatgaacgtaaagcaatcaccatcaggactaggaggcctatgacatttatccggggagcaaattgggctccccgggcatcccatatcctacatgtaccatcatcagacgatctgcagagatataacaaaggctcagcttataaagataccaatgaaataaagcaccttttccaaacacacaaatagaatctccagacaacataaagacacgagttatgaaatagcagagatagaatccacagcttaaataataaattccatctgagggtgtatgaatcagagtgcatttaactttgcagcttgtgaccacaaggttagttgattcaaaatcacaaaacaataacataggcaaacaccaaaccaatagtgtgaaaacaagtgacaaaacataatgatttattaagagggaaaataatgcaacatttagcgtacatgatgccaaaaaagaaggaagaattcttacgagagaagctggtacggggatccaggtctgggactaaaggcaatagcagtaacagctccagtatgtccacggagaacagaaactggtaagccatctggcaatcgccactacaaaaatccagatgggtgaagtcatcaagaggctaatatgtggaagtcaatcatatacagaggacgatacaagaaacttacaacgcggatcacacaatcatttgatgcggatgctatgaaaatgttgatcgaactcacagcatgatcagttatgtcacccttacaaatgcaccaaaaacaattttaagcaccacttaaagatac

SEQ ID NO: 15485 - DNA, 2475 bp, Arabidopsis thaliana landsberg
  unsure (1)..(2475): unsure at all n locations
gatattcaagcgtatatgtatatatatgtatatatataaatatagatatattagatttagatagattcaagataaaaccacaatatcattaaaaaaaatacaatatatttttagttgtttcacacatcaatatttgcattttcatttgctttttcaagtatattactctcttcatcccatgaagatatgttttctagatattatttttttgtcattaaggtaaaagttttgggtttccaatgtaaaaccgttacctattttacctttattaaaccattaagtaatattatactccctatgattttttaaaaattaattttctagaaaaaacacacatattaaaatatatattaaaaggtgattatatatatatatatatatatatatataagttttatgatttacatttcaatattcgaagccaatgattttcaattatttttcttgaagtttacaatttatctatgataactaataaatattgcatagaaaatctaaaagaatcaaattttttaaaacaacttatctttgtgggacgaagagaatattattttcttttaaaaaaagttttgtattgttaaatctaaacatatacatcaaactttaaaaatcaaagcaaaaaaagaatatctctccttttgcatgcttttgacatattgaatttaatagctaattttcttaattaagatgttaaacttatggattcatgatttgaacaaaactgaaaaaagtatatggaagcgttggtgagattcatacctatcaaaatgaacaaaaggatcaccaaccgaatagtaaaaccaactactgtattttttcttcttctttcttaatttctctctttattaaaaatttgttaattatatcataatcttaactgttgtatataaagtatttcttcctaaaatatacaaggtgttccgcaacaaatgccaataaaaatggtttcaaattaaaaagaaagaccaaaactcatatgaacctcaaaaacatagtatgctacttttagttaaaataaactntctcatttcaagttctattttttttgtcattcgcttagttattaatgctcaaaaagccatttctgagaaatgttgtttacataagtgacatgaagcggttcagtgcaaactttccgtgcaaattatccgtttttacatttgcacattacgagaaattaaagataaagagaaggttgtgaattcttcattgtaactaagtagttcctctagataaactaagaccgccgaccttttcggttgaagaagataccatcttcaccaaatctaaaaagtctgtaaaaaatgctacatcttagttgtcgaaaccaatcatacacttcattgccaagagtatagctgactttcaatattatgttccttaatttaggtttatgtccagaaaggaagaaaatgtcaatttatttaatttttattttaaaaaaatctttgaagaagatgctgaaaattatttattctaatatggaaggaaacaatatttccaatttacaatatgaaattttttaaagaaggtttcctatttaattcaattgctttttgaagtaaattctgtttcaaatttaagtctaaatttgtacttctcaattaatacaagtaagttatatatagactatagagtatagaggaaaagatataaagacaacctcatttcttggcgtgttcaacctctttagtctttccaaagcgttactacacataaaagccttttatcttaagcatacgcttaaccaatatcacacataaactgaatacattaatgtaaatatgcatgtatatattaaagttgttcttatgattttttcaacaaagttgatttcataaaacggattgatgatgtatctaagtcggagaatgcagagcggaggttcttcggtgtatcgacagggccatgcggaagtcttacaaatatataacaaagttgagaggaaaacatctatgaatccatgtccggcgattattcgatttggaagagactatcataaccaaatatgtccacaaggtctcaagttatcaaatccgcttaatgccgggagatactttagtaatgtttccaatgactccaagatgcaaccttctcctccaaaccagtggtttaattttccctcttggtactcctctttatctctctgtctcaatccctctaatatacgtcgaataaaacaatatgtaccatgcaaggttatgatatacgtacacaccaatttgcattagctaattcaattcataaactaaagtttggagaataactggcaggggaagatgggttataggttctgcgatatccttagtgttatctttctggaacaacaaaaggattcaaaaactaaaacggatcgaaggtaaagaacctatcatcatctcatcgatcttctctacaagactacaatattactcatagctcttttaatgtttaacaatcatagctcttttatggacttgttttttttattattat

SEQ ID NO: 15486 - DNA, 490 bp, Arabidopsis thaliana landsberg
  unsure (1)..(490): unsure at all n locations
cgatgatgtacttctcatgccttgacaannnnnnnnnnnnnnnnnnnntacttcttttcctggtgttgttccactagactgagtttttttggagttcggtgtatttgggaagtttccaaatttgagtggctcattccgattgctttgaggatcggattggggaggctttgggttatctgggtcactagattttggaggattagattcagcaccaagagattccgaatcagataatttacttgaactcaccaatccatcgccttcagcttcaaaggcttgcaagacattcaagtcgcacatcaaaagcctccacatagcttcaactgttgatagggacggcctgacctccttaataagacttatcatttctaccaacgtataggaaacaagctgttgtaaatcctcaaacacatagtctcctgaaccagcaccttcgtctccagtcttgagagcactcaaggtgttattgacaatgtttgacaaaagatta

SEQ ID NO: 15487 - DNA, 2300 bp, Arabidopsis thaliana landsberg
tgttttgatgtgtaatcctcatcattaagccgtttctgcatgttttgggcttcctctgtttgttctttagctacctaataataacaaaatggttcattagctgaaagctcaggttggtcacaaaacgaagatgcagcgggaattcaaacacatacctgaatctgagctttaagattgtccagttcggattcctgacacaagtaagcaaaagaatgaaaattagattaccgaaatagtgaacttgctaagtgcaagaaaagtattttgtacctgttcacgtagtgcatctttaagctggttcacaagggaacttctacttccttgaacagatttaagtttctcaatacattgtctcaaaaggtattcttcttcttccaattctttcgccaaagattttctcttcgggttgtcttttgctgtagagacacaagttgatttacactagattttgataatcgataatcagtgtaacaggtttttaccagtagagcaggcttcttcaacatctttctccatcttccggattcgtttaactgcagacttacatttattcatctcagcttcttcatttgagttttctgcaacaaccaaatgatatgctgatgctatcttctcagccacaccaccacttgatgctaatttctgcatccaaaagcaaaaaaccgggaaaatgcaatatgactgatattaataggggagaaaagaaaactttggtgtttagtgttttaccgttctggacgattttgactcccgttttgaagatttggatccgcgaggccgctttttgctgatatcaagtggcagaggaacatcttctccaagcattacatctttaagactctttgaacgtgatccaaacactcttctttcttcccatatcttgatctacaaatcacgtaaaccaaatatctcaattagcaattaacttctctattcatgtcttctgtattgcatcacacatctcaagaaccttaaagctcttcatccctaacatcaaacactagactacccccaatacaaaacatgagattgagcattaaccagacaagaacaaaagctccaacgaagaatgaaagaaagagagagagagagagagaaataccacacgtgcgacagcgcttttgccattatcatctccttgagaaacaatgtctttaagagcaccagggagaactttccagaactcttgcacaaactcattaccctgacgcttgctgttctgaagaatatcattagcaaggtacaagagaggcactttctgacctatctgtgtactgtgaaactgtttctcccatgtcgtaacaaccagctcagcttcactacgatggactatacaccactgtgacaaagcttatcccaacaaaacaaatggtcaaggaccaaacaatcaggattgcaatatacaaaagcaaacacatttaagcatacagtaagaggtttaatcaactgaagacacaccaatgtgaatgagctaatccaaaacacagagatgtaatcaattgaggcaatgaattcgaatataaaaaaaggatactttggatggattgctgagtgctgttgagcttagcgaggttatcaatcagtatctcttcactgaacggactactcatcccaaccccaaatcaaatctaaaccctaaagaacgagggaagaagctgaaaccttgaatggtttttacacgaaattacaaggataatcaaacggatattgatacagattggcaaaagcaataatccttctgttctgaatcgacgggaaaacgcggcggcggaggacaattcttacggcggagcgttcataaaccaaaccctagaaaggcgttctctttttctttgtcctaacgccgcctgccattaatttctcctttttcttacttcattttgctatatagccaattgcttttttatcgatctcaattttcattttcccactcgatctttttacatctctggccgtgattcaatcttgggagagaaagaacaaactttcttttgacgctaatacaattttaaatcatatctttcattataacgttttgacttttgacccaacagaatattgattttaggccctatttcgattcaatgggcctattctgtattttttctcctaatgagctgggaggttccttatcaacgaacagctcttttttttattatattactaaaccgctcatatgcttggaggggcaatctcatttttttcaaagtggggaaaaatggggaaatgaatattgggaataccaatccattcaccctaaaatggcccccttataagggggttattatggaaaaaccccc

SEQ ID NO: 15488 - DNA, 2276 bp, Arabidopsis thaliana landsberg
  unsure (1)..(2276): unsure at all n locations
catagctctcgtaacagctgtggaggcaagtgcaacgaaagaggagccagagcccgaaacccccgaacaacctgccccgtacgaacttgaaccgtacaacgactggagaatcccaatcatcgattacatcaaacgagggatcacacctcccgacaagtgggaggccagaaacgcagcgtcgcaggttcatacatggtgtgtacctacgggcaacaaacaaaagacctcatgaaaagcatgcacgagggacaatgtggtagccactacagtggacgtacccccgccctcagaatcaagaagcaaggctacttctggccaacaatgctacccgattgcatagctcactcactcaggtgcgataagtgccaacgacacgcacgtactctacatcaaccacccgaggaaatgtcgtcgatctcatctccttacccgttcatgaagtggtccatggacgtcgtagggcccatggaagcctccagtgggaagaagagactagaaaacctgctggtccccaccgactactctaccaaatggattgaggctaaagtcttccaacaggtaaacgagaaacaagtcgaagatttcctgtgaaaaaatatcgtatgccgacatatgagatcgtcaccgacaacgggactaacctgacctcgggaaaaatcaaagcattctgcgacaagtggaagatccgtcttaccacatctacccccatgttatccacaagggaacgaacaagcagaagccgccaacaaagctatacttagcaacatcaagaaaagacttgattcaaaaaaatcaatgtggttcgacgtgctccacggagttctctgggcctaccgaactacacctcgcaaatcaacgcaagaaacaccgttctccctcgcttatggtttagaactagtaatccctgtcgaaaccatagtaccaagcgtgagaaggaccgccagtcttgctaacccggacttgaacacgcaaatattacaggacaacatggacttcatcgatgaacgcagagatcaggcaatgatccgtgttcaaaactatcaacaagctggcgcccgctactataactctaatatcataattcggagattcgaagtgggagagctcgtcttacgaaaagtgttcagcaacacgagagagctaaacgctggaaaactgggaactaactgggcaggtcccaatcgaatcaccgaggtggtacgtgacgacgtctataagcttgtaaaagttatcaacggagtacctgagttacggccttggaacgccatgcatctcaagaaataccacgaataggtactcaaaaacaatcgaactatgataaggcttgattccttggcagggtacgtaggcagctcctcccaagagcgcagccaccaattcaatcaaatcaaaagggcttaannnnnnnnnnnnnnnnnnnnnnagtcacctccgtaaatgcaattaccatctcaacccttctatctgtaagacaaaattttaacaagggaaacggacatcgcatctctcatcaacgaagatcagctgctcacctgacagttcaatctcccttcagtatcgagcaggtccctgctcgatgaccaaacgccagatcgtcgcttgctttacctccttttgtacttaacaatttcgagataagaacaaaaggaaattttgatactcattatcatatttcgcaaaaaacaatcatttacactatgatttaaaactcattcgtaatcttttgatacctaaagcccaacacccgaacgttggcggatccattttgtgatctcgcttccaaaaagtcgacagtgaactaaaacttataagaacacatcattgcggcttcatcggagctcacctactacaaccaaatctaactctttcgctatcaatgcataacatagtaaccaaagaagaaacgaaggtttcattcgcgacctggcgataccacaagcccacctcccaaaatctggcaggtcccttgtgtgaccgcacttcaacaggttcccaagacaaaacaactcaaactcagtcaaaattttaaccttcgaggaacataccatatcacgtccaaaatgatttggacgcgaaacaagtccaatcattatccggaacatggacaaagcgaggtggtctcgcgccaaaatcaacgaagtgtcaacactcgaacgtaagacaaaaaatacttgttaaaaaggataaaagccttccagtcattcgagtacttaaacgaagaaaggattgaagctttcccaggcaccaagttccaaaggcaataaccgaaagggtaa

SEQ ID NO: 15489 - DNA, 2511 bp, Arabidopsis thaliana landsberg
ccgatgtcgaacatcatagttcactcatatgttagttttcgttggtcttgtgtgttttaagtgggtttaattggggggtgtttattggtaccaaaaaattaaatattcttctaaaatttacgtatctaattaaaagagaaaatatatataataaatcttttaactattggtaatacgtgttaaaacaaatctcaactttataatagagtaaatatcaatgttctttttgttgaccacgcaaaatagacctgaaattagtcaactttaactatactattgtattaactaaatgttaatttttagttatcaatttattattttgagaagataatcaaactgttaactaaaaataaaagtcactttcagtttctataaatccccaaaaatcaattataaacccaaactcttcctcacttcatgtttaaagtttaaaccaaaaaagaaaaaaaaaactcttcaaaatcctgattttggggaagaacatagattcgcaaatcgattcctcttcatcacgcaacatcaacaaaatagtcagtttcgattccttttcttacttagattttttgtttttgtttttgaatatttaaaactattggggcattttcgtgagtaacttaataatttgggccaaaaccgttattttaaaacattacttctctattatgtagtagtcacgagtgattggatcggaccgtgaacgatcgacgaaacttcaaaccttatatgaatagtaatcgtcagatcaacgtatttaataacaaccgtacgatcaaaatgtctgtgaaatctaaccgtcgaatataatccagaaaattgaaatttcaaaacatgtataagagagggaggagcagctctcgcgaagacgaagaagaagaagaaaaaccccaaatttctctgttttttttcgttgggtggttcctcagtggttaccaaatctctcttcttcttcttcgtagaagctaaaacctttcaaaaccctaatttcatctatctatctcaataagtctagatcaaaaattcgaatttcaaaatcccgttttgagttttagtagattcggtttctgggttttcgtagaaacgggattaagggcggattcagatcttgaaatttttgtgtgtttctcaaactgattataaattttgttttttttttattaaatttcgtgtttgaaaaatagggaaaatttctgggtttcttctgagaaattcgaattttttggagatgggagaaggtgaagaaggagacaaattcccgccaaaaacggatgaggttacacaagagtctatgaagtcggcgaggcaactcgattttactggtggttcttccgatgttgagcattcacactctaatcaagcttcttcgatggctgctgcatcaatcccttcaccggttgtgacggttacgcggccaataattaccagtcaggcaccaccgacggtggcgactccgattccaccgccgccacaatctcagggcatcatccttcacgtcccaattagacatccgtaagtttctctcttattcaaaaatttgaacttttgggaagttgatagagatgtgtttctatgttgctgaagtcagatttggggattaaagcatagatctttacattgatttgaaaagattattgaaattgacattttgattttcatagtgaataaggcaaggtttgaatttctagagttgacacttgtttttgtaattgcaggaggcccgaatctccgaattcgatgccaaggcctgctggggaaactagagatggaacccctcagaagaagaaacagtgtaactgtaaacactcacggtgcttgaagctgtaagtctctcatcataccatttgatgacaaaactctttgtttctttgtggacttgttcattgtgaattgaacactgtacaatgtctttttttgatcaggtattgtgaatgttttgcatctggcacttactgtgatggttgcaactgtgtaaattgtttcaacaacgttgaaaatgaacctgcgagacgacaagcggttgaatcaactctggaacggaatccgaatgcttcaggccaaagattgatgatagtccccatggtgaacgaaataacagggtatgtggtttgtgttatgctctttaaactgttggtctaaaggttgttggataagttataaattttgactcgatttgcagcaggaggttggtgacgttgtcatgttagcgagacacaacaaaggctgtcgctgcaagaaatccggatgtcttaagaagtattgtgagtgctttcaagcaaacattctttgttctgagacctgcaaatgcttggattgcaaaaactttgaagggagtgaagttagacaatctctttttcacggtgaacattcccacaacttggcttatcttcaacacgcaaatgctgccataaccgaaactattggttcctctggctttgcatctgcaaaaccaactaagagaaggaaaggtcaggagattttcttcaaccaaggagccggagattcaaccaatcatag

SEQ ID NO: 15490 - DNA, 4798 bp, Arabidopsis thaliana landsberg
cttgcaacgaaacctaaccaggatccaacataggacttgcgctgttgttgaagctcaggggcagaggagggtacagtacacgaacatggctaatcaagaactgatgatggctaatacgatgaatcaacttcaacaacattcaaaccaggtttccatgtatctgtggaaccatggaaacggtgctttctcacaaatcccagtctcagcattggcttcaaaccaaacgcaatctctagctccgattccgcctgaactgatgatttacccgaattcggatgcgggaaattactcggggtctctcggggtacaaggaactgggatcaatgggcttcagaacatgaacatgttaacctataacaacatcaacagcgttaatgatttctcaaaacagtttgaccagaattccagagcggaaagttactctagcttacttggggtacacgaagacggaaacaatgagtttgagaaccctaacatgtccagccgcaacaacttcaatgttcaagactatgcagggttacttgggatgcaaggagctggaactaacgggttgcagagcatgaacatgcatgactacagtaacaacaacagcattaactctaatggtctttcgcatcagtatgttcaatttccaacacaacagccaacatcaggaccgggttttcaatttggatcaaacggaaacaatactaggtctctctaagatctatcacaatctctcttatagctttataatttttggtttttaatatctcctagttatataactaagaagcatatatatttataacttttggttagtgcaattatcagtttgagacagtatatcgatctccaagttttcgattatgtctacttttatttattagtgtaatgtgactaaaagactagtaatgtctcccatgctagtgactcttttcttatactacttcttttttttgttatcctgagattcttttgtttgttatatttaatgctgagaattaagactagtaatgtctcccatgttagtgacacttttcctatacttcctcttttgttattctgagattttttttggtttgttatacttattgccgagaatttgattatacgattaatgtttgatgaataaaaaaaccctaggcaagcttttaagttttaagacgggtaaagtaaaacacaatcagaaattacttaagctaaaaaaatactttagcagctctctccaatcatatgtcctcgcattaaaaagggaaaaaggtcaaagaaatgaaaaatagaaaaaagtacaaaagatccaactggacaataaagtgttgtgttcggcttatttaagaaataatcaacgggtgagattaaaaggattttagtcaacggttggatttaaactgaagagtacttaccttcaagtgggacctattaaccacacagaagcaaaacctaagcgaaagaacgggttttttctttcctcttctttttggggtgcgagtcttttaatttacttctccgaaaaaaaaaccatagaacctagaacttggaaaatttgaagaaccagagctaaacaaactcgttgtcgttctactttctttcaaaaccctagaagaagaagcagcttggttttagggtttggtgatgaagagctctattcgaattcaagtgagttctgtctatcttcttgtctacttctcaattttagggttatataattttatctattaaactctaattaggttcaatttagtttgactttttttcttcccttttgctcaatttaggttctatttgggtttatgtgagacattgtgtggttttatttccagggagaattggtaccagttttagtttcgggttaattcttctcattgtttatctctacttccatgattggtcttcttcacttatgatccaaagatcaatcttttcaattgctcttggattctgagtttaatggataacaagatttgctatgaatggtttcacactactgttggaagatctatagaatgagcaatattgctcgttgagcagagaatatataaaatatataacaaagaaacttgatagattaaaatcaaatccaatttgttgttatttttcagttaggaggtttaagtctagttattattacagtttcttttttacttgtttgctaactttactctatttcataaacttgttatctgcagattttcttttgatgtttggtgcttactagttggggatggaaatgagtggtctgggaagaaaacgtgtttcaaagtgggactctaaggaagacacacaccatcatcattctagcgtaaatgcaaactcggcttcttattaccgcgacaaagagtctgagcctgtccggttcaatgcagagagtaatggtgaagctagggctagaagcagagtttcacagaataacgataacagttatttttctgaacaagatgatactaggcaacagtttgtccgtaggttagtgtttacgagttattacagagattcttatttatatgttcttcagttgttgttacttaacgtctctctctttttattttctttctaggagtggaagtagaagtaatagcaggagtagaagccgtagtagaagcccagtctatagagctagacgagacgcgggatcttatgacagacacaagacgagaacacaagtttctcctacgccaatcagagaattcaataagagaggcagtgatcatttgtttgatcaaagcagaagtgatcattatggttgggaagataacattagaaagccgagggagaccaaatatcacaccgatgatttcagagaagaggcaatgatggaaggtgcaaggtcttctgactataataatactgattatcccgaggataattcgagaataagaaggcgaagaagcgagtttacgggagagaaggaaacacaaagaagggatggtggtgatggtgaaggaggattccacaggagttcgaatattccgtgtaagtttttcgctgcggggacggggttctgtcgtaatggcaagtattgcaggttttctcatcatgttgctgatagaaaacagcctcaagacaacaacaacaacttttatagacaggacaataacaatcatactagtggtcataataaatggaatgatgttgaaagattggacaatggaagagtaggttgaatcgaagtttctcgtgccagtaagaagggagtttctgaatctaaagggaatggtagtagtagctggattgatgacatggagatgtctcctgattggaattatggagtccaagctttaaagaagcctgtgaaggaagaccatagtgttggtattattggtcagagttcacaatctcgagttcttaaagatgatcagaggagtagtggtatgttttcacatggtggcagaactatggctgagaaacctgtagctgcttcacatcagagttacagtaattcagtgaatgttgcgccagttgaaacattcaatcagaatcataatgcattaccgtaccaaagctcactaactgctggaggaagtcaacaagtgctagctgctgctgctacaaatttctcagtaggctccaacttgagcaatcttgagagtggaaaagtttatcaagataatcatcactcaactgtggagaaacctgttttggtccaaaatacagtaagtagggaacaaatcgatcagattactaacatctcagcatctctagcgcagtttcttgcaaatggtcagcccattccacagcttgaacaggcattgcagctgcctctgcattcagaatctgttcaaccaaatcaggctactactcaaagtaatgtagtgagtagtaatccaaatcagctatggggattagggatgagcactggcgctgaaggagtccccgcggttactgcatcaaagataagcaatgtcgaagagattcaagaagtatcgctagatcccaaggaaaacggggacaaaaagactgatgaagctagcaaggaagaagagggtaagaaaactggagaagacactaatgatgctgagaatgtcgtggatgaagatgaagatggtgatgatgatgggagcgacgaagagaacaagaaagagaaagacccgaaaggaatgcgggcgtttaagtttgctttagttgaggttgtaaaagagcttttaaaaccagcttggaaagaaggtaagctgaacaaaaatggttacaaaaacatagtgaagaaggtagttaagaaagtgactggtacaatgcaaagtggaaacgttcctcaaacacaggagaagattgaccattatctatccgcttcgaaaccaaagcttaccaagctcgttcaggttccttcatatacattactcttttgctttgttgaacttaaatcaactgcaaaacatacacatgttgttaactcttgttttgtctctccaggcatatgtcggcaaaatcaagaagacctaatatgaattgtactcccatgttgtcttaatacaattccttatctttccatcatcataaatcttgagagctgcagtgaaaaatggttgttaatctttggaggaagattagaagagcaggtgatgctttgttgtccccattagagagattttgtcccaattcttttttcttctttttcgacataatgtgatatggtccaagtctgataatagaccaagattgcgtttatgtcctttgttttttttatatagaaacttagaaccaatttcagtgatctctttgtgactattatatatgttgaatttgtcttatagcccttttgcttttgttcttctcaacagaacaagttacagaactactaaattcgttcctaaactaaaatgtc

SEQ ID NO: 15491 - DNA, 1971 bp, Arabidopsis thaliana landsberg
  unsure (1)..(1971): unsure at all n locations
agcttctaatatacctatgagccaaaatctaaagtcagatataaaccttgcgccacgagaattcgggagcttgtaataaccagcatgatgacctaaatcgtcgacagtagggccaccctcggcaagtatattcgggaatacgaacttccgttcaacaatccccggtccctccgcagcagtgagaggcaaatcagcgacatcgatcacattnnnnnnnnnnnnnnnnnnaaggtttagctcacggatcagcttctccgcgcgcgtagacggcaagttcgatctctcaaaggtgcgatcattcaagaggaacgatgaagacggtatcgttgaagcgatgaagacgacgaaatgcaggagaaggctgagaaaagttagtttctccatttttggttctttcaactgtgcttctttttttttccttttctgagattgttgtatacaacaatttgggggaggagagaatgtacacgtggcaggaactatcacagaaatatcttccgatacgtgccccagaaagttggggctattttgcgaaatatgagaaatagtgggtgaatctgttacgttacaacaaagataacgtttggagtagtaatcgacggttaggcacgcgagttgaatgtgaagcaaaagatggatgagtgtgggtcccagataatttaaaagtgaaataaaatgttaaaaatattcaacctgccggaatcgaaccagcgacctaaagacttctttggaattacccattacagtcttccgctctaccaactgagctaaggtcggtttgatattaatattaagtttacactatatattaaattaattattacaaaaacacttatgggcctcacgtgaatgtaaaccttacattttatagtgaatgtaatattctacaaggtgtgtttctgattagaaggcccaatcctaaaccactatttgtaaagcacctaaaagcccattcggctaaaaaacgaagatgactcaagaaattaaggaaccgtcgttgtagatacacaatgtttgggttgacttgtatttcattcatttagtctggtttttgtttggtttaatttagtcagcaattttggttcaaatctcaatttgcagagctaaaaagttgacgacttttgcatctgccgtgcgagaaacaccaactccgactttgggctaaatttgtcaaagagttccaaacgaattggcaataaacggtagctccatagtcagacacgtgtcaacaagattgtccaactctccacgtggcgccacgtgaaccagttgcttgaacggctatgttatcatctttccctctacaatggaccctactttgttctatacagatgcagtttctgtgtaattagatgctttgatcctttggaatcttccactagtttcagtcttcacgcatcatcatattccaaaaaaatgaaatgaaaaaagaactaatactcaaaacgttgtcgtttcgttgtgcttcatagctcttctcctcctcagcttttcctttttagcttcttcatttctgctttccagacagatatacacaccagtagctaaaacgaaaagacagaatcttttatttaattcattttttatttgaaagtacataattaaaaaaaataattaattaatcgtgatgagggcgttgaattcgcggctagttctgatcgacatcaacagctcctggcaagcttcgcgccggttaatctcagccaccgcaaccgctttttcatctgattcctcttcctcattccgtcggacacgtggtgcgcgtcagagaatcgcttcatcgaaatccccggcgtcgtcaccgtcttctgttcggagaccatctgatggattcagtttcgaagttcggtcaccgtcatctgattcatcgatctcatcacggaagtcaccgacgacggctccgcctacggtggagctcgacgctttcctagagattcttccttcggcgacgaggaaggagcttgttagcac

SEQ ID NO: 15492 - DNA, 2587 bp, Arabidopsis thaliana landsberg
tagtgcattaattagtcaactaacacatattgggacaaaatgatacattgtgatgtgttaggacaaaaacaccacttgtgagactttgagacatgtctccttacgtggctttctctcccttttgcattcctttttttcttcaaaattttacgtgactttgagataatcatttttagtttttttcatcctagaatgattgaatatctcatcatatgtagaaaaaaaaacatatttttgtatatgtcatgattgaaaattttaaagatgcaatcaagtaattgaatattgtagagaaaaactgaattttttgtttaaaaactatagaataccacatttgattggttcacgtcatctggccatgataaattaatacatgttctacatgataaatcatttttctacctcaaaaatttattggctagaaatgtataattatgttctaacaatctaatattaagaaatttcagcagcgtaattaattagttgtgtaagttaataagacaaaaattacattttaatttgggaatgaaggattaaattgatagtttttaaaaagaacatgtttattttgcaatttcttttagatcaaggttgatcttgcaatttctctctaatttcttgtttttgacttttggtgacgccgcgtcgatctcttttcctctcgtcccatcggaactcttctctctcggccgtaagccgcttgaatgtttcgacggcggcggtggaataaacaggttttatttttagcttagtctccaagatcaatgttttcataagatgtctccaccgttaggttacgtatctctctttttgttgtttcatcttaattcttacacaatcttctaatcattgcatatcatagaattgtctaaaccgtttttgaaaatatgatgaaaccattgttgcttctcttaccatgcacaaacttgaatttatagaggcatatcaaagagccatcatgagactctctatatacagctttatcaaatatttcctttgcgatggaagcatttctattcatagcaaagcaggatcatgttctttgtaacatcatcttacatacatatatactcgcattatacgtttccatttgtacagagaaagtttattcaaaacttgtacaaagtctggaactggagtttggtgcaatcactgaactcgaactgggacaagcttgagaggtactttcttgactactgtaagtataccagcttcttctgtatcgatatctttatgtgtcatcccatcaggtgctctccaatcgaagaagtatagtaagttcaaaagtcccaactccactatagtgatccccaaccccatcccgggacatatccttcgaccagacccgaacggtaagagctcgaaatgttgtcctctataatctacagggttgttgataaacctctcggggttaaactcttccggatttatccagagtttaggatctcttcctatcgcccaagtgttgactaagatccgtctctttggaggaatatcatagccttgaaccttgatgtgagtcattgtttcccttgggagcagaagaggagctactgggtgtaatctgaatgtttccttgatcaccatgtttaagaaaggaactttatttagatcttctttggtgattctctccttattgttgccaaagcggtctctaatctcgccttgaactttcttcattagttcggggtttcttgcgagctctgtcattgcccatatcatggtaagagctcctgtgtctatccctgcgattattatattctacaaacacccggaaactatgttaaatcaattcagattccattttaatacaaacgtgtgaaacaagttttgttaccgtgagaaaccccttaatatgatctattgtgagcttcaaagaatcatctttgtcttgtttacgcatcacatccaacattacatcgacgatatctttgtgatctttccatcttccaggatctgaatgatcatcgatcacatgttgaaacagagcatcgagcttgaagaagacattgttgagccacttgtgtttcccggaaatccagtcagcgagccatccaaggccggctatagggaagaaatcagagcatgtgaaactagcctgagctgtttcggtttcaaatataagttcatcgatcttgtcttcatcgataaacttgttgtcgtggaaactctgtccaaaagcaattctaaacaggatactcgcagctagccagaaaagggttttacttaaatcaaccggagaccgacctacggctgattccgacagtttcttgaccagcaagttacattcttcttctacgatatacccaaaatactgaacctttttaaaacagaaaagctcccgcaccaagaacttacgccgctctctccactcttcaccgtatggagtaaaactgatatctttaaaaccccgagagattagcctcgtcccgacaagtttaggcctggtgcaacactttaggtcatgagttctgagcacttcttcagctgcttccctcgatgagattacagttacagggacaaactcaaagtggagaagcataacatgtccggtttctttcgctagacgtttgaatgacctgtgagg

SEQ ID NO: 15493 - DNA, 3230 bp, Arabidopsis thaliana landsberg
tattacgtgtctagaaaataacttagggtctctctatatatagagtagaaaccaaaacataaattagaaaactcaatgcaaagtagaaagtttgaaataaggaagtataaaaaaaaattaaaactgctaaatctctcttacatcacctagggaagtcaatcgatgaaacaaagttagtgaagaagctccttaatagtctaccacgagccaagtatattcaaatcatagcatcacttgaataaatcttagatctcaacaaacccatttcaaagatatagtgggacgaataaaaacttacgaggagcatatacttgacgaggaaggtaacattgagactttgggaaacctacttttctcaagtatgaattcacaagataggctacaaagaaatccgtggcagattcaacatacaagatcgatcaaaggaaaagacggatcaacccgatgtggtgtgtttttgatgtgttaaaatgggacactttgcttcggtgcgtcggacaagggtgggctcgcatgcccgagagagaacgagggcgcattagtaaggacggtcgggatgttacaagtggtatcacagctaaactaagacaagtatgggatcaagagggctcacactgtcggggtgacgatcttggtgtgcaatgaggatgttgcgtttggttagtggggtgaattgtaacaccacagtctcagaaatatggtagtgcacgcaaatatatttaaaagaattgatttacctacttgtattaccaaactgctcttatcattttggctaaacgtgctgaaagaaatccattgttaaaggtgcttgggctggagtaattttaggatgtgtgaccttccgacaagtgattgtcggaaccatacgagtgaggacaaagcatggagaaagatcatgtggtgatttgtagagtcggtaaacaaatattaaagtctcctggacgtagtagaccgaccatcgggcagggatggacagagtgtcaagagaggacctgggacccctagtaaggactgtcgggcgttacaaaataaatagttaaactgtattgcaaaattgaatgtgtaagatagaaaactgtatttttctaaatactatattaaatatagaaaaagcgtatgggctattatttagaattcaaaaatcattaaaagaatgtgtgtgtagaattaaaatgtataaaaaatataatccataagacttaagttttgtttaaaacaaaaattattcaattaaatatctagaaaaatttatagattactattttactattctcaattcaaatactatccataaacatttacatttatatcttacacctgtctatttaggttggccttatctagtatgatataaaattatcttgtaggatatttgaggttttcatcctttttaatatatagatttttttattattattatgtgcgttgatatacctctatttttactgcttttagctataattgaggtataggttttggagtccttttgttatttgtagagtcttttctagtctttttcaggtttttacatgtttgggatgcatttggagattatagagcattatggagcaaaccagacaacttatgctgcaaaagcaatcaagagaccaaaaattaacgtaggtgtcgatcgacaccaatacctgacgacaattaaaatacgcaatttattgaagttttgaagatttctaaatttgtcccagaacgtttctcctatttttagtcaatgccctgcacgtttttaagacatatatatatatatatatatatatatatatatatatatagtttttaggtcaatgtttcgacagcttggagaggctaatctccttatctcttttgtactttgggatcaaaaccttgtggagactccctttggagaagatctttttcactctttctcttgctattattgatttcttattcagactttgatttgtgttctattatcatatatgagaaatcaagttggttggtgaagggagtctcaatagggatttagattgattagtagatcgaaaaccccttaggattattcttagagttcttcatctttggttattcttaatgctagttctagaataattaactggaactttgatattagataataggtatacccaccataggtacctgttaccaaaaccactatttgatgggccaaagtttataggcgtctcgaataagatcggtctattcacttaggtgaacttatcaaatttgtttagatcggtctattcactttggtgagtagcacgacacatcaccgattatgcaataattacggttggagttcgagaacggttcgataacaacctatctaattctagatctactaatcatatgtttcctgagaataacctaaacctgacgttttattatcttatgttacaaccaaccaatatgctatttgcttactttgctttcttttaatttacttattacctatctagcttaatcttcacacttaagtttattgtgtgaaccaaagaactttgaggaattcagcccttaagtactatcgacgatctcttatttgagagattggttttaaggtaacttgacctatatcaaatttggcgccgttgctaaagttcttccgaatcacctttaagcttagtttagagatttcgtctagtttttatttttcttttgatactcacgcgtttcttgtttttcttcttttatgtgtttcaggtgtatgtctaggctcataagaagcactaaacagaaggacctgatcaacttatctgtacttgatttgggaatactcgaatacaccaaccaaaaaactcagaaattagcaatggttgacagagtcatcagagctgatgagcaaagagttttacgggatggcgatgggcaagcctacaatgtggctggtcagagattggatgaccatggactcatcacccctgagaacatcaatgaggatcaagcgcgcctcaatgcgcaattagcggctaaagatgcagcagggctcggtgtcaagcgacaccaactgggtttcgatcgacaccctcgggagcagcacgcagatgcaatcggtgtcgaacgacacaacagaggtgtcgatcgacaccaacactagattcctgcagctattcatcaagctttggaaccacgtcatactctcggggatttcaataggctagacatgttctatgctaatcgttcagcgattgtacccccaccctttcagaggaacgactatgagcttaagcctggct

SEQ ID NO: 15494 - DNA, 679 bp, Arabidopsis thaliana landsberg
cccctaccatttctctcaatgaaggaactgaaatattttccatatatcgcatcttgaggtacatcaactgtcatcagcctgctccaatgctgcttcttcatcacccataagtgtaacttacatgtttcgtggcattcaagtaacaaagaaagttgatctcctctgaaaatccctaaagagatatactttaccaaattacgtgacccaatggattgaggaggaagaaacaagggctcaaatctctcttttgagaaatcgaaactctgtatcgacatgagttcattaccagatttattgtaacctagccaataaggagttcctcgcaaacaaacacttgacaatggcaatccatcgaatccaccaaagtttgtatcaacaacaaccttccaagaaacagactcgaatgcgtagacttctacccttgatgaatttttaattccacaacgaaatcttacaactttgtaatcataaaaacctgatgattggttaaaaaggtatccaagaccatacgcgtccatggaatggtcaaacccttcgctacatttaatccatctcttttgactcaacaacggattcgcaaccaaaagcatacttttagtgacgtatagcaatagaccgtcacaatgagatatattgatcgctggtgaaagagctattggaaaaggcaatttcacaccac

SEQ ID NO: 15495 - DNA, 2180 bp, Arabidopsis thaliana landsberg
tctacaactctggttcaatgcggaatctcaacgatggaaagaatcttcaacaacttacaattacctgtcaaaatgacatctccttgtaaatgaatcattacggaacctatgtagctgacgaggtatggcaacactctttgttgcacctgcaaatttaccatttacaacaagagagtggaggttaaaatttcagttatccaatgcaatatataagtttcctaatatgcaacatgtattataacctgtgtttcctctccccaaactgcagctgtactgtcgtcatatgtttgagatcaaaagcatcgaagtaaccttaactcctcatgagttctgcttacgctggcacctacttgtacacactttcatttggtaagaacccatcttctttcattttcttaaacagcgaatcagcttcatgaattaagcctcgcctacaaaatcccgatatcattgtggtgtaggttataacattaggcttcattcctttggagaaaaggctacaaaataaatcaaaagcatcttccaccttaccaagcttgcacatcccttgaataatgatggtatatgtaacaatattaatatccatctctctcttccgcatgtattcgaatatcatcaatgccttctctactttcccattacaacatagaccatctaacaaaacgttgtatgtcctaatatctggaggcgcacgacgagaactcatctgattgaaaacttcttgggcacatcaggtctgcccactagacaataaccctggataagaacggtgtaagtgattgtgtttgcaactactcctttctgcgacatctcatagaagattttcatcccgtcctctacccttttagacttgcaaaatccatgtatgagagtagtataaatcacttcattcgggtagcaaccattcctttccatcaaataaaacatttgcctagcctcatctaagagaccatacatgcaaagcccattgatcagtgaaccgtaagtgaaaacatcaggatacacagacatttggatcatcacattgtacagttctttagcctccataagcttccccactttcacaaacgcatcgatcaacgcagtgaaagtgattacattaggttcaattctcctcttcatcatatccctcagaagccaagcagcatcaccccatctaccaatctcgcaaagaccggtaacaagagcgttgtaggtaacaacattcggtctactcccattagtccccatctggttaaaaagctccaccgcgtgattcaaatgtcggtttttacaaagacagtgaatcaatgtggtgtatgtcacaacattaggtttaaatcccattcccaaaatctgatcaaacagagctatagcatcctcaattctattccaatgacagtaaccattaagcagagaagtaaacgtgactaagtcaggctcaaaaccaagtttcatcatcttcccaagaaaacacgaagcacgacaaggctgagaagatagacaaacacaatgcataacgatattgcaagtacaaagaagaggtggaatccccaggatttgcatttgctcaaagagagaaatcacaacatcatatctattcatctttgcaataacactcaataatctagtgaaatcgataattgaaggaaggggacgagagtgaaccatacgagtgaacaaatcaagagcatcattaaactgaagattgtgaagaccgtttctcaaaatctttcggtaactagaaaaagctcgaatccagaaacagaaaccacaaaggcttaaggaagcagcagttctagggttacttatctgtagacgatgtctatgactatgaagatgaaatcccttcactatcgacgcaaacccagtcgcaatggatctacgcattcacaatctatgtcttctgagtcatttcactgcgcaattcgaactctatacaacaagaagagcagagaaatggtggaggtgagcttgaagaagacgaaaacctaacttctctcgtatacttgtggaagaacagcgacggagatacgaacacgagtctcgccgcgtagacttgtaatcgtttaattaattataaaatttgtattaattcaattagatacttaaactctgcttaatgtggagattatattttgattgaagaatcttaaacatgtatcattacaaaaaggtcagcaagagaaattaagtaaaaa

SEQ ID NO: 15496 - DNA, 1314 bp, Arabidopsis thaliana landsberg
caaagcgagattaatagatattttctgtattacactgctttttacaagaatttggtaactaaggggctagggagagttattggggtgtgaattttcacttacgccgccaatcgcaaggattctaccggtcaaagagactttttcagtcattgcaagatccttccttacaggcttcttcaaggcaagtgatagcaatgaagttatcatggtgcagcctgcgcttgggccgtcttttggtgtggctcctgcaggtacatgtagatgaagcttggaattcgcaaacaacttgttctcgggttctttctccagcattattcttctcgcgactgtgtgagctatctctgcgctttctttcatcacatccccaagccgacccgttatatgaagaccacctttgccttctccttcttctacaaaggttgtctctatgtacaatgttgagccccccatggatgtccaagctagacccattacaaccccgactggtgtctgctcatatatcttctcttcctggaatactggcttgcctacataatctgaaaggtttgattcatcaatcatatacttttcaaccgtttcagctacctctccgctctgctcagtcgttgattctgttggatccccagttgccaactcatctgtcaacacagtggatccttctgcagaggtctctggagattccaaatcagtcttggccaaagatttagtttcttcagtgtcagtagtaacatcatcagaaattctaggcacttcggtggatgccgctttgcgaacaagtttaagagcaatctgtaagaaaatcaatcaattcagatcctctgggtccaagtaagaagtttggaatgttcagtgtacttgtaaacaaacttaccttacgaaaaatcttctcaatctgcttctggagatttctaactcctgcttctctgcagtaatgttctatcaaggaaagaaaagctgcatcgctcacatcaacctggaaagaggtacaaattaacaacttgagcaaaatcttttataacattcaaaccgtaataaaataaagaaaacagcatatagttgtgagtgagacctgttcaggcttaatgccacaatctctgcgtgcggttttctccaaatagtctctagcgatatgcattttctcatcagtaatgtaccctgagagagtgatcacctccattctgtctagcagaggacccggaatggtatctgtcacgtttgctgcgcatacaaataaaacctgcaagagatttaattagacctaagttccaacacaaacttcctattatgaaaccaatactcacatcggatcaatgg

SEQ ID NO: 15497 - DNA, 4768 bp, Arabidopsis thaliana landsberg
gctttgggacctcctgagtcaagaatctgagcgattgcagggaattgatgagcaagttgatagactaaagcgtcagttgagaaggttacaatcgttgttgaaagatgcagatgccaagaaacatggaagtgaaagagtgaggaacttcttagaagatgtcaaagacattgtttatgacgctgatgatataattgaatcctttcttctgaaaatacttagaggaaaggaaaaaggggtcaagaagcatgtgagaaaacttgcttgtttcttgattgatcgccacaaagttgcttcagatattgaaggcatcactaagaggatctctgaggtgattgggggaatgcagagtttaggtatacatcagatcattgatggtactcattcgctgtctcttcaggacagacaaagggagcaacgggaaatccgccatacgtttgctaacagtcgtgaaagcgatcttgttggggtggagcagagtgttaaagaattggttggtcatttggtggaaaatgataacattcaagtggtgtctatatctgggatgggaggtattggtaaaaccactttggccagacaagtttttcatcatgacactgtccgacgtcattttgatggattcgcatgggtttgtgtttcgcaacagtttacacagaagcgtatttggcaaaggatctggcaagaacttcggccacatgatgcggagattttactgatggacgaatatgcagtccaaggtaaactctataaattattggaaaccgctagatatttggttgtcctcgatgacgtatggaaagaagaagactgggtgtaataaaagcagtgtttccacggaaaagaggtgagctcttatggtacatacatgaagcactttttcttcttaattcataaaagtgattgttaaaaaagaaatatatagaataattgccttttttattccctagcatgagaaacacaaatatttttgcaggttggaagatgctgcttacttctcgaaatgaaggtgttgggatacatgctgatccaacatgtttaacttttagagcaagcatccttaaccctgaagaaagttggaagctctgtgagagaatagtattccctaggagagatgaaactggtacatatcttattatataatgtttagtttctctaacttttaagaaaaatacatttacatatactaatttacatgtatatatttatatgattttataaatttttattttccttaaccaaaaagtaatatttgtatacatattgctattttttccttactattagaacaactaactaaaaacgtatggtaatccatatgctaatttaggcatgtataaaaaaaaatgtcaatggtaatcttgattttgaccaaaaaataattaatttaattagcatgaacaatgagtgttgttaaggttcaaaaggacaatataattattaaacattaatttaattggataacaattaaaaaaattaactattaatcctagtacagtaagtcagtaattacgaatcttgaaaattggttttggtttttttcttcctattttttataggtttattcaaattagaaatatcgaattatctacttttatggtttattcatgattggtttgattaaaatttaacgtaataaaatcaactaaatttgaaagaaacatgtattgattaacccgagattacacgattccttgttataaagttcaaatataatactaagaccaagaatctagtgtattattttaatttggcagctcacatgttgaaatgtattagcttgtgatattgtgcagaagtaaggcttgatgaagaaatggaagccatgggaaaggaaatggtcacacattgtggaggactaccattagctgttaaagcgttgggaggcttgttagctaataaacatactgttcctgagtggaaaagagtttttgacaatattggatctcaaatagtaggaggatcgggcttagatgacaacagtctcaattcggtttaccgaatattgtctctgagttatgaagatttgccaacgcgtttaaagcattgtttcctttacctagcccattttcctgaagattacaagatatatacacggacattgttcaattactgggctgcagaaggaatttacgatggatcaaccatccgagatagtggagaagactacctagaagagctagtgaggagaaatctggttattgctgataaaaactatttgaggtcgagatttgaattttttcaaatgcatgacatgatgagagaagtatgtttatctaaagccaaagaagagaacttcctccaaattatcaaagtccctacttccacctcgactaccatcaatgctcaatctcctagtagatctcgcagactcaccgtacatagtggtaatgcccttcatatattgggacacaaaaacaataaaaaagtcagatctcttttacttgtaggactcgaaaaagattggaaacagtcagctccaggcttccaaagtttaccattgcttagggtgttggatctttcttgggtaaagtttgaaggaggaaagttaccttctagcattggagggctcattcactagagatttttgtgtttatacgaggctgtggtatctcatctaccttctactatgcggaacttaaagcttctgctctatttgaacttaagtgttcataacgaggatttgattcacgtgccaaatgttttgaaagagatgctagagttgaggtacctttccatacctgttaaaatggatgataaaaccaagttggaattgggtgatctagtgaacctggagtacttgtatggtttctcaacgcaacacactagtgtgacagacctcctccatatgactaagctccggtatctcgctgtatctttgagcgaaaggtgcaattttgaaactctatcgtcatctctccgtgaattgcgaaacctcgaaacgctttatgtccttttttcgcccgaaatctttatggttgattatatgggagagtttgttctggatcattttattcatctaaaagagttgggattggcagtacgtatgtcaaagattcctgatcaacatcaattacctccccaccttgcacaaatatatatatgtaattgccgcatggaagaggatccaatgccaattctagaaaagttgcttcatttgaagtcggttaaattaacatttaaggctttcgttggaaggagaatggtgtgctcaaaaggcggatttactcaattatgtgctctagacatatctgaacaatcagaattggaagattggatagtagaagaagggtcgatgccatgtcttcgtactttgactatacatgattgcgaaaagttgaaggaacttcctgatggactcaagtacataacatccttaaaggaactgaagattagcggaatgaagagggagtggaaggagaaactggtaccaggtggagaagattactacaaaatccaacacattcccgatgttcaatttatcaactgtgaccagtagcaggtaaaagataaactgtatagtgtttttttgttgttgttggattcgtgtgaaagtcatttggacagtctcaactattatacattgttttaacatcgatcatctttgaaatagatgcaggaaagaacaacaaggtatccaaattctcttatattggtagagatagaggttacttcacaaaagtcatctgctgataaatctctggaatacagattctcaagtactaccgattactttgccagtcttggaggctctcgctttcagtgcatcgttatgttgtgctttagaactatattatagaaataatgctttttattgaaggttgttttcgatgttgtgcatggaacatccttgagaactcttttccaaaatggagaaacgaaccttgtaaaatttggatattttctgtttattgtaaaatttggatatattttaagaattgtgttttgctttctcgtttgtgatttaacacagttccttttgtaagctttatttacagtttacaccatcaaatcttgtcagattttttttgacgttttgcacctcttttactgtgtatacccataggcaaaacatggttgaaccaagacgagcaaaactgatgtacaataaacataataatctcacttccaaaacttctggcaaaacattatattttctcaagggaacaaaacacacagacaagtcgaaactttatgggtttgtagcttgtttgctgaaggcggcgtgaactctctcctccgtgaacagtctatggttttcatagaaatctaatatctccattgcaatattcttcacctgccaatatgttcacaacataccaatgaatcattcaacagagccaatcatttctcagagaattataaggttgataacaatgcatagacttacaatgttcatgtcgacagaaagctcttcaaaccaagtccttatgtctttctctttgtgtacagaagcaatgtaaatgcaagcgagtgttatgagaaacggcggatgtattaggatgaggtccattctgtatgtgtcgttgacaagacccctacagtttccacaacaaaacttaaagcatcaacgaagcatttacttttgcaaatcaaaacctgtttagttctgttccaagatgaataaaagacaaaattttggatacttaccaagttaaatgggtcatactagtgtcattgattccagaatcctgcaagaacctgccagtcacgcaagaagagtaatcaaaaccaaattggatagtataaagggagcaaaaagattttgatgacc

SEQ ID NO: 15498 - DNA, 2075 bp, Arabidopsis thaliana landsberg
tccgctaggcggtttgcctccctatatacatgtgaagtttcagactatctagttcctaaataaaaagtcgggacacatatgtaccacgaaagacaagggatgagaatcactaatccccttgcttaagaatccaaccaccaactccgaatcaacctcgacctctaatcttgtgatatgtctctcccaagttaggtaaagtccatagtaaactccccacagttccgcgaaaggagctgaacaaacaccgatattgagagcaaatcctccacaccaactacctgttgcatcccgtatgagtccccccgctgtagtcaaaactggattcttgtgaaaggacaagtcgatatctagctttaactactcgtcccgcggtggtctccacgttaccattcgctcaactctcacacccgtacctatactctcccgaagtgagttatgtgcacggcttacttcttgtcccaattctctggtaaactttactctttcccgacatttttccaattcgccaaacacataaccgcacctctatttcaagctcaaccaaactcccatggcaaacattggtcgaccaagtgctttctgccattttttccatacagcccaagtttccatacaaccatcccaaaagtatccttaaagaattctcatcttctccgcgctaatactattttgttcaaaaaagtgtcatcaaagctaccgggatggaaaggctgctctttgagttttgcaagaagactaacattgaccaaatcagtgttggcatctatattgattcataccatgagcacaatatctttaccaaaatcgattggcgatggtttggataaagtttcaagaggctttttatggggaagtacaccagaaaagagaaaacaacatttggttgcttgggatagggtttgtcgtccacggacagagggtggtctggaaaggatttgaacacatcgcttgtgacaaaggtaggatggagattgttacatgatcatacgtgtttgtgagcaaagtattagcaagagctctactgctccgccttcagctcctgaatctgaaacaagatcgaagaagaactcagatgcagctgaagagtcaaggagtcaagacgatgtcgttgcagtaaacaaagagaaagggatattgggccactcacctaacaagcccaatgtcaacttaaatgagaagcccatcaagtctgagaagcccaacaagtcttcttcatcttctcaacggctaagtccacttgtgcaagagaacaaagccagaataatgacagagaagaggagcgcttgttgtacggctccaatcatcacagagaacagatttgattgcttgatgacctgcgtagcataacaagattgagacatctgtcagttcacaatgattgaaaccctagcattgtttagctataaaagggaacttgtgatgtaacctagaactcaagtgaaataatatcaaaaggaaagttcactcaaacattacctaaagtagccgtcttgctcttactttcacaaagatattaagaagcaaatataaggtaggtgatctacaagactggacctggatgttgaaaaagagtgcaagctcatcaacttggcggagtgtagtgacagacctgcgggaagtaatatttcatgggagcagttggttgctaggggatggttggaatatacgattttgggcagataaatggttatcaaacatatcattagtagagagagcaaccagggagttacctagtggtcatgtggacgtgtggctcaaggactactagcgagatggtacgggctgggttctagaaaacattgtgccttttgtttcacataatattagattagagctggcagcggtggtccttgataacgtgaccggagcaaaggatagattgtcatgggagagacgtcggatggatggtttacggtcaaatcggcgtatgctctcttttggcggataatgagttacgaagccaaaatatgtcaagcttctttgatcgattatggacagtggaaaaaccagaaaaagtccgagctttttgtggttggttagtcaccaagcgattatgacaaatgcaaaaaggttcc

SEQ ID NO: 15499 - DNA, 2590 bp, Arabidopsis thaliana landsberg
cagaagaaaaaatatctccatctagttccatgccaccaacactgctgaagaggtcaaactcatccaactcatctcctgtattagcacgagatttacgcccaacctcacctgtcacttctgcaaaaagatcatcttcatctgggagaagatttccaatagtttgtgcctcaatctcttccaaagattcagacggttcttcacggtgggtaacaactgtgtttgcagacatagtggatagcatatcacttccctgtagccgcactgcaaaaaacagcaagttggagacacgctcaagtagttaaagtacagtaagtcagagcacacaagtaacaatgtttttttaccatagaggattgtagattttaggaagctgaataaaaaatctaacacaataattaaaaaaaccataaaggtgaaccagaagcttacgctttctactaaataaatcagacattgagctggaaaataaactgctttcccactgactaccatttgtagtgtttcttgcgttagggctaccagaggggtgcgacccagaaaaactagattgtggcttcagctggtaactttcagatgtccaggaactctttggcatacttgaaagtctatcacgaccaccttggttttcaggcatcatgtctgttttcataaacccaaattgcctctgccgaacaaaaaagcacaagtatagttgagaaaaactagtggcagatataatgtcatacgtgagaaatatgataccagcaattctagagctacacagtttaaatcctgaaacaaatgaaaacaaagagtttacctctgaagtaatatgaatatcttcatgaaagtgggaaggtgttgaaacacctctctgttccattatatcagacggcatcttacaaaatttgactaataaaaccagaatcaaaatcttttaaaactttaaacttatttcaacgaaccatatcacttcccctgaaaaaacctgaaaaaaaaaaaaaagtggtcaagtcaaaaccagtgtctacataaacaaaatgcatttctcaattgcgaggaagatcttgcaaaaacgacacataaaagtgctcaattactcacgtacaagccaaaaaaatcaagcaaaagaactacaaaagtagagaaacagaagatttctactagaattacgcgaagtccaaggataaaacaaagttagcaacttcaaccactagagaggcaaaacatatcaaatcgctgcattttaagctcatagaaatatctagaagagacgattaggtacatccagaagcaataagagtagaattcgcctaataccggatccttgtgcagctcattataatcaaacagcgaaccaactcttacctaattcacaaattcggcacggaattaaaccatttccaaattattaaaccataaaaataaaaaccctaatcaccaccagctaccaaaaaaataagaaaacttacctaatcacaaacaaacacaattatgcttcctcttaaacaaattcaaaccagattttcaacaaacagtggatctcgttaactcttattttttaccttcttcttcttcaggtatcacgatccttgaagaaaaaaaaaaaacagcgatgtagacagagatgaaagagaagagagaagagaataattccttcttctctcttttatcttcctcctttcctttttgtttccttctatccaatcgcatccatcacagaatatttaattccgtaaaagaaattttttatattatatatataaaaaaagtgaatcggcgttttcaattttttttctttctcttttcgaatttcccctcctctcacgacgcgttgtttccaacgaataattcgtgcgaccggcgatgatttttgagcttttccggcgatattcttcccgtcgacgcgcgattccggcactccctccgacagagagagaaacggagaggagagagagatttttatttttttgggggttttttttggtttttgcggttagttggtttagagaacaaaaaaaatgagagggagaggaaaaaacaaaagagggaaggaaggagagaaggactctgctacgttgtatgtaccatggatttagtggtatggtatgagcttgaatctggaccattcgattatgattataactcaatagtttattgattttagttgaagaataaataattacggactcacacgagagtctcgacggcaagtcgtcgagtcccggctaataaccaaagtagccggctatgaaaacaatggaccatttggttttctttttaaacatgtgattcatttgctttatctacaaaactttacttgcacaaattaaagttagaatttcaaatcttagtattatggaagaaaatagtattaaaaggttgttttaatgttattgatatagttgacatttttagttgacacatttttgcttatgttttagtctcgtacatgattttaaatgcaaaaagaacattaatcctatattagttagagtttaagaaagatgtttggtactagttgttttaaggtttctttacacttagcaaaaataaaatttgaaaatgtgattttattttttaaacccaaaaagaaatcttattataacca

SEQ ID NO: 15500 - DNA, 2376 bp, Arabidopsis thaliana landsberg
aagctcaatttccctaacgaatcctctggaaagaggaaagccaaggctaatactgtgcaacaggtagaggagaatcatgaggctgatcttgatgtggcggtggtaagctcagcgcctagtagtagctgtcttgatttcttgtgggaggagaataatccggacacgcttctgattgatacacaatggctcgaagatatcatcatgggcgatgcgaataagaaacatgaacctaatgatagtgaagaagccaacaacgttgatgcttctctgctttctgaagagcttcttgcttttgagaaccagaccgaatatttctcgcagatgccttttacggagggaaactgtgattcctcaacgtctctgagtagtctctttgatggaggcaatgacatgggtctatggtcctgaacggttctattgtacaaatgacatgagtgttttaaatgagttcttcttcgacttgtctgtttgctatttattcttcaaaccttagccagtgtcaaacaaaaacggccactacgactattgttttgaagattgcgatattttaagttgtaagaatgtagagaataatgtttgggaagaacaaagctcgattcatatttgtgataaacgcaaaatatagattcgattcaaacaaaaaggtgcaaaacatctaagggtcttaagagaaacaagtgagaagaaaaaacagttacggttcgataactcttcaatcccaaaagtaacaaaaaagcatgtctataaccattaaaccattgagtaaaggctatcaactttactcccaaccagcagctggtgcccctgagggtggcgcggcagcttcccatccaccatctgccggtgcagctagaacagcaaaataaacataacattagaatcaagatctgttagaatagggttcaaatggttatcaaaaactcaccagcggaatcactccaagaagcagcagcaggtgcagcagagattggtgcctgaccttctcctggccatgcagcatcagggatctgagcagtggtccattggtctccacctaccattccatattctggagcaggaagtgcaccatattctgcctgagggccagcttcatcttcatcctctggcttagtctcctcaggttccctgtaaaagaacaggtcaacctgcacaacaccataccatatgaaaaattcagtcaataaacagggaaagtttttaatgaacagatgcctttctaatctaagagctccaagaatgatattcttaccatgacatcccacttctgtccagcagcaatggttccacgcatctgaaggaccatgcgagccaaaagccagaaaaggcacccaatgctgtgctttcccttgttgttggctgggataccaatgtcaacaaatctcattggagagtctgtgtcacagaaagcaatgattggaatgtttcccaaagcaccttccttgataggctgcaacacacacaagacatttatcaataacaaaaatcattaatcaatcactagtatatgaatcatatgaagagtttacctggtggtcagttcttgggtcagtaagaatcaacagccttggttcactgaaggatgtctgcatctgattggtgaaggtaccaggagtgtgtcttccagcaatggcattggctccagtgtactgagcaaacttcaacacagctctctgtccatagggcctagctgactggacgatgatgtcctgtgggttctcaatggcaccaataactctagcagccatctggagcttttcccatgttttgccaaggttgaagatgtaaatacctgagaatgacgaaaacttcaaaaactaagttccatactcaccacttacaattgtaaattacaataaaagagcaacaataacacacactagcacaaatacaatctcaaacatcagtcaaaactaaaatctcaatttttttttttttacaaacacacagagagagatagaaatgaaacttgagcctttgatcatttgttcatacatttctgtaagcaagaacactagagaagacacagaaacaaaagccttttcttagatacgaacgcagagaagtgagcgtgctgacaaaaacggctagttgcaacattttatcttttctcagtcagcgacatatttagatccgtcgtgagtaaactctactctcgatacaataaaacaacctataaatccaaaaaccatctaaaacaaagcagcataaaccaaataaacagatcatcaacatttatacaaatccgaaatatcaacacagaatctcaacactataaccatcaacatacatacatacagatagtttatcaaaaaatatacaagaaattaccatcgttgcgtctcttgaagacgtaacgctccatggggtaggttgcaa

SEQ ID NO: 15501 - DNA, 3913 bp, Arabidopsis thaliana landsberg
aaagatattcagaacttccctgcaaacgcatcctacaacattcaaaggttcaaaggtaaatatctgttttttgtgatctacattgtctggcatcctcacatgatattgattgctacgaggacagttttaaaatctttagcatccaataccagaatgtaatgaaaggaagatggcaaacttgttgttctgtttcgttgtctggttttgcaggtttgggagagatgatgcctgaacagctttgggaaacgacaatgaatccagaaacaaggatactaaagcaacttgttgtcgatgatatagcggaagcaaacatgacattctcatctcttatgggtgctcgggtaagccctcaaatttccgactccattgatttttttgggggtaaaaaacaggcttattcacaagcttaactgcagtttgattgatctaatactgtgtttcttaatctcaggtcgatgtccggaaagaactcatcaaaaatgctgcaactaggatcaacctgcagcgtctagacatataacaggaaaccacttgagattggtctctacatatttcttcatctggtcagagacattagattatatatttgtcaaaggccaacaatcttttgtttgtttctctggcctagcaaaagtgaccaccgttacaattgtgactgtaaaaaaagtatttcgtaatgcgttcacgggctttcttcgctgtaactctttttttttgtttatctttgctttaacctttgtacttttacctcaaaaatcaaaacgaaaattacgatcagagatgtccaacaaataaagtctcattataagttgtcgataccatcacaagtaaagatgaaaatctcttattaatagagtaatacaaattacaagatgataggaattgatcaacaagaagattacgcatcttaagtaaagcacacagaaacatcaagataaatagatacttatttatagaagtctttatagatcgacacaagatatgaatgaggaggttctctagggcttggcgtctccatcaaagccacgttgaagaaatccaacggatgatagatgtgatacatcgctccacgaatcgatgatccatttttgatcacggagatgaaccacattcactgaagcattcaagagttttccggcagaggaagcttgtgtgatccttaagtaaattgccctcacactcctccatgagtcaccactatcactctctctcctttgtgcttcttagcaatttgctcaagagcatccatggatctatcagcaagttggtcaaagctctctcctcctcccttttgattcgtaaaaagatgcatcccacattaagcatagatatagttaagtaaatcgaaaatagagaaactaaggagtgataaagagtattatgaatcaatataagcttaattaccggaatctcgaggtcgttttgggaagagaaaaaggcagagtaagcttcaggttctttctctgctccttctttccaatacaggccttggagactacccacgtgcctctcctttaagtcaggtacttcgatcacctgtatacatatttatgaattacaccattcatatggaagtgattaatgattttgtgcttagtatatagagagaaatattatacaaacctcgggacagaaacaagttttggcgatcataagagcagtgtctttggctcgtttgaggtctgatgaatacacagctacaggtctttcctcttttcccaacctctcagcgatctatatttttcattcaaacaaaacaaaaaaagaccatgcatgggttaatacttaatatttagataaatagaagaaagacagggaagttaaagggattggatcttaactgcaacagcctgctttagtccaacctcgttaaggtctgattcaatttgtccctgcatttggcaatttttatgtttatgagtgtgtacatgttgcatgcatgtatatgcgattatgcatacatacacacgtacgtgtttgcatataaagatagatagatagatagatacctggattcttccggcagcattccaagtggtttctccatggcgaacaagaacgatctcagtcacttcactttcaactttgacatcctcgctccatttgaactccctctctgcatcgatcctacattttttattttttatttatcaatctcgatattattaaacataccatacgtagcattaatagatatgtttgtacatttatcaggtatctctcatcaattattcaagatcaatgcatggtctaaacatatattggttatggatttttcctagtgcattggaggaaccagaaccaaaccaaatatttttgtatgtggttggtatattgacgataaaacactaaagaattttaagacattctttgaactagttagaattttaagacgtgcatactatataacattatgatatatctataaacgtgaaaacttagtatatattacgaataaaataataaacatttgtgcaattaatcgagttttgaaaaaaattccattcatgacccatgttatcggaagggggtagtggtatttgtcgatagaaaagtgaagaaaaagagagcataatgtgatgatcagaaaaagaagagttggtactgataagaattgttgattcagggttatgcttttataaccatttttcgtcgaggaaaaaaaagctttttaataagtctcttttctttatttgggaaaagtaatgaaattaattcagattgtggcagctcattgattgataatcaaatgtaattgtatatgcatcttgattagtaaaatactcatatcgtatcggtttttaaacaattatttgatcgtatacgcattgtaaccacgtgtcatgtcgatacttccaactcttttggatcttggaaatatacgtagggaatctcctaaaatgtaaccatatctcttcccatgttcattagtaattcatatcataattgttgctagtgactgtccagtttcgaatagattccacctgatgattttacataaggcaaaatctgatgttttttgtttgtttatcattgcattggtaaacgaaacttacggtcaaattcaagaagagagatttgaaaataaacttcatcgacctcataagtatattacaccaaatcccatcaatcgaatataatccgtatatgtgattacaaagacggtatataaattaatttgttgtaccaaaaaaaaaatgtatacaaagaattaacggtatcaataacttaaaaacaggtcatgtggtggatcgcgacatagaaagaaatagtttaatttcctcacaatgaggatcggtgatcgtgtagtatcttgccacatggaggaaactagaatctcggtttctttatcactatttatagtgtaatttattcttttttgacacgccatatttatgttttataatcgttagggttatgatcgtaaactggatttttttatttgtttttcctctagtgtatttggttttcttacgtacgattttgtttcactctagatttagttaaactaatattcgcttttaaattaaaaaacttttaagcaaatgatttgtcaaacatgttgtgatacagaaacttttgtaataaaaatttatggatggtatacgatcgattgttttaaaaaccatagattattatcaaacttcatgttcgagacatgatattcttctttttctttctaaacattttttgtaggttcagtcaggtgaactgttaccgctagatattagacgtagaattgttattatttatactgtgatgcttgtagtacctatataaacaatgtacctaactctgtttcaatatgagattcattttccctattttttttaactacagtatgatccaatgatatataatcaagagaattgtttacttgaaatctgttttaaatatactttggcatgtgtcg

SEQ ID NO: 15502 - DNA, 2487 bp, Arabidopsis thaliana landsberg
cctcatctctttgatttggatgataatctgttattttttttttatctttttgatccgaaggtaaatcaatctcatctgattcactgcgaggtggagattgttcttttcttttataatatattttcatagtgttcattgcttcgtttgaaactaaattaagaggaaaaaaaaatatgtcaacattaaaattagttgtataataaattatgacacacatgattatgtacgaatgatacagaccaattgtgaacatagtatttatgactgtttttgtaaacagtggttaacggactttgagtctttgagactttgaccacatcattaagctaatatttttctcccttgtcaatcaaaatatattgaaccaaaattctaaacatcaacaagcaacaaaagccaaacgatgaaggttatcaaattcttattatgcaatcaacaactgttcacattcatttatggtaaagctaattttcacctaaattataaacttacttgactttaaaaagaagttgcacattgttggcttgctggctgctgctgtttgagaagaagaaaactaaaaaggtacgtaagatgaatttcttttttttcttaattcaatttggttaggttaaaaattgggccagctttgtttctaatttacaacaaataaaacttttaaatatgatatacattcttttattattggctaatgggcttacgatggatattatgtcattaaattatactcggctagattcatatatacaaacccaataaccttaaggaaaattataaaatttaggcagctcagctgaccacccatcaatacatgtggatccgccgttgatcattgatgatgctcacaaattaaaatcttaaccaaactcttaactaataaattttcataatcttttcataaaatgttatgaagagtctttgttaataacctcctattgaggatggtcttaggatcacaagcacggtaccaacggtgcttagaataatttatcatgagttccaatttggtgagtatacaattccagcaggttgcatctttatggtttatccttatatggtcatcatgatgactctttagcatttaatccatggcgttgaaggtaattttatttcatcttcatattttaactattatttattcttaggaatttaaacatatattaaactaattaattatcagagaaaagacttgagcacgatcatttccaagactaacctttcctttggctctgggttctagactatgtgtaggagctgaatttgtaaattgaacaaggagtcccataaacatgttcggaacttgacattccagttgttgggtccacaaggtttaaaatcaaggataatggaagacgtggatttcttggctcgcacgtacatggaggaaggagctaggaacgtaacggttgccttgacgtaaaggaaacatcaagcaaggtattaagaaaaaatcatccatttcgcgctgtctataactcttggcatgataacattctagacgattaattaatggatcatctcatcaaacaaatatcatcaaactttacagatcttgattgaatgtcttgcgaagaaagttatgggcgaaatggaaccagaggcagcaaaagaacttgcactatgctggagatattttccaaaggattggtttcaattctcttggaactttcctgggactggtgtctatcaaatgatgaaggtatgtgtttttcagtttttacctttatggttagagagaaaaatgtagatcatatcatgtgttttgtgacaggcaagaaagcggatgatgaagttaataaaggagacagtattaaagaagagagcatcgggagaggagcttggggagtttttcaagatcatctttggagaaatgtaaggaggagcggaaaaaatgagctttgaaaatgcgatcgagtacatatatactttctttttgattgctaacgaaacgacgccagggatccaaaaagtaaagtaaagctcataagcgaccaccctaaagtcatgaaagagttgcaaagagagtcattatggaattgttcatggtaagactgagaaggaggcaggcataacctgggaagactacaaatcaatgactttcacccaaatggtgagtgtgtgccacaatcatttatatggtcacaaaaatcacacattaatatatcaatccactcattatcaattaattttgagttttatgtccatcaaccatgatatatatagtaattacgttcaaacaaatggtgtttcatttcagttgataaatgagtctcttagagcacccacattggtcatttttttgtgggtgtctttaaatataaaactagtaaaaaaaatataaaacaaatcagaagtgtcttaatttttgatttgtgtctctaggaagacatttgagacaccaaaaagaggagatgtctttgattttattattaatctatactaaagacacatatcaaaagctatgcaatgaaaatgctcttacgttat

SEQ ID NO: 15503 - DNA, 840 bp, Arabidopsis thaliana landsberg
ggattgaataggcaactcttcaacctcagctatcggagttgcctcttgcaccacatcaaattctccttgagaactaagacccttaacctccctcaacaagacaataacccttttcccataaagatagctccttttcacatttttagagcaaaatccacagagacacagcctttgtatctcagcgtgacaagtgataagcaaatcattgaattgattttcgatggtttggatacgtgtaagccatacctggacttgagcaagccttcgacgatgccccgtaaactcttctctatttatccttccttgcacgtcatctcgcttagccttgagcactcccatggctttctgcagggaagccagattctcagataggttttggatataactcccactgacacataaccactgtgaaaactgattcactactcgatcacatgacaaagagacagagacacaacctcccatctctcaaaattcacagataatactttggaactgataagatctgtaaccttccgaatgggaaagtatatgtcaatgtatgcatagtaaaaaattatctaagacttgtcaatgtgtagtgtaaagacgcagacttttatgcaattctaagatgtcactgtattgactattcctaaaacagagaacaaccataaatgaaattaatcgtcatagaattgcaatcagatacggcagttagtaaactcacacgcaatatttccattttttctacgagaaatatagattcactcgagaaagtagcacttttattcgtggagacaattcatcatacaagtggtgtgcacattggaattgatcatagtatgtaactcaatactg

SEQ ID NO: 15504 - DNA, 454 bp, Arabidopsis thaliana landsberg
  unsure (1)..(454): unsure at all n locations
tccgttccttctgcactagatcaagaagtgtgtngagaagcctagactgtatcttagtgaaatgcacaacattatccctccacaagttaagccccatcggatgaacatgagtctttttggtgctctcaatataagtcctatccatatacatgagaatgtctcgaatcatctctatttttttgttgtgctcattccatttcttattaagctcttctagaaacgaccctccctgagctgcctcgataagcttggatttttctttgagatgagaagtcatagtagcaataaacccagtatatagcttctcaccaaacttgtgcaggaccatgttgtacgcatttctgagccacaatatacacaaataattccattaacacgaaacctagctaagttccagaaacattaccagtttctacaggattcaaagaaaggcaagagaatgaaagaaattgac

SEQ ID NO: 15505 - DNA, 2053 bp, Arabidopsis thaliana landsberg
cttttcttttacagcggtgaacgagtcaaacaagcttgatacacgggacacacccgaatataccaaggaaataatagaatgtatagtagttattacatgggaatgtgacactagacacttttagaaaatgttttgacgttttaggtacttccaagagttttggcactttactttatttttggtgagaaaatagacaaaattacctctgcgattttgacgtaaattaactaaccttcttttcttattgtggctgattatgttctttttaatatagaccgttagattaaaaatatatattttcagatctatggctaagatgaaataaaaagaaatcattctctggttatctagatctgataagaatatctctgtgtttttctctacaaagaaccatgtcttttctatcattctctctaaaataaatctaaaatttaaatggcgagttcaagatttgtaagtgttgagtgtgtgtgctgagagcaatgatggagtttgtgaagatagtgtaccttctgtatttactttacggagaaggctctctagatttcgattttgtgtaggttcgtaacctctatttaacgaacacaattttgtttatttctttattttgtgaaaacatgattcacataagcgaaattgtgtgttgtcaagacgacgagatctgatgcatatggtctattctcgtagtatcaatatattgtcttgaaggtagagatctctgcaaatttaaacaaaaaccaaaaaaaaaattcggtgtacataataacgagtccattcatatgtgccatacaaaaacctttttactgagccatatccattctacacaaagttattgtataaatctgctccatctacttcattctcccaaataatctctacgtagaacaattctctccatgaaagcatataaatatatcgtaaccataaaaaagggtgataactttactaaacagtaaaacgcactcgcaacaaatcaaaaacatagttgtccattgatgatgttgtggatcttaattctgattcaactttaagtgaccggtttaggtgttgtggttaagaggaattgaggaccggttagatggagtgttttaaaccggattgaagaggctaaaggaaaccttcttttcgcgagagagggtcttctgtttctatttgggacttagtataaaagacctttatttcttcttcttcattattcgtgtttcatctgtaacaaacaaaagaaaagcttgagactccattgttgagctctgcttgtactctgtaattctcattcttttctagtggattgtcgaattgatttggccccagacgtagacttgatcataccgatcttgttgaactgggtaatcaaatctcttgtgttgtttctttcgttcttcaattcgtttctgttcttgagcttattcgaagtttcgattgctgagttttggaaagtttgtgaagatcttgtgttgtgaattgagcataaaacgtaacagattggtatcagagcccaggctttgggtggttcgttcacatcgcatcggtcgatggcgacgacgacgagagtggagatcaaagccttcgacggcgataacgatttctcgttatggaagatcaggataatggcacagctcgaagttcttggtttgaaaggaactctaactgactttgctttgacaaagacagagccattaacgaagagtgaggagaagcaagtagcttctggagatgaatcatcagattcaagtgctgtgttgactaaagaagttccagatccgatcaagattgaaaaatcagaacaagcgataaacattatcatcaatcacataagtgacacagtcttgagaaaagtgaatcactgtaagactgcatctacattgtgggaattgttgaatgaattgtatatggagacgtcattacctaaccggatctatgcacaattgaaattctactcggttagaatgatgacttcaaagaagattgatcaaaacgttgatgattttctgaggatagttgcagaattaggaagtcttgatatcaaggttgcagaagaggttgaagcaatcct

SEQ ID NO: 15506 - DNA, 5405 bp, Arabidopsis thaliana landsberg
caaagataattagagatgcagtagggtttcgtaatccggagcgttttcctttttagattgatttctattgatttaaggatttgattttgttgtgctttgttttcatggtgtaggttgaagcatacaaccgtgagaggagctcacagaaggtgaagcggcatcatactttggctaagtctgaagttttgggacctattgtagttgtgtaggaagagacataaataaaacatttgctgtggtcgtcgattgtaaataaagattttagttgtagaaatcttatcagcaacactaagctataaaaacgtcgatatgatcaagacatgttgagacttctcgcacttaaatagatgactagtctcaactcttccatttatgtctttctgaaagaaagttgaaacacaacatattgagacttctcagaattaatatgcatatcctgaataacatgtacactataagccaaaagctatgttggaataatagtagtaaccatgatcatgaaacagcctcctctcactgttcgttcttatgaggtcggttaaagctttttttacaacagaagagagtctttgaactgttattacaacgaggtgttgtcgtcggggagaaacaggtatctgaaacgagaatcgaaggggagtattccgcagttccgtgaagcgagaaggctttgtcttctctgagagatgcattgctccacaaaagcagcttgatgtggaggaaggtaccttgatatccagacccccaagttcgaatcctccaccaaactcttggcataacaatggagcattttgggtagtaagagcttccctttgctgctcagccctaccgatgcttgtatgaagtccctttgtgcttgtagcatctcttccttcactcctttcgcagagtagatcctgacctgcaagacctcttcgtgttaagaaaatgactgtttatgacttttggaaacgcagattgttactgagttaagttaccgcaggtgaagagtacattccacagcttagagcaaagccgagaagaggttcatgtgtatcaatgcttgccctgcgctgttcttctgatactttcatcttgtggatggcaagaagcaaagcctgcatcagcaaacagagcaaattgtttaactgactctgaaagaggagaaaagaagagcctcacagaagaagctgggttcaaagctcatacaatttgtggcctgtgcataggcggtttcatcttcagtatcacatattccattgtcgccgcagtatatgagtgccctccaactgtataggctgcctgtggatccagtacaaaaggaatcaaataaggcaacaaagaaatgagaagaacaaaacacaaccttctgtcaagtgatataaccttttgcatcaacgagaaaagcttcaggtcgctttttgggacgccataagccaaataagcctttgttcacataaacaaccataactctcataagctttcgtttcattcagaatagttcttgataagtataggggaaaaaggaacttacatgcattatcaacgcgttataaaggttaatccagaaagcaagcttctcgttgcagcttaaatgaataggatttactctagccaattgctcaaccagtgtcctgttcacagaatcaaccatggttatgtaaactgagtcttactgttcaatcggattgaaacacacaaaaaaggaaactctattacctgaacttcttcaatgccccggaagcatactccagctgtttcttccctacagacatccaagaaacctcggatgccaaactgtagttcccaatctccgcccagcttaacttcccacgaactctataaggatcaaagacatctcctgtggccaaaacattggcgttattttggatatctatttgtgggctttgcacccatgaggagatcattgaccgttctgttgaaggccaccattatgctgagcttgatagatgcccgcgaggtgatactggagagcggtggctttcgtttgaggaagcttttgaagttgctgttggatcagcaagagacatgaagatattcttcatacatctcaccatttcttcagataatagattaggttgatcccacaggtacttaggtggcattcctcgaggtagcttcctcgcatttgtctttctcattagcctcttttcaagaaagtcattacttgggtccagtgtttgctggtttggtatacaaaaatgtcagatacatttcttctttcatgtaaactgtatctcttcgtttaaacaaaccatcctaaggcctcagggtacaaaataaagaagaatatcagttaatacctcaacagttgactctgctggagatgattcagatgaagattcttggtaatggactatttggtcttgagatggactgtcttctgctgattgatgtaattcagcatctgactgattcaaatatcttagggaagaagaagaattctgcataactaagacatagttataaactgacacagattacaaaacaaaaatcagtgatgaattaaggagttacatactagtggagaactgacacagattacaaaacaaaaatcagtgatgaattaaggagttacatactagtggagaagccgaatgtgtcaactggtattccgcgagtctcctctcgtttctctcttggctaagttggaaattcagtgacatcatttcttgctcgagcttagtgactgcagtctctagcgtcactatattggagagaagttcctgagcctgcacaattttcagaatcatcagtgaaaacaaaaggcaagttttaaagtgttatcacaattgaatgagttgaggtaacatacaggatgtggaacactagaagaataagatagctcccaaggatctttctccatgacactctctagaaatgtatgcaaatctatttcttgttggagttgcagttgcaatctttttacctgtaacataaaaacttctttcagaactatacagtatacacattccacgttatcattactagtcttattgagttcagaaactcacatcctcttcaagttgaaatctatatggaaaagattcaccactcgtagattcttcgcaagtttctctgccctgtacaaattaagcaagcaagctcttaatgttttttctaggacttcaacagttagtttctgaaatgaaaataaatacaatgtatcttcacacctctgacatggtaactgtgccctgaaatttctttccagaatgcgaacgtctgagaaatgggttgtatctgatcaaaattcagtcaactagtaaggagttgctgaatcaaaatccagaagttgaaaagagaggaagaaatggtaagccttacttagatttcaaaacttgagagtcatacatcttaaagctctggagtttggcagttattaatactataaaaccaaatgatgaacaaatgtacttcagcttcttctctcaagtacaaaaagagttagattacatagtccctgcataaatcatattcacataataaatgagataagataacatttagaggaaaagaccaatgttgttgtctactaagcacaagacactaaacaaatttttgaggttgacaaaggcttttctcagcacatggagtccaagtacaagatgaagaggcaagacaagacactgttacacctgtgaacatctaataaggacaaatctaatgtctcgttcacatcgatcagcgcagctaccatgtccgtttaggcgtcactctttgtcttccaactccaagcaaaagagccgacaatcctcccgagggcttcttaaccttatacgaggggttcttctatttctgtttcctctggttcccgatcctgaggttgattttagagtacgtgacatcgtatcaaatcacactcacctagcttactatgcgtgccctgatgcatctcattgagattttggtgtgaagttacgagacagaaaccgatctcatgctcacgcatcttaggaactgcttggagatccgtcgaatccagaagtcaacggtaaacagatattatacctctcctgcgaaagacaggaagattatctggggattcacgaggaagaatgagtcgtacactaactgcttcttctttgtggcccttgatgatgctactattcccgaagatctccttctttgtggcccacttcttctttgtgttgccgactcgtgaccgctccaaggcttcaaggaaacgttagaggatctccgaacccaaggcaaagaacaaaaagaagaagaagaagcaggcggatcaagaggcgagtcggaagatggatgagccgatttttacagataaagccgcttcggcaaatctcatcggcgcttgtgcaagccgtcttcttcctcctccagatactttgctggagtttgagctatacgcttatacggcgtcacacttccttagggtatgttcaactttcattactctcgagccaaattatatgtacgattcttttgttttcgctattttgtcaggtctttaactcgatgaataggatggtgcaatcctatgattccgccttttaaggcaccatgggggcatcaataagctggccgaggcccaggagagattagtcgccgccgaacgcgctcgggaagaggcaatttccaaggctgccgaggcgaagcttgcgaaagagaaggccaaggaaaaagccattgttaataaagataactctgtcaaactagctcaaaacaaccgtgtaatgaacaaccgttaaactccgagattgaccactacaaacgcatgcttgctgaggcaagaggagtccgagacagtgaggtggctcgggtgacgcagactgcgaggtaggaaacttcggcagtcttcaccacaaggcttaaaactgccaaagagaagatgtcactcctcgagaaagcaagcgaccggttcatttatttaccccaggcgagggccaatgacgagctgatcaaggcgctcaatagcggggggtccatagatcgcttgaaagcctttcgtacgaggtttgtgttaccgaacagtccggctcccatctgcgaggcgaagaggcacatcttgtggaagagcatgattcgtgacccgatggttcaacatatcatttgttccccatcatgatatacttcaatggtggggagacttcattgtaagtttgatatcttttaccaaatatttcaaaaaacttacttaatctttctaatttgtaaccttaatggttggtttttctttaggagcaatctttttattggaatccaatccatttgaatgatgtgtatcacctctggtatcatgtagttgatgcccgccttagagacatgatctctaaagctaaatcttctaggaacaaacgtgattggataagtgaggacacaaggcagtctatgttggagaattggagcaccgaagaagccaagaaggagagaaagacagc

SEQ ID NO: 15507 - DNA, 2790 bp, Arabidopsis thaliana landsberg
ccttaaacgattctcgacttcagcgactccatcaacatcctctgcttccgattggaaaacccatcatgaccttgttccgagtagccacagaaatatcttcaattctcttacaacgtcgtaactggatcattcatctccaatatgttaaatccaagctcccaaggtcaacacttacttcacctgtattcctccagatcctccgtgaaactcgaaaatgccctaaaaccactcttgatttcttcgattttgccaaaacccatcttcggttcgagccggatcttaagtctcattgtcgagtaattgaagttgctgctgaatcaggtctcttggaacgagcagaaatgctcttgcgtcctctggttgaaaccaattctgtgtctttagttgttggagaaatgcatcggtggtttgaaggtgaagtttcactgtctgtctcgcttagcttagtgcttgagtattatgccttaaagggtagtcatcataatggtttggaagtgtttggttttatgagaagattgagactttcaccttctcaaagtgcttataactctcttcttggttctctggttaaagaaaaccagtttagagtggctttgtgtttgtatagtgccatggttcgaaacgggattgtctctgatgagttgacttgggatttgattgctcagattttatgcgaacaagggagatccaagagtgtttttaaattgatggaaacaggtgttgaaagctgcaagatttacactaatcttgtggaatgttatagcagaaatggagagtttgatgctgtgtttagtttaattcatgagatggatgacaagaaactagagttgagtttttgttcttacggttgcgtattagatgatgcatgtagattaggagatgctgagttcattgataaggttctctgtttgatggtggagaaaaagtttgttactttaggtgattcggctgtgaatgataaaatcattgaaagactttgcgatatggggaaaacgtttgcctctgagatgcttttccgtaaagcctgcaatggtgaaacagtgagattgtgggattcgacatacggttgtatgttaaaagcactgtcaagaaagaagagaacaaaagaagctgttgatgtatatcgaatgatttgtcggaaaggtattactgtacttgatgagagttgctatatcgaattcgcaaatgccctttgcagagatgataatagctcagaggaagaagaggaattgcttgtagatgttataaagcgcggttttgttccttgtacacacaagctatcagaagttttagcatctatgtgtaggaaaagaagatggaaatccgcagagaagcttcttgattcggttatggaaatggaggtgtatttcgattcttttgcatgtgggttgttatggaacgttacgcaacagcgggaaactagagaaagcactggccctacctgagaaggataaagataatgaaagtaagtttacatgtgaatgctaataacgcggttcttgatcggcttatgatgaggcataaagagatggtggaagaaacagttggagtgtttgagcacattaaagagataaattcagtgtcacagcaagagttttacaattatgattcaagggttgtgtcgtgtacagcagatgaagaaagctatgagatcccatgataaaatgttgagattgggtttgaaacctgattcagtaacctataagcgtcttatcttaggtttcaaatgaaatcttttgaagaacatgagtcaaaacatataatcatttgagttatgcaaatatcttattctgccaaaagaccattccaccaccaaagtacgaaagaaagttttcaatgagatcaaagtttcaaaaatttgtcaaacaagaaccaagggggaatgttaaaataaatgaatacagtaataaaatttgtttggtatatataatgaccctattatatagttgattatttattgctcaagaggtagccactccatttctagttctagttcaccagattcaacattctgaagcttgatttgaacctcttgcttcactttaccatctgcaatgttgatgatgctatcttctataagagcattgtcgtgcgatttcagccattttccaatctgcatatctccaaacatttcagggtctccaaaagccattgcagatgtaatcagaggctggatatcaatctcagcttctcccattatgtcatcagcagaaaatgtgtcatagtcaaacacttgctgcaaaaacataaaatgtaagggaaaaacttctgtaatgattcatcaagagtagaaagtgattttggaaatattagaccaagcttttaccaatttcactgagccatagttatgaggaacagagagcatgagttcctcattccagacagggtttaagttgctcttcactacagtagattgagccttctggtaaaacgatgataacgatcagaaaaagagatgacaataatgatcacttaaacaatggtaagaacatataaagagaaaacctttcaagatttcaaaagtattcactataattacctgttgtcctagagtcaacacaacatagggatcacttgacatcatatctcggatggccatattggtaccctttttaatagtcaccttcaacaatccaataaactcaaccatgccttcaagttgctgtcattgtttaaatttaaaacaccatgaatcagaggacttagcagtatccaagttcaaagagtttgctctacttgcttgatttaaaagctagatggcaaacacaagatgaaaaataaagaagcttt

SEQ ID NO: 15508 - DNA, 1480 bp, Arabidopsis thaliana landsberg
gtggaaactaaatttgattaattgtgaaacagtgcatcgttagcatcgttaacgagagagtcaggaccaaaggtggtgagaggagatccggcggagaagaagaccgatggttcaactactccggcgtacgcacacggccaacatcattctatcttttctccggctcttggtgctgtcagtgatagctccttgaagtttactcacgttctctacaatctttcgcctgcaggtgaacaaataaacctagaatccgaatctgaatattgataaatgtttctgcgacgagtttgatagatttggtttgtgattttgttgtttgtagagctttatgagcaagctattaagtatgagaaaggttcgtttatcacttctaatggagctttggcgacgctttctggtgctaagactggtcgtgctccgagagataagcgtgttgttagagatgctactactgaggatgagctttggtggggaaagtgagtattcctaatctcgattttgattgatggagtttttgggtttatgctctgttttcgtttattgattttggggtttgattttttattttaggggttcgccgaatatcgaaatggatgaacatactttcatggtgaacagagaaagagctgttgattacttgaattccttggaaaaggtattaaattttgaaaactttaatcaatgttgttgagtgtagaacttttgatctaagtttatgaaatttctgttgttgttgggggttttaggtctttgtcaatgaccaatacttaaactgggatccagagaacagaatcaaagtcaggattgtctcagctagagcttaccattcattgtttatgcacaacatgtaagtaaaatcattattgactccttgtatgtcaatccattattgtgggtgaaagaaaacaacaaattagtaactggggagggtgtcaggtgtatccgaccaactcaggaggagcttgagagctttggtactccggattttactatatacaatgctgggcagtttccatgtaatcgttacactcattacatgacttcgtccactagcgtagaccttaatctggctaggagggaaatggttatacttggtactcagtatgctggggaaatgaagaagggtcttttcagtgtgatgcattaccttatgcctaagcgtcgtattctctcccttcattctggatgcaatatgggaaaagatggagatgttgctctcttctttggactttcaggtatagtagagacgataccaactatggtgttgggtgatgatggaaggaatgataaatcaaatgatacaatgcaattactcctgaactgacttgagaactgcttgcctctttgttgagtttagcgggtgaattgagattgatgattgtgttttttgttttctatgaatgatgattttaggaaccgggaagacaacgctgtctactgatcacaacaggtatctattggagatatgagcattgtgctg

SEQ ID NO: 15509 - DNA, 4055 bp, Arabidopsis thaliana landsberg
ggggcagaacatgctggcaaccggctgtcaccgtctcatgattggtggattcacttgatggtttatttggactgggaggcttcgggagttcaccagtaagatgggttcttatgctaaacctttcataagagacagactcctgtgaagaaatttaatgaaaaaattaatccaaaacaagaaagagctaacatgttttaggagcatattcatgaaagtaaatcatgaacacatgagttgatcacacaaatataacctgagacgaagttcaggaatgaatgcatgatttagcaaactctagtcaggttttcaataagcacagtattaacagcacatatggattttactactatttgcaaagcgtttcctgaaacatagctatcacacactagacaccaatgtagcctgaacaaaatgaagggaacagatatataatcgcaaaattgttacttgaatagccatacgaatataagcagaaatgacccttctctttagctccctcagcaacatgctgagtaattgaggcccaatattcactattgaagcaactacccaaccatcactagatttatagagatcctaatatacattacttagccaaggctctaaaataaaccaataaactaaattcacaaaacatataacaactgaggtgagcgaaagttgcaaaatgctagcaactacatatactccagcattttaaaaccaatcacaacaagaggtggtaccataatagaaaaaggcatgaaaagtacccggctttctgagtgactaacaccttccatggaaaatctatcattttccgaacatttattagcagaataagatctcccaagttttctccgcttatatgtttgtatcttcttactatctctggaactagcatttgcagaattagccatagcaccacatcctgcactccaattattcaatgcttcactttccaccaaaccatttggctgattatgctctgtacctttaccattacttgtcgcctcctccatgaacatcttaaacaaatgttttgatcctcacacagtggagctagggtttcaccaatcttccatcctacaatagacaaaacagaaacttgagtccttatataacccacaaacgaaatctcatatggaaatgttgaccattggtaacaaactatcaaaatgtcttcgattttatcaccaaataaaccatctagaaattagaaaaaacaatatcattccaacaaaaagcgatgaaattgaagacttctctaccataatttcatcagaaaacaacgaatttctagatacggaaacttcaatggagctttatctagacactacaaaagacggaacaaagctaaatccaaattcaaacctctagcgaaaaaaacgacaagagggaaaaagagagtaaaaccgtaccagtgtgaagaaatctgcgtaaagaaccgacgaagagcaaaccctagaaatttgaggaagaggattgatttaccggctctcggagattaagactcgccggtggttctgtaaatcccggcctttcttatctttgaatcatttttaaacttccgcgtcccttaaccggtatatttttcaacttggatctgaaaccggtcaaaaccggtaatcagtgacgcgaaactgacacgtggaagtagtaataaaaaccgcgccggagactcacggtgacggagtccaccacagtaacagattcgtgatgtgcacgtgcttttagttattccctgatcaaagagtcacaaccgtcggatctcaactttagcaatccaacggttataactgaaagacacccaccattctctgtttctttatttcacacttctctctgtttttttttgtctgagaaaatgaatctttttgttactcatgtgttaaagtagctcaagtgtattaacactcttcattctacaacaatcaaatcaacaaacaaataaacaataatacaattatcaatttatcactaagaagaactgtcgctttgagcagacttatcatcacattcgatttcgtatcttttctttttcttttcctcatatccgtttatcgcagatgagaatcctaacgcttgcgtggggtccttccccggtatcatgaacaccagcagtccaaccgatggctttagccacttgctgaagttggtccatcaaagacagtgaatcccttatgtaaacatgtcctcctggtctcaacatccggtccatctccagcataatgtttgttatgttgcacctatgttccacaattcattaccccaatcaagttcctgacctttatttttggattcaggataaaaagaaaaacgaagtttaaatctttttacctctttttctcaacagagaagagaaatgcagcatgtatcagatcataggttcttgggtaggtgtcaaatggctcacacctagaggaagtaagtgaaaaaagctttaaatgtgatcttgtgtaagttaaagttatgtgggattagaagcaaaagagcagaaggttatcagtctgtaccagtcgtgcatagcccctacaagtccacggtcataaataactggcaaggtgttgaatccgctaacgggaacaatgttcataacccaacagtcaagccccagatcgtttaatgctgctgcaaacctaccaaaatcaagaaatactagatcaaataaactttggtaaggcagaaacaaaaaaagggtgtgattgatggttaccctccaaaaccagctctcatgtccagaacattcctcagtttgaactccttccagcggaaaacccgcacataactctctactacttctaaccaaaatctagactctgccttcataatttcctttcgggatatgtacgcatccatttgaatgctttgtagcctctctggcggatcatgaagacgtgcaggctcatgtggagacaatagccccatagccattatcaggtaatcgggtgatgcacggtttcatatctacatacctggaacaggaaaccataaccacaaagttgagatttttagaaagttttaattgaaaagctgagaatttggtggttctatcatataatgtctatgcaagaaggctcaaaactattaaaaagaaactagattttcagatgcatatatgtaccaaacatcatcaggatcatcatcaggtctgcacaaaggaggttttgttccagcttcgcgactgacatagcagctgttgtttagaggcttcctccacacagcaatatatccctctttcttgataagctcccaacagattcgattcgtaaggtctaacatttctgaaaaagataatcaaagcgcagaagcaacacccatattttagttaaactccatagcagacaaattattttgttgaataatatacaaacctttccactgctcttgcaagttatcctcatgtttgtaaacgggttgtgcagcccaaacaaagtagcctcctgctctaagcattctattaacttcaagaagaagtatcccatctgtgtaattcatagaaacaaaatgctgtagtcacttactatgctaaagctcaaataacattagaggagaagcaaaaagccagaaattaaccatcgcgtgtccaattaattctgcatctggaacaatgaatcatctcaaaagactggcttggatacaacaacctccgtgtggcaaagacagccaccatcgcaggaacaccacgctccaatgcaaactgtatctgattctcatgaacatcttttggtgctacagacaaggttgtcgtgttacgctgcatcaaaaacgcaccaaagctcgccacaccacagccaatgtccaaagcaacacgggtgcgtgatccaaatgtaatatcaggaatcatctgcaaatttcaatctaagagaatataagatcaacacaaaaaaaaacagattagccaatacaccaaaaaaacaggtaggaagaatcaaaaaacaaacctgggagatctggtctaagtactgatcagctccatggatgaattgagttccacctccagggaaaacaaacttatctttctatcttataatccaattttgacctcctttatcttccactaaacgtgtatgagg

SEQ ID NO: 15510 - DNA, 2739 bp, Arabidopsis thaliana landsberg
  unsure (1)..(2739): unsure at all n locations
ctctccaggtccatcacctgacgctggcccttcaaccaaccattctccaaatctaaatcatcaacatctctcatgcctctgtctccgtcaacaccagaatcatcatccataagatgttgagcttcttctttgatatctttctcccgtttctcctccctttctttggctgttgctcttttggcatgcaactccttaacaattgctgccaactctgaacctaaccccaacatctcctcctcaatttgattcctctcttcctggtctcttcccctagccaaacgggtgcaccacacaactttaagacggttttgcaacagaaatttaacaaggctgaacttttcaaactgaaggtgctcaagcagcttgatctcaacatccctatcattaccctcagcaagtatcttaagcagctcttctgcgagttcctggcactcttgtgcatcaatcttctgctcatattcttgagatatctttctctgaagccaataagcatcaatatccagaacattaagactcgtatcctcctttgcctgtcttgcatcctcgccgtttattgccacacccacctggacaactccagttttgttaagctcaacaacatcttcatcctcctcatctttttcatcctggaccatatcaagatcactctcatcatcatcctcttcaaattcaagggcaacaccaatatcataatcaagtcctccatcctcactagctttaccacttaaagaatcaccaccctcttcatagtctgtaatcagttttccaatcgaaacaaactgactgaaaacctgatcagtaataacgtttagtagtttctcaatctctaccttcttttcatggtttttgacggattcattcttaagaactgccaaaatctcatcagccgcaccgcaaacaatgtccaaaggctgcccacccaattgctgctggataagaccaagcataatctcaaaagcaacccttgtttccttagtcttcggctgataaacaccatcctccgtatcattaagtacactcacctccctaagacgaactcttttgctctcacgagcagacaccaaatcatcacaacgttccttcttcttcttagatttattaagccgctcatctaactcatgaggccttcccctaacgacacgatctccaaaggatttcggatcaatcctacccctgagactctccggttcaccagaagattcatgcgtatcacgacgacgctcatcactgttaagaacaagactggaattgactttgtacccatactgcttcaacctggcttgctcctccgcaccaccaccacccaaattcgtcatcaccaaatcggaaaaacaaaccccaaattccaagaattaaatcaatgaaacaaaacaaaattcggaacgaaaaactcttctattacctctctcccgttctccgtaatcgtcgtcttaagaatttgatcgagtcgatgagttttttttttttttcgttcaacagtcttatatatacaccctaaacaagtcttaaaccgacaatacattgtcggccacaaattccaaacccacgaaggcctgtccggaagccgactaaaattatggaattgtccggttcaatccgttttaactataattagaagaaaacattaattagagttggttcttgatgagtgttttcgtataatcagagcaagttatcgtatcattagaccgtaccaactagccaatccggttttctggtattagtaaaaagcagcggttggatcctatgacaattaacggtgaggattcgatcttgaaagcaatgcgtacgtaaatagaattgggccacaagcccagtcttattcagaagggcaaaattgaaatctgacaaagaatttgacgaattgtgacaatgtgcgctttgaaaaaaaacgaaatttatcccgcgtgagatgaaaaattcaaaatatttcacacaggtgaaaccactttgacacgtgcgagctcgaaatttttcattttcaattacaaaacccgcctagaaaatggtctaaattttgtttgccagatcgtctctctctcaaaagcttttctctctttttctcctttgtcccctccactttaccgttcacgaagccattccgagctatcacgaaggaatctattgaagattcataggtaaatccatggtttgatttgttcaagtaggttctttgtgatgtgacggagatttgttgcgaaaacgaagagttgatctctttttcttgttgtttatgaggtttcgagaaaatctgattaacaatggagaacaagactgagttcttgggttttaatgttgcgatttcgattttgggtgtgttctaatggcatagttgtttgatttcttcagcgctcaatcacaaatgccagaagcacgagatcgaatagagaggccagttgattacccagccgcatttctcaatagacgctcgcatggtattttacttgacgaaccagcaacacagcacaatttgtttgggtctccggttcagagagtgccatcggaagctacaggaggacttgggtcaattggtcaaggatctatgacgggaagaggtgggcttgtgaggggtaatttcggtattcggcggactggtggtggtaggaagaggtcaaattcaatttagatcgccacagggacgagagaacatgangcttgggtgttacaaggcgtggaagggctcgtgcttcaaattctgtcttaccttcttggtatccaagaacgcccctccgtgatatt

SEQ ID NO: 15511 - DNA, 1419 bp, Arabidopsis thaliana landsberg
tgacgttttgctccccgtccctggtttgcgagggggggggaaggatttggtcagatctagaagaattcgagttttgggagatgttctccacatcaatgtcatggatagcatcggcctcgattccaagagggagatccgttggaaggtgcctgtccgtgacattgtcgtttgggatctgaactggtacgccagatctcgttgaatcgaatgaattcagatccatgatcgttggtcacaatagatgtgttagtttcggtgttggaaggatctattttcgtccccacagatggcgccaaatgtgggtttcgaaatccacactagagatttgtaaatagaattatgagaaaggatggatagatcttaacaagaactttgagatttatattgctaagaacgaatggacttttgtattgattataatagaggttttacaatgtgaaaggagattacaagtgtaaaagtataagtgtgaatgttaagctgaatgaatgtgtcttccaagtctttcttgcttcttcatataggtctacgcacgtggtagctctgtccgagatccgcggagattctcctagatattcggcaggtcagttccgagatatcaggtccgctccgcaaatatctccctattagtttctaggttgttattcgcttatctcccttcatcaggtgaccgggcttgtcaggcccaaataccaatttacgtacatgggctcatcagttgtgcaggtcctcttacttggtgggcttggtgggcttattggggtggcctgatatttttgcaggtggatttttggagggaaatccagttccaacatcttgttttcctggaaataatcttttgaacattattggatttgcacaagtttttgcctcgggcatttttcatggctcggtggtcgttcgagaggtcgctttgggcaaccggtgtattctggctcgggacatgctggatgactcttcattgaaattggttgactatctcccgaggcgatacaagcggttcccaaagcgttttctcgatcggctcggactgcgtttctaggatttaagtccctgaggtgatccgtttggctcagggtcgttagtctgtttgtccacaagacgaccactgttcttactgtttggttcggtcttgcttgtggggaatccagcctcaacagttagcccccagcttgttggtttacgaggtaatgcaacgacttttatgaagagtatgaccgagccaactgcttttactaatctttattaagagaatttatcgtcttttttttcatgatccatctacaaacaacgatatcctgagtaattgatatcgcaagagatataacctcactctaatctgagtttcgatattttaagaggcgtggttttcaatattaaactcaattttagctgattttcttgattgtgtctctttta

SEQ ID NO: 15512 - DNA, 2543 bp, Arabidopsis thaliana landsberg
aacaaatgtttgatttgcataaagagggaaagattgaatttaatgaagatttgtggactgggggttgggttgagaaagaagaggcagttcttggaaatgataaacttacaagaaaccattataaagcaatcttgctggtaactaaaacaagatttagctaacaatcctttatgtaatgtagtagtaccaaagagtctgatatgttttgaatgagacaggatgttctacttgcgggaatcgatacttctgcaataacaatgacatgggcaatgacagaacttgcaagaaatccacgagtgatgaagaaagttcaatctgaaataagaactcaaatggggaacagatcaatgataagtttcgaagacatggatcagctagagtatctgaaaatggtgatcaaagaaacatggaggctacatcctacaacacctcttttgcttccaagagaagcaatgtctgaatttgatatcaacggctacactattcctgtcaagacacggcttcatgtgaatgtttgggctattggtcgtgatcctgatacttggaaagaccctaaagtgtttctcccggagaggtttatggataataacattgatgcaaaaggacaacattttgagctgttaccgtttgggggcggtcggagaatctgtcctgcaatatacatggggacaacaatggttgagtttggtctagctaatctcttgtatcattttgactggaagttaccagaaggcgtggaggttaaagatatcgacatggaagaagctcctggactcactgtaaacaagaaaaacgagctcctacttgtgccagagatgagaagatcgtgtggttgagattagagctgactcatcatatcgacggttatgttgttgttcttgtttgacttttcaaacctaaaaagtatatcttatgaatataaaattaagtttaacgttacgtactacgtagcagagaatatatattgtaagataataataattgaagagagcagcaatgtactagtataatataaagactacacttatggagccactttaattgcaataaaatcagaaatgacaaacatttggcttctgtcacttatcttcgtcatttgtattcttgtagccgtgttcaaccacaagaatcggaggaattatcaacggacaccaccgtctcctcctggctttcctatcatcggaaacttgcatcaactcggagaattaccacatcaatctctatggaaactctccaaaaagtatggtcctgtgatgcttttaaagcttggaagagtaccaacagtcatagtttcttcctctgaaacagcaaaacaagctttgaaaatccatgacctccattgttgtagccgtccaggctttgcaggtactacaattttaactttggtttctctgttcaaacccttgaatcttgaatcttgaaatcttgaatctttttgtatcttgaatcattctttaggggcaagagagctctcttacaactatctagacattgctttttctccttatgatgattattggaaagaagtaaggaagctcgctgttcaagaacttttcagtagtaaacaagttcactctatacaaccgatgaaggacgaggaggtcaagaaactgatcgattcaatctccgaatcagctgctcagaagactccgatcaacttgaacaagacattgctggctttaactgttagtgtggtctgcaggacagcgtttagtgtgaattttgagggaactgtgctcaacagtgaacgattcaataacatagtccgtgaggcgctcgagatgttggggagcttctctgcttcggatttcttcccgtatgtcggttggattgtcgattggttcacgggtttacacgctcggagggagagaagcgtacgagatcttgatgctttctatgaacaaatgattgatttacatctacagaaaaacagagaagaaagtgaagatgattttgtggacttgctcttgaggttggaaaaggaagaagctgttcttggatatggcaaactcacaagaaaccatatcaaagcagtcttaatggtaactatacaaagatttgctttccaattgtaggattataatacctaaagattataatggtcttattacagaatgttcttcttggaggcattggaacttcagctataacaatgacatgggcactgacagaacttatgagaaacccgcgagtaatgaagaaagttcaatccgaaatcagaaatcaaattgggagaaagtcaatgatcagcttggatgatatagatcagctccattacctgaaaatggtgatcaatgaaacatggaggctgcatcctccagcaccacttctagttccaagggaagtaatgtctgaatttgaaatcaacggctacacgattccagccaagacaagactttatgtgaatgtatgggctatcgggcgtgatcccgatacttggaaagacccggacgagtttcttccagaccgcgtttgttaatagtaacattgatgacaaaagaacaaaactttgagctgttaccatttggaagtggtaggaggat

SEQ ID NO: 15513 - DNA, 2772 bp, Arabidopsis thaliana landsberg
gaaaagtgtgagacatttgaagaagagcttagaagagagatagaagagaagccaatgatcaagagagaaaaagtggaaccaaagatcaaacaggtatagctttttatttttctgatcaccaattagtctttttttctttttcttaatccttgtttcactaaaagctgattctattgcaggaagacatagcaacagctgcaggaaaatttgcagattgtcagaaaacaatagcatcacttgggaaacagctacaatctcttgcaacactagaagaattcttgatcgatacagctagcattccaggttctgcaaggtcagttcacaacaaggaagctttgttaggaaaagatcctcatgagtgcatcaaaacaatcaatggaagatcacttgagtttcttgcaatccagaacagcaataacaagacctcacctccttgttcatcttcttcggactcaacaacagtgtcattaattatgtcatcaaaccgagggagttctgagaagaatcgcaacggatttgccacggttttcactcgaagtagaaactcagtaaatttggggatttaggagaagcaataggttcgttcttggagtatagctagaatcaatctgttgttaagctggatttcttaccataattttcagattctgacttgttagtagcaaaaagatcacccttgtttcttttgctacatagtgtaatcttcttaacgtttatgtcttgtgagattcatctttgttatttcactgtcaccagtttgatggtctcatatgatgcattgtcaccaagtaaaatattgatttttgttttgtttggttagataaagacaaagaaaactgcaatctgtggtgctgctgaactgctgatgttgaatctattcattggtcgtgtctaaaatacaatattttggattagattctaaactggtacatgcaacagaacaagcacctgaggttctatggtgtagtggttagcactctggactttgaatccagcgacctgggttcgactcccggtaggacctctcatgctcttgcatttttttttcttccaaacattggtggaaactgaaccggaccaaacttcatcaactcaacactaaacaaactttcctaatagattgaaaagattataccaaaatttaactgaataaaccaaagttcattaagattaacttttatataatgattatgatatataaatcacaaccaaagatcaaaccaaaattctaatttggttccgtttccccaaacacaagaagaaaaaaagtctgttgactgtaatcatcaagaaataacatttacatgtagttttcctatagagagatacatacaaatctgaaagctattagaacttagtagcaaagcctcagatataaacaagagatgagtgggtagtattcatacaacaacaaaccatagattcggtaatggattgcctctaaattagctattattctccatggtcgtgaaggttgccgttctcttggtttcttctgtggcttctctctcttctgaaagcatgaaacagatccaacccgaggccaacattaagaatgttcattcctgccataccagacagagcgagtggtaactccacgcctttcccaaacttgtgtgcgtctttgatcagcttgatagtgatgagaatgtgaggaatgcatctcgcaaacacaaaggctgtccagtttaatacccactccagtttcaccaatgctgtgttgctgtctcggattcctgccattctccttagcttcctcacgtgtagaaagatcgaatgcatctgtttacacatccgaataacagaggtgtcacttttgttcgaacaagtagatgttgtagagttgagtctatatctaactagattgttatatatgaaactagtctagtttaactagagaatgttagcatagattcggtaaagaacagagaaaagccagggcaagttttcaggaagaaaaaagtggaacgtacctcacagatgagagtaagaataaggtagttgatggttacatttcggtatagtgccaatgtgaagcaaacaaggaggactagatggtgaacaagaatagaaggtattaagccgctgtataaccggtactgaagcatatcccactggtcatatgcaaagtagccgcatgagaaacacaaagctggatatgcccatttccaagtcccaccaaccaactcagaatgatcaaacatctcgtctaaacctttggctaagcattgattgagaagtatgaaaaccactgtagtaacacaagagcagtgttgaagatgaaaaatcataatcagtaaggcttaacgaagaaagaactgcattatactcaagctatggcaatcaatcataagactaatccaatcggaaataagaatcacattaagcaatgaaaccgtgaaaacacagcaccaaaggaaaattgactaataccaacgaccaatgtgcacacctatgataaaatttccccactaacagagcacaatcctatagtaagaactcaaatataagagaagagagaaagggacctgatgcggaggtgatgattgagtgcaaaagcgagacagaggtattaacaaatatagggtcacgagaaatccatgaacgaacaacccaattcatcaattgaaagaagcatccaccgcaaatcacccagagaagctccgtccggagattgaaagcaatctcaaacacgacggagacaagccaaagaagcagcgtcgctgagaaaaactgcccagccccattctttttccctcctgaactcccatc

SEQ ID NO: 15514 - DNA, 1136 bp, Arabidopsis thaliana landsberg
tttgttatttccatgtgaagatgatgaagggagataagatagtcccttgtctcttagcattttaagaaaaaattaaggtccctagccaaagtcgaaagtgcatcaagatgatatacaggacatgaattctattctaagcgtaatatttggaagttgtctctataataagaatttttacgttgttgtcaaaaaaaaaaaaaggagtttctgcatttggatacagaagcattattttaagttactctcaaacaggataagagataaaagatgttgtgcttctccattacagtttcttagaccaaattcaatcacttaaaccctcgaagttacatcaattattttcactttgtcactataccaaacagctcaactattttttacttgaactcttaaagttactgcaaattattttcactttgacaccataccaaatcaactatttttacttgaacccttttaagttactccaattaatttcactttgtcgccaactcaactacttttgagttactttaatcgaactcgttttgatggtcacaagccagaggttgtgtcttagaattatactatttaagtccttgacataattttcagaatgagaaagctcttgatgcttttaaacagatgttggctcatgaatattatatccaaattcaacaacgattactagcattttgcctgcttgtacctcacttgtgaatatgaagcagggcaggagatccacggctactcggtggactagaagatcacggttttgttactatcaaaagtaatgatcttgtttgataagaaaacaacggtttgaaggaagttagataaataacatgttggtcaagtaaactacaaaaatacaaaatcctttgtcttttgccgcgtctatacatccacactacaaagttatgaatccgaattacggcaacgcggcagctacagtggttagatgtcatgttcagaaatgaaattctaaggtgtacgtacgtcgacataatttagacgagtgtgctagttgttctgttcagacatgaaattatatgttaaccttaagcaagagggaaaataagtaaataaatgatagaggtagacttaattagaaatatggtccataacaagacaacatacttaataaagaaaatgac

SEQ ID NO: 15515 - DNA, 2009 bp, Arabidopsis thaliana landsberg
aacagttaggcgaaatcgtgtgtgtcttctccatccacaaggcaacgttttataattagcaacctccagatacagaagacaaatatttagcgtcatgatatcccttaagaaacctgcaagcaaaaaccatagaaaacaatggaggatgtcctcataaacctattttggacggaaaaaacaaacattagagatataacaaagttgtcttcctcttaccatttgcagccaccgatcacgaatatattagattgcgaacattgcaaatattgcaaagatgagaaattctgaatcacccaagtaaacttctcataccccattgaaatacgcacaaccaaactatcaaagcttttaaagttaaggacgatcaaaccaacgaaaccctacaatctgactgttcactggcactggcactgttgtgtcgaaccttgacttttgcagcgctcgtcttcttcacttattggttataggcttcggcccaattttaccattttggcccaatttaacattaacttatttgtggttggtttggaaataggtaaaaaaaatatggttgacaaaatgaaaaagactacattattttataggagaaaaatgttatttaatacctgaactttcaaaaagtggtcaaattaaccgtgaacttttgaaatggtcgttttatacctcaacaaaaagttgacttctaatttaatttataagttatagttgatccggccaaatcgactcaccgttaatacttcttaacagctctcctaacagcgtaactaacaactattttcgtccttaaaccaacgataacggcttgttagaccacgttttgtaacggctgttttatttcaatagtgatgtagacatacaccagctaaaaacttttatttcaatcctttcagaatacaaattttatcaaagtactacaaaaattgactctaaaatccatttaaccactattgatatgcattttaaaggcacatattatatatatatactccatatatcccgcgtacatatttcaaaaatatgtgactttgcaaaaacattcgtacatttcgatatatggtcttaattgtgacaaaaaagtcgatactgcatgcaccacactttattaggtggtcacccacattcatagccataggatccaaaactaacccgttgatccgtgccgtcaaatggttcctaacctttactcttttttttggttaaagaggttgctaacctggttcttattaatgaaactgaaaaacactcaacaagaaatatggactcaaaaaattatatcaagttaaaattaaacacacgcacatgcatgcaatctataaaaaagagacaagtccttatacactcggtgtcctaaagattttcagcttgttgtctcctccacttgtaacctcatttggttcccactacaaacaccgtagatatatctcatctggcttttactttcaacatctaaacatgcgctttctagtttttctacaaatgtcaaatagatagatcagttcatagacggcgccagtgacaatggtggtggtggtggtggtggaggtggtgagtataccggcggacatggtctagccggaggcggtgttgacaatggtggtgaagtaggagatggcgccggtgccaatggttgcgaagatggtgatatttgactcggaggaggagaaaaacacgaagagccaggactacacttgaaagagtcacaatctacaggtttcgacaaaaacatcttacactccatcatcgatctttggtccctcacgtccttgaagcaattcatcgtataattataattctctagatagcgacacgtggctggttctccggtgaaatagttagacccgtatctaaaatctcttagcttctcaagcgaacatagctcatccggtattaaaccggagagcatgttacgttcaacgttcaacacctcaagattctccatctgacccatcgacttaggtactctccgccaacgagttataactaatgccaaaaccgaacgttttgaagta

SEQ ID NO: 15516 - DNA, 4195 bp, Arabidopsis thaliana landsberg
cactgtcagtaaactaaaaactgttcttggcttttttctgggatttatatttgatagaagagacatgaaactgatacttgatttggtgtttttgttgtcatggaaacagtacttcttgtaccagctacttcgaggactgaagtatatccactcagctaacattattcatagggatttaaagccgagcaatcttctgttgaacgcgaattgcgatttaaagatttgtgatttcggtcttgctagacctacttcagagaatgattttatgactgagtatgttgttacgagatggtatagagcacctgagcttctgttgaactcttcagattacacagctgctattgatgtttggtctgttggttgtatctttatggagcttatgaatagaaagcctttgttccctggtaaagaccatgttcatcaaatgcgcttattgacagaggtaaaatactgtagagagttatgtggggttagcatggcttgaagattctgccttttcacggcatatgtgatgaactctgttcgaatcttgcagttgcttgtgacaccgacagaatctcgtctctgttttactcacaatgaggatgcgaaaagatacatccggcaacttcccaacttcccacgtcagcccttagctaaacttttctctcatgttaacccaatggccattgatcttgttgacagaatgttgacgtttgaccccaacagaagaatcactggtaagtttcatacatgttctctgttggtttttcttaccatcactatgttttgattaaaaactgaaaataccatcttgtgcagttgaacaagctctgaatcaccagtaccttgctaaattgcacgacccgaatgatgagccaatctgtcaaaagccattctcttttgagttcgaacaacagcctctggatgaggaacagataaaagagatgatctaccaagaagccatagcactcaatccaacatacggttagaagtgcagcagccccgtgaatgcctggtattacccaataaccatccgaatggctacttagtatctttgcctgttcttttattcatgtacttcttccacatatgtaatcttgtaacttttatttgtttgttcatgttatttactgctagtgattaagtgtagctccaatgtaaagtactccagttattaaagaatatctatagacttttttacttcacatactcttgagtcttccctagtaaacaaagagaagagagaatataattttgtaatgtacagagcctcaatatttgtgggagacattatagagctagagccagagtcaatgctgtcgccgtgagttgtctattctcattcaatgactttcaatagattttagtgggattggctttaggtagcttgcattattgaagtagaaatggtcaattccttagcaataattaggcacaaatgtgtctttctttagtaatattgtaatatcctttgtctgacaatttagagttgacttctaaaacgttgggttggaaataatgttgtcttcacacaggctgttacgaagcagacagcgatggctcaacttgcatcaacggaaacctttgagtttttgttttactttcttaatgtttctttatttgaagctgctgcgcatggagaataaaatatcgtggacccgagaaagtcatcattgctgtattattacttatactgtatatatgtttcagaatttcaggccattgttgacaaaaatagtgaaagatttctgcttgattttgagacatggctagttcagttactggcgatgcagaaacagcgatatcagcagattcaagcaccaaacgccgtggtggaggttggattacctttccgtttatgataggtgagagattctgtttctctgtttttatatttctcataacttcataaccattagagcttggaagaagaagttgaatttatcttatctttctatggtgcagctacgttgttaggcttgacaatagctgcgtggggttggttacttaacttgatcgtctacctgatcgaggaattcaacgtgaagagcattgcagcggctcagactgctaatattgttagtggttgtatctgtatggttccagctgttgcagccattgcatctgactctttctttggaaccattcctgttatctcagtttcagctttcatttctcttatggtaaagttaataaagagtccttgacatttgtttttatcagtttctctctgaaacagaaattcactaattctactcttgaccagggtgtagctctactgactctaactgcttcgcttgacactttaagacctagaccctgcgaaacagcttcaatactatgccagtctccttcgaaaacccagctcggagtcctttacacggccataactctagcctctataggaacaggtgggacacggttcacattagcaactgctggtgcgaaccagtatgaaaaaactaaagaccaaggaagctttttcaactggtttttcttcacaacatatctagccggagctataagtgcaaccgccattgtctacaccgaagacaatatcagctggacccttgggtttggtctgtctgtagccgctaatttcttcagttttttggttttcgtctcggggaaaagattctacaagcatgacaagcctttgggaagtcccttcacaagtctactatgcgtcattttcgcagcattacgcaaaagaaaagctgtggtttccaccaacgaaaaagactaccacaatgaatcaatcacaatgcccacaaagagtttcaggtagaaaaaccggctcgaaaaccgcagtttcattcttgcactgagaggccgttctaatgagttttcaaatacgcaggttctttaaccgtgcagcattgaaacaggaagacgaggtaaaaccagatggcacaattcgcaatccatggagactatgcagcgttcaacaagtggaagatttcaaagcagtcataagaatcatccctctcgccttagccacaatattcttgagcactccaatcgcaatgcaactaagcttaacagttcttcaaggtctggtgatggaccggaggcttggtcctagcttcaaaatccctgcaggctctctccaagtcataacacttctctccacttgcctatttatcatagtcaacgatagggttctctatccattttaccaaaagttaacgggaaagcacctcacaccgctccaacgagttgggataggccatgcgttcaacattctaagcatggctgtgactgccatagttgaagcaaagcgattaaagatagtacagaagggtcattttctcggatcatcatctgttgctgacatgtcagtcttatggctcttccctcctctagtcatagtaggaatcggtaaggatttgattccggataataattcattctacgagttcagatcaatccgaccatgttcttgttttttggttgcaggagaggccttccatttcccagggaatgtagctctgtgctatcaagagtttccagagtctatgagaagcaccgcaacatcgataacctcggtggtgattgggatatgtttctacacaagcactgctttgatagatctgattcaaaggaccacggcgtggttaccagatgacataaaccatggaagagttgacaatgtttactggattttagtcataggaggagtcttgaatcttggctattttcttgtctgctcttggctatacagatacagaaacctcaaggatgatgatcataagcaagatcctaaagatgttaaaacctaggacacaacatgttgttttcctagttttctttgcattgtagtagtcttgataatcaacctaagacacaacatgttcttgtaaaaattacaatgaaaataatgaaggaaccagtttcatgacttccacagatctttcggtttgtgaaacttcaccaaatacaaattcagtgtcaagattatattgtacattatgtgaaattgacaacatgattcttaaaacgtatttttatgtttaataataactagtggatgaaactgttgaagaataatgcatgtgatgacaatcgatgatctggtaaactctttttaatattcactagctgtcagaaactaattttcatggataaagaaagactaatgacacattattcctcattatttacattaaaatcatttctcagcttacacagagttactctgttctctatcatg

SEQ ID NO: 15517 - DNA, 1771 bp, Arabidopsis thaliana landsberg
ggttttggtaaatctgcgcgaatctgcaatgcctgagtttaaagaggccatggataagttccacaaaggtgaatttgccctgtcttgatcaccgacaaaacgacctccatagatgcacaataaaacacaaacacaaaatcatcaaccatttgtacaatttcgatttcgtcactgaacaaatgttttggagctcagtgtatttgatttgaagagcgtgaattaagagaagccttactgtatgtttcactgttatcgcttctgtcaaacactctcgaggcaaaaagtatcatctccaatcaatcttctatgaatggaccaaactcaaaaagcctgataagtatgagactcttatttaagtacctccaatcaatcttcgctggtccaactacgaccaatagttttagatatccttcttcttttcatcacttctcggatcttgctcacattgtcccatttatcattagaagcgtagacattggataaagctaaataagctccaggtcttttatcagcattcagtttgaaaagctcactcgcagctatgcttgcgagttcaacattaccatgcaaattacaagaactgagaagagctgcccaaatatctgagtcaggcctttccggcatcgccctagcaaattcgaaagctttattcaaatctccagctcgtcccatgagatcaactatgcaagcatagtgttccatctttggtttcatggaataatctctctgcatgctctcaaagatctcataacctttatcgactaaaccagaatgtgaacaagcagagagagcaccaagaaaggttacataattgggttctatacggaattccttcatcctagtgaagagttcgagtgcttcctcagggtttccattctttccatatccatcaatcatcgaagtccacgaaaatacgtttttctcttgcatttggtcaaagactcttcttgcatcattgatccctccgcatttggcatacatgtctaacaaagagctccccattttgatatgcgtgtaaactccactcttcataatctgagcgtgcacttgctgaccaacttcatgggacgtcaaaaccgaacacgctccaatcacgctagcgaaagttgaaatattcggatggaaaccagctcgttgcatcgaaatatacatgtcaactgatctcttagcagtttcacctgatctgctgaaaccttccaccatagcattgtaaactacaatatccttcactttggtagtattgaaaatctcttccgcatcctctacaaaaccttgattcatgtaacctgagatcattgatgtacaacacacaacattctcatctttcattgtttcaaacacagtccttgcagactccaacttcccactcttcacataagtatcaacaagtgcagtaatcaacacatcatctagctcaacatcacattttataatccgggcatggaccaacctacataagctacgcggcagtatcatagtcgagccacgactattagaagcctttagaaccatggaaagcgtgtacccatctgccttttccccagagtatgacatccgttgaactagaagaagtaattcctttaccaatccatgcttcaagtacccactaatcatgtagttgtaagccgataatgttggcttgggtaattcgtcgaacacttggcgtgcataactcaagcaaccgcattttaaatgaagaatgagtagtttgatggatatattcaaatctggttgaaacccagttttgatgatatctgcgtgtatcttctta

SEQ ID NO: 15518 - DNA, 1116 bp, Arabidopsis thaliana landsberg
cggcacgccaaagcgacaaacaatattttgccagaagaatttctggactgtaatcgaagttattttagccaaaggtttgcttcaatccacttagaaaaatattctacagccaccacaacatatttcaaattaccttgcgctggtggaagtgggcctaacaaatccaggccccatctttgcaatggccaagtaggctgtatcagctgtgtgagagacgaaggttgcttctgatctcttgcacatttttgacaattctcgcacttttgaactaactctactgcatccaaagctgccttcgaccaataaaatccttgtctaaacacttttcccaacaagggcctggacccaatgtgagatccacacagacctacatgtatctccttcattaattctataccttcggttctggatagacacttgaggagcagagagcaaactccatgcttacataattccccttctatcatcacatatggtcttgtccttgcctccattctcttattataagcttcgtcatccgaaagacaattaccttggagaaaagatataatttcagttctccaatcttcactatgtacatgagaaattgtaagcactgctctctccataagttcaactgaagatgcttttattgtttcgaagaacacatccgaaggtaagggcagcccttgtgccgctgatttagctagcaaatcggcatgctcattttgtcctcgagggatatttttaacagaaaatccttcgaaggaagcttcaactcttcggaccatgtccagatatttttcaagcttcggatctttagccttacaactcttatcaatatgacccgaaacaacttgagaatcagttttaagtatggcccttctgattcccattgcttttagcttccgaagccccagaagcaaggcttcgtactcagcgatgttatttgtgcaactaaaatcaagctttgccgcatagcaagttttaactttggagggtgaaaccaacacagcagctgctcctgctccgaaggttccccaagacccatcgcaaaacactatccatgcttcagcatctttatttgtttcttcctcctgacccctggcgtccagtcagcaatgaaatccgctaacg

SEQ ID NO: 15519 - DNA, 1623 bp, Arabidopsis thaliana landsberg
  unsure (1)..(1623): unsure at all n locations
cattctggaaaagaaggcttgcagtttcagttacggttgtgggcgtagaaattttgggggtgcgttttggtaaagaatctgattctctgaccaggattgatagaagaatttcatgataataagatcattttgatggttgtatcaacaaggaagtatctattcaagattgtgtgttcctaagaagagaaaagcaggtttgagttgaagcttattttctgcagactgtttaaacaagaaatcctggataacatgaaaggttttagatgcaagaaaacatgggcttatgttttcaagatggattcttctgacagtgtctatgtattccgagtagaacgctagcaagtagtcaagtagctatcacttatgtcggtcgctttgtgaagttagaggtgttttgaggtctttcacatatttttaagctccatcaaggggagatactgatggatactggttttgtatgagtgagatgtaaaactcagttcacaagcatccaagcagggataagaatgtgatgcaatagtgcacgggtagtgttttttgccgtgttgttgcaaatatggacgtttcgggtgatggagcttggttggtttactctaaactgatgcatatttggtttgagaattgatatctatgttggattattnnnnnnnnnnnnnnnnnnnnnnntatgtgacaaagacgtaaagatctgatgggcgttgttgtttttggttgtcataacgctgaagaaaaagacgtaaacacggttattctgattgtgaagtatcctctaacaggtatgattaaggtcattctggactaagtgttttaacagtgttttatcactcaagcagggggagattgagaaggttcagcgaacagattgtaagcacaatgatataggattcatggagagctttatatcttgattattgagtggtatgcgtgctttacatggagagcttgagttgtaaaactcagttaaaaacggagagattgaaagtgcagatattgttgggacagtattgaagtacaaccgatgagatcgagagtaagtcgttcgtgacgtaacgtagaagcaaaaaggccatgtggttcatgggcctttattcaagttaagcccaattgcttgtagagacttgaagcgtggcttaagtcgtctagggtttttggcacttgatatataaactaagagatagcaacatgaagagttgcacgtctagggtttattaagagatgcacacttgtgtgtggcgtcgtcccaccaaatacagatgatgatcttttggtggtattcctttggaatctgcagccgttagagaagacggtgatgcaccggctgccgggtggtagtcaagacatgcgtggcttgatactgtttccaaagtccatctagaaaagagtggtaggcatagttatgctgtaatatcatatgcaattgtatttgcaatcttgttctagtggaattgtttctggactaggtcccgcacatgtaggttgttaccgaaccccgttaacaaatctctgcgtgtctctactttatgcttcttacactcattacaaaataaaatcgtacaaacgcatagacctagcacacacatagtaactatacctccatccgccaatcaatttccatcgggtctt

SEQ ID NO: 15520 - DNA, 941 bp, Arabidopsis thaliana landsberg
ttcgttatgtaaccaaacaaaagagcttttaagttttggtcgtacaaaaaaaaagaaagggaaaatgaagataggacctgtagggaagcatgatgctagaagcactacaattgtaaactgggacgaaggatctcacgatggcttcatctctcagatttttctatctcatggcgtcgctggaattatgtctatccaattccagttcgtgatggacggaaaactcgttttatccgatcgtcacggtccattttccggcaacatgtttgacgttgtaagtctgatttttgactcttcttttttctccgtcacaatttctacttccaactaaaatgctaagaacatggttataactttttttttataacttaatatgtgatttggacccagcagatagagctcaactatccgcatgagtacataactggaatcagtggagagtattacaagtatgaagccaacaatcctcacatgaggtctctcaaattcaataccaacactagcgagtacggtccttttggcacctccggttcgagcaacgacaaatttgcttttaaactcgggaaatctcctcagttcggcggtttccatgggacttatgatgcctcgggactacagtacattggtgtttatctccgcccaaaaacagttctacccaaaatagatacgggcaatgcagaggaaacagagtaacaaattgtactgggctgaaagtgttcgtatacgactctattctgctgattgtacattgttaattatgaaaattcttctatgaataaactgatatgtgtaacagatagattcgcaaaatactttaacctttatgatacatcattatcaacaccagatgtacctagaacagaactcactatggccgataaatgctttaacaaggatattgttgggaataattacactctagctagcacatactttctgtctga

SEQ ID NO: 15521 - DNA, 2987 bp, Arabidopsis thaliana landsberg
cgaagacaaattgctactgtataattcgttttataacttttatagatcatattataaaaacggttataagggggttataatgcatgatatcaaacatttataagatttttcacaaaatatttaatgttttatagtgcttagaagatttttcttaagaaatgatatgaaactagaatttttgaacaacctttttctggtctttttgaaaaatgatatcataaaggtggtaattttcaaaatttcccaaatttgaatacaaattcaaatcatattgtaggaaagtgatcaaatatgttaaaatttagaagatgaggtgagaacaaatgtgcagaggagatgcacttgctaaatttgcatcttcatgtgatttgtattttgctttttagattgtagtttaccactttggttggttacaagtatttggagaaaccatgtacttgttctttgagtattaataaatatgattataataatgtggtatgtttagaaaaaacaaaaaaccaaatatcaaacctaaactcattaaaagtaaagacacatttgattaaaatctaaaccaaaaacgtacaaaactattcacttatgatgatattatttatcataaccaaaactttaatcaccatacgtaccttcgatttgtttttctctcccaaactggtcgtcttctcaccctctggtttactactactccggattgaagaattttgatcgtctcgttgctaactccacgatgtctatctgacgcttaatcttctgacagaagaaaaagacacagcataaaaaagtaagcacagaacataaacggatgtttattcttttctgaacggtatatttatataaataacgaatcacttatcaaaaagctggagtagctcaattggttagagcgtgtggctgttaaccacaaggtcggaggttcgacccctccttctagcgtttcttttctttttttaactcgtcacgtagtttccttaaatgggcttcgtcgaggcccatgccaacactttgtgttgattattattccattcgctttaaagtttaaagttttggcgatgaaataaaaatgtgacagatgtgttgttgcttgttgaatgtataaaagggtaaatatcagctagctaacaatggctttactataaatcaacccctgaaacgttgtttcagctaagaatgttggagatgggacccgtaaaccagtggcgggcactgaaaagccaatatgagagggttatggccaccaaaccagcaactgccaccggagtgtagttgagtgtctctgctgttatgggatatgccacgggtaaggagaagaggactgatatggttacaacccacaggactgccacccacccgactaccattccgtattttcccaggctgaatggtccaggtacgaaggtgttgcgcgcaagcgtcactctcaatataatcgggattgcgtatgctatgtacagtccaatcgttgcgatcgacaccattgcttggaacgccactatgctccccagtgactgccagtttcatctcatcaatcagcaatcccaacacacaaaagagagatacacagaaagagagaaggggacttacggtgagggccatacaaaatgatatgagagcagagagccaaaccgcattaatggggacctctctgctgttcactttgtgccataacggcgacattggcatcgctccatctctcgaaaacgcatacgccatccttattaaccaaacacacatatgatcaagtcctaaatgcagacagaatatgttttaaccaaacatgaatgtatatatatacctggaattgctggtgacagagctcatgccacagaaaaacacagcaaccgcaacaacgcctaagcacacgattccaccagtaccgctcccaaacctattcttgaaagctaagtagaagatctcagcaatggcatacccaccagagttgttggtctcactcagaagagaaggtatgtctgtgacggcatagcttatgcccaatatataaccccatccaaacagaattgatataccaattgcactgattattcctctgggcccgttcttgtctgcgtcgactgtctcttctgtctgcaaatttactttttgttcaatcctcaagaaaagctaatcaatcattaaaaacagaatccattacactcaccatgtgggcagaggcatcataccctgtaatggtgtactggctcataaggagtcccaaaacgaatatgtaagcgtagctggtgatgccaaggccattatcagtgttgaaattggtaaagacaaacttagtggttgctctttccgtagaaaccaaaggaatcagaatcatgagcaccaaaacccctgaatataagagatggttacttgtgtgtgttgttgagacatgacatgaaacacagagacaaaagagagattgggtaccgaggagattccaaagagcagcaagctgtccaatgaaagacaagacggagatggggaggctgttgagaagagcgtggatgaagaggatcccaccatggataccaatcacaacaaagtctgatcctttataaccgccgccgtttctaccgccggtggagagaaggacgatcacctgaatcaactgtgccagagagaagtcaacgctggccgtcactgcccactgcaaacacaccacaaccttacttttagccccaatgagagatatatctaatgaaaacaagtctgcttgaatgaatgttgcacctgaccaacgatgttgaacctgaaaaaagatttgtgaaaatgagtcagagagagacgctctcttgcttccaattccaaattaagaaaaaggtgagagaagggagtaccagccagtcatccaagaggcaagaggagcccaacgagggccagcgagcatagcactccagtagtagagaccaccgcaggtagggtaagaggacagatctcgccatagatacccaacgcacattgtgaaggagccggcaggaaccatccgtagccagagt

SEQ ID NO: 15522 - DNA, 5313 bp, Arabidopsis thaliana landsberg
  unsure (1)..(5313): unsure at all n locations
gctaaacatgccacaacagtacatatcatctaagatcgcagtttggacagcggtgagatataactttaaaactctatacaaacatgttttttggataaatattatgtttgtctctatatattactaaaattcgattacttctttttctgtcactgaattaggtgataacaccgatgaccaaatacgcgttatgtctcacaccgatcgtgctaagcttagaagaagttatgccgtcatcagggaagatcagatcctacggagtatctatgcttcttaggacgattttggttctctcaactttggttgttgcacttacattcccattcttcggtaaaaataccctaactagcttctttttgcatgaaactaatacaaataaaaccccatatttatcttcatttgttcttaatctttgcagcgatcatgggggctttggtgggatcattcctcgcaatgcttgttgtaagtcaacgtaaacagaattcaagcaattaccaatattattaggcatatcacatatgttaaaaaggattcatatatattttgtttatcgtgcaggcttttatctttccttgtctttgttatctcagtatcttgaagggtagattgagtaagacgcaagtaagatatatattattttattttattttatgccataaagtagagtggttattgttcgattcagtatttgattttcccataatttcatttattatttttcgtaaactatttgatcttttggcagattggaatatgcgttttcatcataatctctggcattgtaagcggttgctgcgggacgtactccgccattggaagattagtaggagaattgaattggatggtacaatgaagaacaatgaaacaacatatgttaaattgtgaaacaataagagattgtctttttataagtttaatgaaatttaacagagtagtcaaaaaaaaaaacagagtgatcaagatttgtgaaacgtcaagcagtaatttcaataccgtaatgaagctttattttaacttgtaatcttcttttttcacaaaaagatcttaaacttcgtcgacctccttttttttagggtaataaaaaatctatgttcagatgaatgaataattaagtatctgacttttaagatttgttatttagttttctttcatctgactcaaattaatagcaaaaatccccttagttacatatacacgttaacaagaaaaatagcaagataaactcatgatatgcaacaaaaaaatgagttttgcggtaacaagtttagatagttaattatttgattagtatgataaatatgtctttaaaaaacagtagcaaagtgaaaacattattcaccttacgtcgaaaagatgtttctcgtgttaaatcatttgttatataatatgtattatataatatcatattcatttattttggtaatttaattataattgttaacttacacattagcaatttagttatcgtcctaatatcttttttaaagtggtaaattgtatgctccattatagataactattatacataacaaattattttatatttttatcattttaacattcgttaactaatagattaacaattatttattctcgtaacatgttaatttatgcattaatttatttatttatcatgagaatttgtttatcaccgttaacttattagttatgatgaacgttgaacttcttccttctctatgataagggtaaaaatgtcaaaacattactctctctcttacccacctaaataataaattttcatgcataaatacttaattattaaatacttaattattgattcatagcatatttatggcaatttctctttttaaaatttatttttgacaaatcaaatccattccaaatttccaagcatatacctttgactttggaacatgtgaacgttacttccacactaaatatcacgaccagaatataatttttttttggtaaaaaccagaatattaatttgtttatgatcatgtatcaattggattaatacaaactcgacgtgactgcaaatcaaactcagaactcaatctcttttttttctcatattattcatttcgctcctttgttgctctgattcgactctgttttgaaacagagacaacgacgatgaaacttgaggagcaagaaagagacatattgtttccgacagatgacgaggaatgccaagttgatgtctcctgcgatgacgaagacgatgattctagttcatcttcttcattatcccagaacgattcagctccatggcctcggagttatcggtaaaagaaattcctctgttttttcgatatctaacgaattaatttataacgtttgtgaagattcttcctttttctggaaaatatagacaatctgtggatatcttgaccggagttacacctcctacaatcagtttcattcaccggagaagctctcaaacatcattcaccagctctatcgcttccttatacaagagacgtcaaaactctacaataaattcttttgcatcttccgcaagcaaagtaccactgctctccaacaaagaagatgtctcagtcaaatcattcctatcattttcgatcagcgatctctcgtgtgcagaaccaagtctctgctcgtttcaacaatctgttctcaatggtaagacgtagtagtagtatcgctgtatcggtattgattctgtctcaacagtgtctggtatccagaacacttgagggttaacggatttacgtgatgcagggataaatgtgctatgtggagtaggtctactcacaatgccttacgcggtgaaagaaggaggttggatcgggctttgtatactcttcttcttcggtatcatcacgtgctacaccggtatcctcctcaaccgatgtcttgagagctcttctgatctccgtacctacccggacattggtcaagctgcctttggatttacaggccgcctcatcatctccgtgagttatatggaaatgatttacatatatacttcacatatctccaaactaatatttagggttcttgatctctgctgagagttgcagatacttctgtacatggagttatacgtatgttgtgtggagtatataatcatgatgagcgataatttatcgagagttttccccaacattacattaaacatcgttggagtatctctagattcttctcagatctttgctatatcagctactcttattgttcttcctacagtttggctcaaagaccttagcttactctcctatctctcaggttccattttctatataaatgatcataagatccttccaatatagcttcgagattcgttcatatattctttaatatgtgtgttccattcttttagccggaggagtctttgtttcgatcttgctggctctttgtctcttctgggttgggtcggttgatggagtcgggtttcacacgggtggaaaagctcttgatctcgctaacttacccgtcgctattgggatattcgggtttgggttcagtggtcacgcagttttacccagcatttactcttccatgaaagagccatccaagtttcctttggtgctcctcattaggtgaaaatctctttgcctaaggttacttataatggatttcagataatattaggtcaaaattttcatttctccgtttctttttgcagttttggtttctgcgtattcttttacattgtcgtagcgatttgcggctacagtatgtttggtgaagccattcaatcgcagtttacactaaacatgccacaacagtacacagcatctaaaatcgcagtttggacagcggtgagatataactttaaaactcggtaaacatgtttgtctcgacatatatataattactaaaatttgattgcttctttttctcttactttaggtggtagtaccaatgaccaaatacgcgttagctctcacaccgattgtgctaggtttagaagaacttatgccgccatcagagaagatgagatcctatggagtatctatctttattaaaacgattttagttctctctactttggttgtcgcacttacattcccattcttcggtaaaatactcttaccttctttttgcatgaaatcatatataatacaacaataacaaaaatcatcttaatttatcgtcgtttgttctaattataactttgcagcgatcatgggggctttgatgggatcattcctcgcaatgcttgtcgtaagtcaccgtttaacataattacagctatcatcgattatataggcatatcacgtatgttaaaaaggattcatattttgtttaccgtgcaggattttatctttccttgtctttgttatctcagtatcttgaagggtagattgagtaagactcaagtaagatatatatatattctttttttctgtcataaagtaaaatggttattgttcgattcaatatttgattttcccataatttcatttattatttttcgtaaactatttgatcttttggcagattggaatatgcgtattcatcataatctctggcattgtaagcggttgctgcgggacgtactccgccattggaagattagtaggaaaactggattgatggtagaataatgaacaatgaaacaacatagaattgtaaaacattaagagatttttttttaagttctatcaaatacgtaatcaagttttgtgaaactttaaacactaattttaatacagttttaaagttttgttttaacttgcaatcttctttttttttattaaatgaatttatatatgagcaactaaaaatgctcattagactctaaaagatattatgaagtctttgcaagccatgattctagttccaattacaaacctcatagctaaattnnnnnnnnnnnnnnnnnnnnnnnnaaatgctctgacaatctcataaatggagctaaataatttcgtatatacggataatcagaaactgcattttaggaattaagaaatgtgtcagcaaaattttgaaaacaataatagaggaccttgaggataaaattaaaaacataaggggcaaatacgaaataacataataaaggaggggtcatttcaattaggtggggagcttcgagttcaagagatctccaaaatcgtcgacaacttcagacgtactccaacaacaaagtacaacaacaacatcaatcgagagaaagcgaataaataaaccaaataatttaaattaaaaatccactcgccggagacgccgtcgtttcgacgctggtgctccaaaaaaaatatgagacggaaaggagtcggattctctctcccgtcacggtggtgatgttggtgatcggttcactactttcctcgggttcaattcatcgatcgtggtcag

SEQ ID NO: 15523 - DNA, 1718 bp, Arabidopsis thaliana landsberg
agtgtttcatagtttctaaagttggttgtgtctcacggtgaagcaagaagcgggcaatgccattaataattgatcctggactctatatgttaaacaaatcaaacgttttattggttagacctaatcgaagtttaccttctgctttcaagttatttaccggtaagtactgttcttctaatcctggtttaaaaacatattttactctgttcttgttagcttgaaacttttttgttttgtgtaggatcagcttggatggctctatcgcacgcattcgtggagtatatcatatacggttgggacaatttaccaagaactttactcatgtactacaccaatttcgtttcttctcctgaaggttacttccatacagtcatatgtaacgtgcctgagttctccaaaaccgcggtgaaccatgatcttcactacatcgcatgggacaagccaccgaggcagcatcctcgtatgttgtctcaaagagacatgggaaagatgatttcgagcggatctgcatttggtcggaagttcagaagaaatgatactgttttggataagattgataaggaactgcttatacggataaacgaagacggttttactccaggcggttggtgcggtgggaaaccagagtgctcggttgtcgaagatgtggctaggatcaggcctagctcaggggctgtgaggctcaaggagcttgtagataggttagttacagaggctaaattaggtaagaatcaatgtgtataaagaatcaagcagcttggagagaatcttgcagttctatacacaccacagcttgattgtataattcttttgaagtaaataattattacttgtatgttaagttgcccacctgtgtcattagggtttacaataagtactatacaacaaatagaaagatatcatatattttttctatatacacaattctttagtagcaacaatattgttttcacttttcctactttctctcccaaaaattgtttcctataccaatccaaaccctggaatattaccattttgcttctgagccactttatattggttcataccatctccaaaatcttgatattgccggtggagtttgcagcaactaaggtcgacgactgtccccgccagcagactgaggatatgaactgcgaggcatcgtctacttcgagttccgacacagggtctatagttttgaacttgtacgacaaaaccggcattggaaatgccttgtggtacacaaaaacctgtccagtgaagcacacgaaattcacggtttttattgacaaatgggatcaacagttcttcttttgtatatttatgaagtgagagtagacatacctcgttagtctcagagcctgttgctatatacccgtcagagactgataatccaacaaagttctacacacaatgcaagaacagaaatgtatttgtaatctcataaagcaaacttgaaatgaagcaatagaaacgaatctcgaaaaaaatataccttaacattagtgtgtcccatgaatgagtgaagaggcgtttcattaataccggaaatagacattgataagtcccatagcttcagcgtgttatccgtcgaagaagaaacaagtgttgatgaatctacaaatctaacataactcacggtcttgtggtgaccaatcattgtgcaaagaggaagcttggggttccttagatcatagtagtaaactttgtgatctgctgagccaaatgctaaaaac

SEQ ID NO: 15524 - DNA, 4590 bp, Arabidopsis thaliana landsberg
ctggtcaggagcatatcacaggagtaattaggaagaaaaatccaatcgaaatgtacttgatttgtctaaaacacaaacaacacaatcataattgatcctttttgataattttacaggatttaatcacgcagtagtgtacaacacacagtagctttgcgatgagcttggtacaccatctcttcttttcccgctcgcatcgaccacaatctagcagtggtgtccgatgatgctaatagtacaaagtgaaaaccattttaaatactcttttgtctcacacaagttttccagtgtaaagagattaagtagtacctgttacaagatattctccatccattgagaagtcacagtcccatacccatctttcatgacctgttaaatgatattgatgagagtgtaaaagagaacacatacccctttcagaaacacggagagaccatatacctgttaaaactttctcaagtttgaaaccatcaaggttccatattttgactgttttatcagatgatgcggtcgctagatatctgctaacaaatatataagaccttacaaaaagaaagaagacaaagaaaacaggttgcaagagaaagaagaagaaacacataattacttgtttccaggagaaaggagacatttaaggatgtggttattatgagcttgtagcttatgaaggggctcaaactcggtcatcgtctagcaaaaaacacaatcaaatttttaaatgacatgaacaattatttcagcataatggaagaaagaaagtttttcttatgattagaacagtacttgtctttcacacaaggagcgccatacataacatgttccacggtcgttagcagcaaccaccattgtcccatcccacataaccattaaagaccgtataggtgtaccgacttctggtacctatatatagttatacaccaaagtaatattatatatctacagattcttagaaaatgtaactaggataaagaaatgtaccagttcacagctacacaaatctgctctgagatcccatacacgtatattaccgttttggtctccagatatcaattcagtctataaaaaaggataacaattaagacaactaagccgattgctacaacacaacactaacaaatgtacctgatttgggtgtaaaacaactgtgttaactggtgaaacacttctaaactccctttggcattctcgaaccctgcattttcggtttacgggtcaaatcaaaatgagcattgagctatatacagaagagagaaaaaaaacatgaatgtgctatatacctcaagtcccagatcttaacagagccatcttctgaccctgaatacatcatgtgtccagtatattggaatcctactgccataacatttttggtgtgtgatacaaaattcctcacctaatgtgcacaaagactccatcaagatcattcatatattcaatcaaaaggaaagataaacaaacaaaaaccacatcaaaaagaaggatatttacaggtatatgagggttgtaggatctgagatcaaagagtcgtatgtgaggattgcaagctgctactagtttacccttttcaggggttagctcaagcctattcacatgctgaatataatacaaaagtttcagatgaaatgtcaaaaaattaaaaaatgcatatgtcacagagattttagtgttgagaaaacacacaccaaatcaggatagcgaaaggaaaagtaacagcgaccggttcgggcttgccataatcggatggtttgatcatggcttgctgttgcgagatacacgggactatcatccggtttgttttcaaacattatttcttcaacagaagaagactagggttttgcaaacgttttttttttttttttctgacaatttggggatttatgctgaatttcagaccaaaaacaaacctttattatattaaaatacactattcattatctttcccttttttggtcaaatatagtaattatcttaaatatgcttcaattttatatatatatatattttttattccttcgtatttaagatattttcctaaaaaagtgaaaaggaaaaaaaaagaaattttaaattgctgagaaaaggacaaaaaaaggcaaaacaaaaaaaagtatcagtttatctaaatccaagtcaatattctaaattataatcctatataaataaaaactcttagtattcttatgttaatatgtttggttctcctaataataaaatctgaagccaaaacgatatgtctccttcttcgaagaagtttaagaaacaatcttcctccaaatcagttaagccaccgctagaagataacgatccgtccttgccatcgtttacttcattgcccgacgaaatcgttttggactgcttgcaacgtgtcccaagaagctattacctaaacctctgtcgagtctccaaaaccctaaggtcccttgttcggtcacctaagctctcccgtttgcgaactctcctcccaaagaattctgtctacgtctccttcagccaaaacataatcaatgttccaccagatacgatctaccgttggttcactcttaagaagaagacgatgaagacggctatgaagacgtttaggtataaattggtcaagattccgattccgttcccttctcatcattctatgtacaactcttccgcggttgggtcagaaatctacttcgtaggtggatccttcgaaccgatgtcggaactctggattcttgatactcgaactggaatgtttagacaaggaccaagcatgaaggttgctcgcacggatgaagcatccgtgggagtaatcaatggaaagatatacgtgataggaggttgtgaagacaagatacaagtagaagtttatgatccgaagtcgcggagttggaaaactacgaaagatcctgaggagaaaacgcagcgcggattgatgactcggttaagtgcggtgtcactggattggaaggtttacactgtggaagttgggagaatcggtgtgtatgatccgagagaaggtaaaagaaaggagacattgacaatcccaagtgatatcgtatggtgtatgtgtgttgttaatgatgtgctctatgcttgttattttcagcaggggttgatgggttttgacgtaaagcgcaaggtatgggttaaagtggttggtttgaagacacttaatgtcaagtttgatgtctctgtgatggcggagtacgatggaaagctagcgattttgtggagtgagattgatcaaacgaagatggagaagggattcgcgggacgatcgagtggtctggtattgtggccacaatgacaaatattcattgtgagtttcataattgtttagttgtttctgattgatagtgttttgttgcaccatcagaaaactggtttaacaaaatagtttaaccaaatttgtttaactcatgtcatcactatcaaaagaggaatctaaaaattaaactatatgtattctgcagttagctaagcaaacaaaatccatatacatagcaatgttctttgataaattaccatatatatacattggaaatgacttggacaataacccttttagctgtttaatcagttgtttgtcgcttgtgcatccaattgaatcggcaccgagttgattgattattcagaattcccatctgaaaatgtttagaaaaacgtgcaaagatgaatcaatttttgattatgggcattatgatcacaagtgtaagcttatagacgaactggtcaatataaaatgtattcaagaagcatttacttttatgcattgtttagttatttctcattgatcagctcatatgcttttatgtgttacatactcttctccatgccacaacgtaacttattccatgtaatgtctatatcattgaacaaaattagaatttcggtttaagatggtaggaattctattttgaagatttcaggtctaatattgtgaaggtatgggaagtgtttgtagtcaagtggttggtttacctctgcgacatatcccacctacattcgactatactaaatcaagttacctcttatagacggtgtaggaattagattatggatcggttatgacgatccattaaataatttatttagcaaattaaaaataaataaggttaaaaatacatgagtagtaaatagggacacatgaaaaacaaatgatcccttgtctccaaaatgtgttgcagagtatggagtgtaaaatagcttgcgggttccatttgatcagcttgtcacccgtagctactctgtttttcgaattagccatacgatgagcgaatacttcggagtcgggtacttgaaccagattacgttgtagttctccatcagtgactttgatgtgcgtatctgcagccacatctcttttgtgtgaaacactttgcgataatggttgttttgtttttctttaattttatattttgcatagacaagtatatttgttcaaaattcaaacatagttcgtgtagtaactaacgtcaagattttttttggtagactgaggggtgaaattatcaaccccattttgttaaagaaaaactacgaacaattacatttaaactgctttggggaacgatgtcccgttagcgtcttcaaccagaaacaaatgaacttcctcaggct

SEQ ID NO: 15525 - DNA, 5815 bp, Arabidopsis thaliana landsberg
gaggagctctccaccgttggatcgaattttgcgcaactcaagaagatgtttggttctttactcgagctctcattatttagagaccaaagcttaacttgcgtgaccccaattgttcccccaacactcttttactcgatggacaaagcaattacccatgcccctcaccatttccaatcaacttttctatctcttccaaagcaaaccaaagaccaatctccttcacccattgatttcgacaaaccctccttgaaactctctctttcatcatctcgttttcgcaaccccctcacaaagctttgaagtcttcattccaacccttcccctaaaacgctccttatcactctttaagaatccgttctccttcaccaatacttcaccaaagttattcgatcactccaaagtctatcctcaagcattcaatcggtttcaagctctaaatttcatcaccaaagaaaccgattcccttctcctttgatacctcttagagaagtagttcttgttcgccttgccgaagctcaccaccaatctccatggattcaagaaggaagtgttcatctcgggcaagaagatcctctattgataatgaggaagttgaggcatttgacatgagtgacatgacagaaccccaaattcgccaagctcaccgtgctcaaagatcaagcttgattcaaggtggaagctcaagccgctcaaccatgcaaagagaagaagtagctcgaggaaagagggttgttgaagcagaagaagaacaccatgaagaggcaccctttgaagaggtggtttctgaggaagaggttgagatcatcggggatgatacaccaacccctgtttggagaagaaaccggcctaggaggaagagagagccaaccctgagcaagtactatcaatatttgaaggagttgaagtttgagggaactagttaccctcataaggaaacgatgcaaaagcttggtatttgtggtgatgtggaatacttgatggaattagccaatcttgtaacattcatgagctgccaatgtgggggatacaaagaggagagctgccaactccttgcaaccctcaaagttcatttttgtgttgatgattcggagaaggaagagagagtaggtcttggttacataactttcaaggttaggggtgtcgagtatactcttgatatatgcaatcttgataccattttcgggttccctagtggagaaggaatccgccaagactatgatcaagaagagctgaaatccctttggaaaacaatagccggtccgaaacccttctcaccaagcaagagcaagagttcttcaatctgtaatcccgtgattagatacctccaccaatgcatcgccaacaccctctttcaaaagaaggccaccggatttgttagtgaagaagagctatgcatgatagaccaatctttggtcttcattttgagggagacatgagattggaagaagatggtgggggatagagtggacacttcgttgagtgttgttctcttggatcacttattgagttacaaggagtatgctgcaaccatccatcactcaggaattcgtgggagtttttgtgttggtagtctattaacgctaatactaggagccgtgggtatagaacttggagcccctgacgtgttgcccaagttcattgacctcgactatctcaaggggaaggattttcttgagaaaacaactccggaggatcgctatctcttcaagttcaaccactcggagcttggaccttctcttctaccctaccatgcgagaatcggacttcggtgaagacaaggcgcaacatcaatttcatgccatctccctttgccttgaacatcgacattggaggagctcgggaagatgaaccagaatatagtccagccgactatgagcaacatgagtactttacccaagttgattatgaggaacaaatcgagtttgagcaacatatagatcagccggagcacgggaccagcgaacaagagcaagctcattatggagaaggtactgaccaaggaggagatgagtttgctgaagttcacaagaatctcggtgtacttgaagagcttgggaaccttcccagcaagacaatgaagggtttcaagaagaagatgagaacaatgaagaagtcgctcaagagtatggcttttcaactcaaggaataccagagcaagccaaggccaccatctcccactcccaaagtaagaaggagcggttcaacgagctcagctacaaggagagctgaatggatcgatcaaccccgagcttcatcttttgagcctcgggaagtgatctccgagttgagagagccaaggagaaggcagagacgagcttccacacgctcgacaacctactcgaccggacagaacgagcaaaaccctcccgcctcaacatcagcccctgcttatactcaagagagtatggacgataaagtctccatctacttcacctgatcagtgaggtcacaccacctcaaccattgtacataccattagctttttttttttctttgtgtgttttgtgttttggtcttgaattctcttctcatatttttattacacaagggactgtataaatttaagtttgggggagggttcaagacatgtttgacattgtgttctcttttcttatttcaaattttgcatcatttaagacatagaaaaaaacataaaaatttgaaattttcttaaaaaatgatttcacaaaaacagagtgtcatgtagattccatatcattttaggattgtatatagagtgcttgcatttaggatttgctcatttgcataggggataatgattatttcaaaccgttaagcatgttttgattcaatgaagtaagttcaatgcccaggttgttagttctcggttgcataaccgattgtatctatgaagtaagactacaccctgctttgaatttgtaacttgactatactgctttgattcgaaacttgcttagctgatgccattccatatctattagaagctaaactgaatttgcaattatcatgtctatgcattgtttgtgaactcatggctaacatatacatatttggattatcttatttacttcaccaccccctgttaatccaagtagctgactctcatttttagagcagtttcccataccctgagcctagccttatttcaagccaaagataatttgtgtgtgattgtgaggtctttttcgattgagcttggtataacgtgttacgtatgagccgacaagagcagtcattcatgtagacctagcccacgctttttgggttagctaggactaggtggagacttgtatttgggattaggattgtgtatggattgaatgggaaagggaataggaatgaaaagaaaagaaaaaaaaaagagagtaagaagttaggcattgtgattcaaagaaaagggtaaaacgccctctatgctataagtttagaagaaaagccttaagtttaccaaagtttaaaaccaaacccgctagactcttgaatcattttaaagaagcacccttgagaacttgaaccaaaagagagaaagaatgagaataagggtagagttaggacatctaagggactgggatcatcttctgagctatcatactatatatcattgggtatatgggagtctccttttgtatgtgtccgttggttcttacctttagcattctagcattctggtaaagctcaatcttttctatgagagtcccctgttactcgaccaattcattagagggaccatttttgtctcttagcctaagcccgaaaccaaatgagttcgtaatcattgcattgcttgatccactattcgtgcttaataaatgttgaaggaaaaaaggttgatatgaatgtttgaatagattaaggcgggtgataggttgcattgtgacgagtatggcttaagtttttaagtaaggacctatcaccttgcaacctagaattacctacctggacattgatctcacccgctctatatgcatgcttcagtttttgaatccccaccttcaaacctctttttcaactcaagattttttgtttgcttgtgggcaagcaagaaataagtttgggggagttgataacactgtattttactcattttaggcatgtatttatcatcatttagctaagtgatcactcattgtatcatatcattttgcatcacatttagcttattttgcacacctaggcatttaggatcatcttgcatacatattgcatgttttggtgtgttttcaggtgcagaaggagcttacaaggaatctactcgaccctctactctatcaaaccaggagggaaacagcagagaaattcactcgacccacttactcgatccaggcagctacattggaggcagcagatcaatctactcgacccttttactcgatcctctactcgatcaagggcaacctactctacaagacttgttgatctatcacagcgtcttcagatcctccccgttccccactcaaccagacatctgagcataagaataggagaggaaaacgcatctactcgaccaattgatcactcggagcatatacacaaaggctcagactttgcagcaccctctttactcgatccccaagatcgagaatccatccaaaccgcctgaagtctcttttcttctagggaatctagggtttttgagactttagtataaataggtcactttgggatttgtccaaaggacaaagcttttatctcttagtttttctttgtgttttaaaatcttgaaaccttaattactcttaatctattttgtttttgcatttagttctttaagtaaagttgtttatcttgtttagatctacattttggtatgatttcagtaatttctaggtttgtgttcttagttatgttgcttgagtagtgattagggttcttgacgatggattagattagggtaatctctaggttagtcaggtggttaagattaggttagatcccttctggattcgttggcccctatgcagtttttgctggctaatgtgggaattcgaccataggtatccagcgtccaaaagacgttcaaatggatgcatgatctacgaattccagagatttgtagattctattcgaagagattggatgtttagactgcttaatgactttggtagattgttgcttaaaccctgctctgctatgtttcatcaatgagagttaagattaggaagtagtagagttatgagggtctctgtcacgcgagtggattgacccggtttttgaatctatcgtctagggtatgtgcctttcacctgttagccacttgatgaaccctagagttgcccttatcaatgaatccatccttaggacttctattcttcttagatttatttgtattcaccccctcattgcacttctatttaactgttatttgtgttacttgttgattgcattttagttcttaaatttgttacatgttggttttactcgacccaatgatcgagaaaggcttttaaagttctcattttcgttgtttgaatcctgacctaggattgttactagaaaccaaccatctctataatctggcttcgacggtcgtccttaggcttccatctttgtgcgccacaaaatcgacattgatcttctttttcgtcttctttccaaaatagcatacaattgttctgacaaatatcaatcgtatgatatggaagtcctaaattgcgcatcaacttctcggtctggtaatgtgaagtggtagcctggtttccttctggtaaaaaatctgtaaacatttcgcaaacggagtccaccaacttttcactcatattatactccgccttgttgtgcatgagtcgagatgctaaggataactgcgactgcccttcacgacatccatcgtaca

SEQ ID NO: 15526 - DNA, 6443 bp, Arabidopsis thaliana landsberg
ttttatgtgcaggaaatctgcaaggctcacggaagctccattcagcggaactacagaactctattgcctgcactgagatcgttgcagaaggcgatcaccagagcccaccaggatctggcagatatgtgttcttccaatgagtacacgcttcgctacttgtgttctgttccaaacaatcattgattatgttttctgcattatgtatcaccggaaattttcatcttcctttttcggttaaacaaattttgagattttgatatatgagtttctaacatctgaatacaaaatggagcaaagaaattaaacagtttgcaggcaaccataaaaagtacgaagaatgtgaataatttgatttaaacagagatttttgaataggcaaaagatgagccctagctatgaagacttcactaacagaagctaacatacaaacaatattaaatttatgcctagaacaagaactgatgtcgctacaagaacattacattatgataaaaatcaagagacatcaaaactttggaagaattcctcatagactctggcactcagaatcttcatggcgtccatctgggatacatgggggcatggaactccagacggggtatgtgagccgggtaattgtcggtgcttgcacggctctccatggacgcaccaagaaacagattatgcaccaacgcatcaaagttgagatcaatcatgggatgacgatatggaagctgatggagagaagtcgccaacaatctctgttctgcatcccatctctgacgagcgttgagcatttcaatgtactccgcctctctctccaactgctcccacatgtgttgctcccaagggtctaactttggcggtgtaaaaccaggatgctcagttttcaagtgatttttcagctgcgcataggtccctgagaaatcgcacttgtccacagtacaacacctcggtctagcattcatgaatctccgagcacaagtcgacttcatagtcccctgaacctctcctctgcagtagggacaatgtagagtcttgccactacaacggcttgagctgttgcttctgcggtactgcttgaaacaattggagtgacgagcgcttgtatcacacatgtaagcacgacatcctttggagaaagaagagcattgcaagaggacagcattgtgaggaggctccatacaaatcacacacctcacatcctcccattcactaacactctctaactcaacaggtgacgaagacgtctcgacttctttttgtttcttgttcctgcaagagcgaagcgggtatggcgatactctatttctgttgctagaaaccggcattttccctctttccttgtgcatcccacacactgaaatcaatagaaacgagtgttaattcacacaacacaataacacagatgaatatgaaagccaaagaatccataatccattacattcgaatagatacaacccaaatgttaaacaaagatcaaggaaacagaacaaggacgagctcaaatcagtctatattgtacggtattcgagcacgaacataatcccactgaaaactacattctcaatcaacgcataaacattctcagtctacattctgaaacaagaaagagacaaatttttttaatttattgataaaataaattgaaactattaacttatcggaaacagttctagaggttctcaatcatcggatcaacgcataaacattcgattcatcaggagatttcaaacgacgaaacagatcaattcgattgcaattcgataattatcgccaaagaaaagaaaaacaaattcaaacgcgaccagaaatttctgatcacgaccacaaaaaccgcaaaacgacagaacatcatcggagggatcgagagagacccaaggagtaaattaaatcacagccataagaagagaaaaagaaaacggaagctattaaatacctctggccggagaaaattaaaagaggcttttctttctttctttgagagagagagaaaagtaaagagagactcctcgtaaagagtttcgtatgaaacggtgaagatggatgcgcgtgcgtgaatgtgagattgtccgggtggtcatggttgggtttttataggcgtcgagagcacaagatatgtcttttcaaacatgaccattataccccttcttacatcttttttgtaataagtccacccctctctctactttcctttcccaatttaaaccacatttctctttttgactttcttttgctctttcctttatttgtttttccttttaaacggcttccaaagttttttttgccaacacttatacgtgtccttggcagaaaaatacaaataactggatattattctttttttttcttcaatagagatgattactcatattttgtttctctgtaaaaaccaaataaattgtaatgttaacttttggctttttcaggtttatattctttctaaatttttaacaaaattttcaattttcttatgcccaaagatatgcttctctaatctctgtattctaagaaaataaaagtttatcttccttaataagtggactgaaagaaagaaaatatgtattttttttttagctgtcatatctatgtatatacatattgtatttttcttctttttgatgcatgtatatacatattatctattccatttacgtgcaattacttatctagcaaataaaagaggtaaaaacacataccacaatcctaattccaaatcttgccagttgccactattatgcagtcaagtccaaggtattagaggccgtgtcaatatcaacgacagccttccaactataatatttcaatctttttcttagtaaaacaagtataattattgaggaaataaaatatgaagaagatattggaacagattacacgagcccaactattgggttaagtcggcccaacaaattaaaaaaagcgtttcggttcacccaatttagacccgacccgtcgtagcttttagttgttgtgtgaactgtcaagttgttgcggctagaagtagaagaagaagaaccctaactaaacccaacgccggcctctctttctctctctccccgcttctctcgtcgatcgctgaccatggccaaggacaaactcaagcctcttctctcctctgatgctgcaggtttccttcattctatctcccttttccttttcctattactcagttttgttgtgagctcatagctcttctcttgtgtttttatgaattcaacaggtgatatcgctgatactcctctccgagagaagaagcataacaagaagagcaagaagcgagctgaacctgaacctgatataccctctacacgagattccggtaagatttatcaaattaagaaattgaaggtttatagactgttgagtataatactctggattggttcagatagagatttcattaccggtcttatagtagggttcgtatttggtgatatataggtcttgatgaagatagagatggagtattggtagatgatactctaaatgagccaacgataggtgataaacttgagagtcttgacttattaaatggcgaaaaggttaacagtgaggagagtaatagagattctgctcctggcgatgataagcctcctactgctgcttctgttaacgttcttctgagacaagcattgcatgccgatgatcgttctcttctactcgactgcttgtacaaccgagatgagcaggtttcagatagtttctgtctgtttctttacattgttgcttgtttgttttcttaatttttctggttctctatgcgttacaggtgattgctaattcggttgctaagttgaattcagccgaagtactcaagcttctaaatgcccttctaccaatactacaatcaaggttagagttgatgatatatatgttgtgtttgctgaagctgatttatcaaatcgggagtttaatacttttttgctttgcaggggtgctattttggcttgtacaattccatggataaagagtctgttacttactcattctagtggaattatgtcccaagagtcatcattactcgctttaaacaccatgtatcaggttaggcagtgcttgtttttattgtacggctgtgcttgccatggaggctctgttagagatacagatcagaaaacactatagatgaatcattgatatgtattttttggttgtgtgtgcagctcatcgaatcacgggtttcaactattcatactgccgtagaggtttcaagtggcttggacttggtatgtattgtcttaccttaaaaccaggatgaatttggtttcaatgtgtaacctaggggtggcattaggtttgacgtttgatttcatgaatcagttagggaattacaaaagaaatcagagtttttgacttgatagtatgttactgaatcgccattgattgtgtgaatggtagattgtggacgacttggatgaagaagaagatgaaggtcccgtgatctatgaggacaaggacagtgatgaagacgaagaagaaggaatagaggaagcaatggagacagatgaagaggcagacgactcagcagatgaagctgctgatggtgtgaatgattttgaaggatttgacgacatgagtgattgataaagctcctgaaaatggcaaaagttttgatttgtgtgaggctgatgttagatgttaagaatatggctaaaaggttcaatctttcgtcaagaagtctgtaatacgtaatggttatatcgatatgaacgagactttgtgctaaggaagagttaatttttaagattaaaaaaaaatagacaagaataaggtgtatctaaaaatggaaagaatgaagttggaaaggtcaaaaatgatttagaaaatgatggatcataacagctagaaaagctctccttgaaaaatggaacaccattgaatagaggagaaaaatgtgatgcattcacatagatatatgattataaaggaagaaattgtttgagagaagaaggaagcaagtaagaaatggcgagcggacaggatgaggaattcagtgtgagggccggccaaatcgtgggccaagctcatgtcagtctttctgttcaatttctcttttacttgtgccttttgcgaccgtattaactttaaaaaaatattagtacacagagttttgtttgaaaaatgatgtttggtatcaggtgaaggagaatgattgcaacaactcttctcaagcttcaggttttctccagcaggttaacttaacccatcaactctacatgtttgtagttttaggtttttcattcttttttaagaaataagatttgatggtttatcagaaaggggagaaagtgaagagtatggcacatgatgcatcagaggcagtgaagaacaaattggggatcaacaatgacaacaatgaagaatataagaacaaaaaccctttggacaagaagaaccctaacaacacaaccagtccaagcatgcctggtcatcctccttcagatatctaaacatttctcaagattcatctttttattccactaataattgtctgtattaataataagggatattacacattgcatccaagccaacacatgttcagacttttttggctttggagatgttcacacttgttttgaccaatacatgttgagactttggttttgagttttctatcaaacactggtttacacttgataatttcatcccagccgagctatatttctattcacaaatatacacacacacaaactcccttaagagcatctattctctgcccatttgatggcagaccttgctagtgcatccattggatcaacacacttctttagcagaggatcatccccaggcaagaggtcccgcatctcatctgacccgagcatcaccacgtttaccgcctgcactagcagtacctgcaacgctatcctcagaaggttccgtgctccttccatgtcttttctcttcattgcttctatggatgggatcaccgtgtgctccattgttgccttgtctggaagcacagcctcaaatccctgttcatttccataatgacagagtcacttcatacgatggataatactagctttatacgaacttagacaaatgatagatatgttgttccaatggacacaatagaacactgacattgctttggagtttctcctggtagaaccctgctgataacgtggcgctagtggccatcacacctacacgcagaggattcccagcttcaaggggcttcatttttgcctcttgcagttctttagcaatgcattcacccatgtgaagcagaggaactaaactcccttcacatacctcttcataccatatatgtgcaatatgacagggcattaagattaatttagctccacacctctcaagatatctcctcttattccttagattttccacaattagctttggatcaaccggagtactctcttctctatggtaaagagaaggatacgagttttcctcgtataagagaagctccttgttgagagcaggatccgagcaaa

SEQ ID NO: 15527 - DNA, 1782 bp, Arabidopsis thaliana landsberg
gtctttccctagatgcatgtttcttctatttttatatattaatatttttttgtttttcttattatgttttctttccctttgtgaggaaaataattgcgatacgattatttgttttaacagaaaaaagtgaagcgaaaaagatgattcgaagtttgaagtacgattaaaatttttctttttccagatccgagtttgatcttctttaaaaacaaaaattacatttgtttagaaagtctgtcagttgggtcttgacccaattggtttacctggtaatcagaaatgtaagtgacctgagtacccttgacattagtcagaaaacattctaaactcgggatagacagtgtggtagttctttagaaagaagtcgactctaaaatactttggcgtaaaacaaaaaaatttcccttaaaattatgctttatttgtttgacataaatgtttcaaatatattcttcttttaatcaatgtagttaaatttttttgatagaagcacgtcagaatttcacactagtaatgtataagtggtaatcatcattgcctaaaacaatgattaattaaaattttagaattcgtcgtcgacaaagaatttttcttatgatgaaggttttgtgcataattatgaacggatccatttatttcactctaactaggaatagatgtttgatgggatacaagtgaacacgacacaaagtaacaaaaattcatttaacgtcacaaattattctcaatcgaatttcgaagtatcaagaaaaagggcaattaaaaacgtaatctcattatgtctttgaaatctaaattaaaagttgagtttattttaattattaatttcctttttgatgatgtaggggatgacaattgacaaccaatttgatttgaaagattaacataaatcattttgagcatacatatattgcttaaatcacacccgtttatctctaaaaacctccataatttatatcaggaaaataaatctagttattgatatcgccatcaaatatttttttcttaaattgtttttttttgttgttgttgaaaatttaattagaaagataagtggacaacgacgcgagacaaagacacaatctttagggccttgagtaaattagggacagcataaacacatgcactagtcctgtctttatttaattatgtggtgtttactctaatgacgtcgctttgattaaccaagtggtcataattaatatatcgatcgaattatataatttatataaatttgaataagcatgttgccttttattaaagaggtttaataaagtttgggagtaatggactttgacttcaaactcgattctcatgtaattaattaatatttacatcaaaatttggtcactaatattaccaaattaatatactaaaatgttaattcgcaaataaaacactaatttcaaataaagggtcattatgataaacacgtattgaacttgataaagcaaagcaaaaattatgggtttcaaggtttggttatatatgacaaaaaaaaaaaaggtttggttatatatctattgggcctataaccatgttataacaaatttgggcctaactaaaataataaaataaacgtaatggtcctttttatatttgggtcaaacccaactctaaacccaaaccaaagaaaaagtatacggtacggtacacagacttatggtgtgtgtgattgcaggtgaatatttctcgtcgtcttctcctttcttctgaagaagattacccaatctgaaaaaaaccaagaagctgacaaaaattcgaattctctgcgatttccat

SEQ ID NO: 15528 - DNA, 1641 bp, Arabidopsis thaliana landsberg
  unsure (1)..(1641): unsure at all n locations
ccatgtacattgcaggacacattctcctgccgcctccaaacggtagcaactcaaagttctgtccttttgtatcaatattactatcaatnnnnnnnnnnnnnnnnnnnnnnnnnnnnnctttccaggtattgggatcacgtccgatagcccatacattgacatgaatctgtgtcttgggttgcatcgtgtagccgttgatctcaaactcagacattacttctcttggaagaagaagaggtgctggaggatgtagcctccatgtttctttaatcaccaatttcaggtaatggagctgctctatgtcttcgaagctgattagttctctgttcccaaatttgtttcggatttcagattgaactttcctcatcactcgtgggttcttcgcaagttcagccatcgcccatgccatggttccttcagaagtttctatccccgctaaaagaatttcctgttacaagaacatgttactaagttagaatacagaacttcttaccattggattttgagtatttgattaattaccatcaagattgctttacctttgtttcttgtgaaattgttatttccaacaacagtttcttctttctccaacttcaaaagcaagtccacaaaatcttcacttcctacttccttttcttctttatgcaaatcaataatttgttcatagaacgcatcaagatctcgtacacttttttctctccgcccttgtaaaccagtgaaccgatcgatgatccaacctatgtacggtataaaatctgaggcagagaaacttcccaacatctcgaatgcttcacggattaacttgttgaaactgtcattgctaagcacagttccttcaaaacacacaccaaatgctatcctacatactatacttacagttaaagcaagacacttcttgttcaagtatatcgaagtctttaaagaagctgattccgcgattgaatcgatgagtttctgacctcgtcgaccataatgtgatgtgttgagtgaatagtatagcactgaagagctcttgagtacagagcatccttagctctttccaataatcattgtaaggagagaaagatatgtctcggttgttgtaagagagctctcttccccctgaggagtgagagatgaattaatgaagtaacaattcaagattttagtatgtggaatgatttatagtacctgctaaggaaggacggctacaacaatggagatcatagtctcttagagcttgttttgctgtctcggaggaagaaagtatgactgttgggacctttccaagattcaaaagcatcactggaccatacttctttgagagcttccatagagactgatgtggtaattctccgagttgatgtaagtttcctatgatcggaaaaccaggaggagatggtattggtcgatgttgccgccgctttgcgcgtttgaaggcggtgagaagaagaaagatgataaggaagagaagtgatagaatcaaaatgttaaccatttgtatattaatgttttattgagttatatgacatatgaagaaagttcatgccttgctatatatactactttgggaaatgctcacttactaatttaattgatgaatgcgacatgagattcttagagtaataaattataataattgctacgtttacttcacaaata

SEQ ID NO: 15529 - DNA, 1063 bp, Arabidopsis thaliana landsberg
ttgtttagaaccgagaagcttcgtattcagttctgttattttagcttcggcttccgacagtaaaccttcagttgtttggagttcaaactctttcttctcaaaggcagttgtttgatcttttattttattttctaagttttcaattataacctcgtgctttttgtcttctaaatcctgttgcatcctcaaagctttgctcaatagcatactctgtacacgaataaccttcattaggaatttttttttatgaaaataaaaagttagagggagattgtttaccttgaaattggaataaaacaaactaccgacgatgtgttgttgtcggtagcggctaatatcggcttcgagcttcgggaaaccgatactctttgatagagtaccgataacctttgctccggtctgatctcggatgcagcctagcttctcatcatcaacaccaccgaagagaagtgcccctggttgatatccgcaggatatggcatattcttttaactcttcttttttagcctttgtcatctcttgtccaactaagttttgaaaattgaaaatttcctcttccagtgtttctttggcaatttctttctttttctcggcctctggggcgaagcctcttcggtggctccagcagcttcttctgcggccatgtctagcagaattttatctatatcaagagccacactttccaaattaatgttttcggttttagtagcttcggtagctgttgtgctttcaatagtaggcaccttcggagctgaagcccttggtggtgttgcttcaatcacttctgtcatagtaacaatcctttgcctctttggcctaggtgcctttgtttttgtgggctccttttccttatgaaaaagcttcgtcagatgaagccccaatgacttagtttgacaggcaaagtttcagtcattacctttaggatttcctctatttcagcagcagaagatgttgcagaagtcttctcttcctcatcaattgatttttgctttggggtcgagtcctttcttttcttcgaagtaactgctttcgcctcagatttttgtttcttattctttgattg

SEQ ID NO: 15530 - DNA, 2507 bp, Arabidopsis thaliana landsberg
gaagcgggccttccatgtttttgatgaagacgatgtattgtctgttgtggaggataatagtgctgtcataagtgagggcttgtttgttgttgatgcaggctctgaattaagcttgtctaatacagctatggaaatagataacgggcgagttcttgcaaccgcgattatcgtaggcgaatcaagcattgagcaggttcccaccgcggaagttcttatcgcgggtgtaaatcaggataccaatacttcggaggttgtcattagattgccagatgaaaatagtaatcatctggtgaaagggagaagtgtttatgaactagattgtataccgctttggggcacggttgccattcaagggaatagatctgagatggaggatgcttttgccgtgtcacctcattttctgaaaatacccatcaaaatgcttatgggggaccatgagggtatgagtccaagtctcccatatctcaccggtcattttttcggtgtatatgatggccatggaggcgctcaggtatgctgtagttcgtaaatccttatactgattttagcagtagaaagttaattcaactatgaacccggaagatacatgagtttatgttttgttgacgtaggttgtatgtatatatgataaagggtttgctggaaacgggattctttgcaggttgttatgtaatatatgacggctttggtggaaatcggattcttgcaggttgctgactattgccatgatagaatccactctgctttggctgaagaaatcgaacggattaaagaggaattgtgtaggaggaacactggcgagggtaggcaggtccagtgggagaaagtctttgtagattgttacctaaaagtcgatgatgaggttaaagggaaaatcaacagacctgttgttggttcttctgataggatggttcttgaagctgtttcccctgaaaccgttggatcgactgctgtggttgctttggtttgttcatcgcatataatagtctcaaactgtggtgactcaagagcagttttactccgaggcaaagactccatgcctttatcagttgatcacaaagtaaaaaatcttctctttccctcaaaaataatttaacacaatctgagaaagtttcttatttctaattcatgaaatttcttaccctttctctgcagccagatagagaggatgagtatgcacgaatagagaaagctggaggaaaagttatacaatggcaaggcgctcgtgtttctggcgttcttgccatgtccaggtccatcggtaggtcaaacttgcacttatgtcttccatcttgcctagtgacagaaatatgaagagagttttataggtcaaaattatcgataaattaaacattcagtaaccttatttagagatgaggatcattcttacctgttacagtctctgcaaaatcatgagatctcctgaaagtgggtttcaatctgcatcgttttcaggtgatcaatatctggagccatttgtaataccagatcccgaagtgacgtttatgccacgagctagagaagacgagtgtctaatattggccagtgatggactttgggacgtaatgagtaaccaagaagcttgcgattttgcgaggaggcggatcttggcttggcacaagaagaatggagcattgcctttagctgagagaggtgtaggagaagaccaagcgtgtcaagctgcggctgaatatctctccaaactcgctattcaaatgggaagcaaagataatatctcaatcatagtgatcgacttgaaagctcaaagaaagttcaagaccagatcttgaaacagtgtatgctcgagctcttacactattataattttattatttcttatttattgaaaaaatttccacaagtttacataaaaataagaagtgaaatgttggggggaagaagaattaagaccttgatgatgcatagctgaagtccattcctttttctcatggacttgaatgtgtatgtttgttatgtataagaagaatagagaagaaatgtttttactttggggtcttgtaggtggatatgttgttgtaatattggagatgtggcttaaggaattgtaactgaaatttatgtcacattcaccttaatacttttctgtaatctattatatataaatacttgttgtgaaagagttattattgtcttttctattgttattgttatacaacaggtaatattgattccaaagtgtttaatgagggatgctgtatcaaacatgaaaactaagtgaagggtttggagaaaaaagaagatggtaagtaaccaaccactgatctctggtgtctacgttttgtctctacctcgtttttgttgtaatctctctttttttatatcgtatcatttgtagctaacactctcactctttctggttctgaattagtctacccttgtgtgtttattaatctaaattatacatatctattcactttgctaatgtttgaatcaacgaatttaggtcagtacttaatagattcatcttaaaccaggaatgtttcact

SEQ ID NO: 15531 - DNA, 4880 bp, Arabidopsis thaliana landsberg
tggttttaagaaaactgttttattgtaactatttatattttgagcagaaattaattgttctactcgcaatacatcaatcttcattgttattatcgatttaatcatagattatctaatccgatcaaatttttaagagcatggttactttttatctagtgtaacgaaagccaataatgacagtatattgcatgtcatcgcaagtttactatgtacagtagttttaaaccgagtaaacttaagatcaggtaggaaacctgcaaataaaaaagcaagtgataccaaaaatatatgtaaacatttaatatagttcttcaatcaattgacgattagaaagtactagatgattacgacccaagatttttgtccacactaagaatatttcactgaataaggtctgcaacagtaggattgaaatggcagtaaacagggacattatctcgaaaaaatctaactcagaaatcatttattagctgataatatttttcaactagtttagaattattatttttgtttatcattaacgcatacaaagttagttgtataatctttcaactgataaataatttggttttggacggaagagctttacgcaaatgtattaatttggttttgataatatttatttgtagactcgatttgtttacgtaaattatgaaagagaggcaaaaataaatatcataagatatagtattagaagaaaaggacataaaagtagtaattaaaaaaaaaaaggaaaagaaaaaaggaaaagtagagaggaacgcaaccctgggggcttcttaataaacccctctcgctctcttgtctcttccttacgacaacctctcctgctcttcgttttctctctacgacgataaaacccagatttcggtggaagcttccagaacgcgaacccctctcgcgatccaggtatgctctagttgcagatcttctagatctgatgcttctctttttcctcacttttaggtcttatttatttcttgttgccagattacttgttcctcgtacttgtgtttcaatatgaatcttctgctttcgctgcttccggatttgtattttagtttcaaactccaccaatcttcgttgtatgtattggtgatgtaaacccaaactggtggttttattttaggtttagtaatacgatggtttaaggctacctggcttgagttaccgccaattcgtcatctcctgtaatctctcgagctcaagactagtctgcttcgatcgctatctgatagtgtttttttttttttttttttttgattgttctataaggttgctatcgaacacgtgggacgccccagtactgaagaacacaaagcctaacaatgagtgtagttggttttgattttggaaacgagaattgccttgttgctgttgcaaggcaaagaggtatcgacgtcgtgcttaatgatgagtcaaatcgcgagactccggctatcgtttgctttggtgacaagcagcgcttcatcggtactgctggagctgcttctaccatgatgaaccccaaaaactccatctcacaaatcaagcgcttaattggtcgccagttttccgaccctgagcttcaaagggatatcaaatcccttcccttttctgtcactgaaggccctgatggctatcctttgatccatgctaattatttgggagagattagagcctttaccccgactcaggtcatgggtatgatgttgtccaacttgaaaggtattgctgagaagaatttgaatacagctgtggtcgactgctgtattggtattcctgtttactttaccgacctccagcgtagggctgttctcgatgctgccacaattgcaggcttgcatcccttgcacttgatccatgagactacagctacggctttggcatacggaatttataagacagatctgccagagaatgaccagctcaatgttgcattcattgacattggacacgcaagcatgcaagtctgtattgcaggcttcaaaaaaggacagctcaaaatcttgtctcacgctttcgatcgctcccttgggggaagggattttgatgaagttcttttcaatcattttgctgctaagttcaaggacgagtacaagattgacgtctcccagaatgctaaggcttctctcaggctccgtgctacatgcgagaaactgaaaaaggttctaagcgctaatcctctggcaccgttgaatatcgagtgtttgatggatgagaaagatgttaggggtgtcatcaagagggaagagtttgaagagatcagcatcccgattttggagcgtgtaaagaggcctctagagaaagctctctctgatgcaggcctcactgttgaagatgtacatatggttgccgttattggctctggctctcgtgtccctgctatgatcaagactctaactgagttttttggtaaggagcccaggcgtacaatgaatgcaagtgagtgtgtgtcgaggggatgtgccttgcggcgtgccattctcagcccgacctttaaagtgcgcgaattccaggtaatttgcgcatatctatgcttaagtaaatgtcgatattttcatgtacttggaagcaactcgagaactgccatactccaggctatctgactagtcatattatgatttattttttgttctcttaggttcatgagagctttcctttctcaatatcgcttgcttgaaaaggagcagcgactgatgctcaaaatggaggaactgagacccagcagagcactattgtttttccgaaaggaaatcctattcctagtgtcaaggctctaacattttatcgttctggaacattctctattgatgtgcagtacagtgatgtgaacgatttgcaagcacctcctaaaatcagcacatacacggtttgatctttgcccaatgtcaagactatgtatgactgtagtgctcttgtttctaatggtggatctcctttttgtagattggtcccttccagtcatcaaaaggcgagagggcaaagctgaaagtgaaagttagattgaacctgcatggaattgtctctgttgaatcagcaactgtaagtttctttgcgtgaactatttaaaggccgattctctctattaactgattacaagttgatcatgcagaaccgtggcttaccttatgaacttagccacttatggttcgttaatttatccacttttatctctcctaaatgcagcttttggaagaggaagaagttgaagtatcggtcacaaaagatcaatcagaggaaactgctaagatggacactgacaaagcttctgccgaggcagctcctgcttctggtgactctgatgttaacatgcaggacgccaaagataccagtgatgcaactggtactgacaatggtgttccagagtctgctgagaagccggtgcaaatggaaactgattcaaaggctagtttctctcttacctcatactgtttgctattcgcttgtgaacaataaataattatggatactttattattggattgtgcaggcagaggctccaaagaagaaggtgaagaaaacaaatgtaccactgtcagaattggtctatggtgccttgaaaactgtggaagttgaaaaggcagtggagaaggaatttgagatggctctgcaagacagagttatggaagagaccaaggaccggaagaatgctgttgagtctaatgtttatgatatgcgaaacaaagtgagaaatctttatttcgtcttttcattggcagtatgcatatgtaaagttttgagtattgagtactgacgtgtcttgttttcagctgagtgacaaataccaggaatatatcactgactcggagagggaagcattcctggcgaatctgcaggaagttgaggattggttgtatgaagatggggaagatgagaccaaaggtgtttatgttgcaaagctcgaggagctcaagaaggtaaaccatgcatatgatgacactttatattgtgcaggaagaaatcatatttcaggataatgttttaacagaggagtgggattaatattatgcaggtgggtgaccctgttgaagtgcgttacaaggagtcgttggaaagagggtcggtcattgatcagcttggctactgtattaacagctacagagaggcagctgtgtctaatgatcccaagtttgatcacattgaattggcagagaagcaaaaggtaataattcggctcatctcgaaagcgcagaacaaatcttaaatttcacaggcttggggaaaatggtttgaaatgtgttttgttgttgtgcaatgattaaggttttgaacgagtgtgtggaagcagaagcatggctgcgggagaagcagcagcagcaggacacgcttcccaagtatgccacaccggctctcttgtcagctgacgtaaaaagcaaggcagaggcattggacaagtaagcaaggctctttgtatctgtgtctcctaatagaaatgctatatgataatagagattgaaccagctttggatgttttacaggttttgcaggcctataatgaccaaaccaaagccggcggctaaagcagaggcaccacaagccaagggaggtgagcaggcggatgagggcaagagtgagccagagcaaccagcttctgacgaaccaatggagactgagaatcccgcggaaggtagtacctaaatgaatgacgagagcgagatggtgttgttgtatcgattttgttttaatttacctagtggaaccactttttgtagtttcgctattatcccccatacgattctatatttagttctttctttcgacattttttaggaggtatattttttattgtctgttccttgtgcgtttattttaggttgaaagtcttgctactttatttttgttcgactatataatgattgttgtgtgtaaccgtgattacctatacattgaacttgttt

SEQ ID NO: 15532 - DNA, 5330 bp, Arabidopsis thaliana landsberg
cctaaaggataaggatgaccagaattatggataagcttgagccttaacggataaacatgagccacagttcaatcctggccgtccgtttctttattccggcgaaacccacgatctgtcactggaccgcaagagcattgatagggctcactccatctccaatgtctcatgagggtccatgacataaatcaaggcttccttaggtctataacacgttccatgccagaattaaccaagtaagctcgttatcgtcacttatctgcattcttcgatcaataccttgaccattcacgacccatactcatatcccactgcccaaatggattcccctatggtctcctagtccttctaaggtttcctagtccttctaaggtttcctaaaactaaggttttcttaagctatcctaggtctaagggctagcttaatggtttcgaggtttaccgatagtcgcatcgtagctaagcttagtccgtctgatggagagtcattcctttacccgtagacttgatccattgcaatgctccttacccatgacttgccacatcaaatggccaaactgatcttgccttttcttggcttgatctcgcattttactcgatagactgcacgtccggccgtatagtcaaggtcaggggcattacagtcaatgtgatatcaagggagttacacaccctcaactctcaccccggagattggatcaaactcagaatcgcagaatttgcccgcatcccggattgtatgatgcccattcttgacatcgccaatcaaggtgtcgaggtattctgtaagacgaggaggatttccaagtttgcctgctccttcttctttcttgttatcgaacacacgttttaaaacataatcgcccacaaagaaaggtctgcttttgactttcgaattgtaataccgagctgctgcatgttgataattctgaattcggattaaggcttgatctcgcctctcgttgatggtatccagcgaatcgtcgagcattgcagaattctctttttcattcaaaggagcttccgttcgacgaagtcctggcacattgagctcggctggtacaactgcctccatcccgtaaaccaatgaaaacggggtttcaccggtcgagcgcctaggagttgtgcgatatgcgcataagactagctgaagttcatcataccatcccccctttaaatgacttaaacatttcttaagattgcttagaattgtcttatttgcagcttcggcctgaccgttcccttgtggataccgcatagtgtaataactaactttaatcccccagtctgagcaaaatgcttcaaactcgtgcgaaataaattgcggtccattgtcagtaactatttcgtatggaacgccatgcctgcaaatgatgttcttccaaatgaaagtctttactgccgaatctttaatattcacatacgcttcaacttcaatccacttcgaaaaataatcagttagaaccagtagatattgtacgcctcgggtcgacctatgcaatggtccaatgatatccattgaccatctcatgaaagggtacggggcggagatcgaagagaataactccgaaggttagtgaatgagtggtgcatagagttggcaacgtttgcatcgttgagcatacttaacgcagtccgtgatcatagtaggccagtagtaacccattctcttgatcttgaaagccatagccctttccgaggaatgacttccacacaagccttcatgtacttcgctcaaaacaatctcgacttacacctcgtctatacaaagaattctttgatagacaaaatttcgcgctaacgaatctcattttcctagcttgccatttgttctttgggagcttgcatgtaacgatgtaatgctttattggccccctccaatcagccccccaatctttagccggaatttggttaatttcgtgaaacactcgagcttctggttcgggatgttcatttggtgctagtacatcctcgtcaacccacggttcggtttcagcttcgattgtagggccaggagtgatttcttcaattagtctgatcccaatatcttcctgcacagtagacttaggtacagttgtttcttttgactttcgccttttgacaggtggtaattcaatagtaggttcgccgtgatctctggctgcagctagggatcttgggatgacgaatgtctcctttttgtccataatactcctttccgaaatacactctactggaatgattcttttgacttcatgatcggatgttgatgtcaggactgcgagtgcatctgcggtattgttttctccctgtggtatgcgaatgagttcgaatttcctaaagtttctagccaagtctttgaccacctcaagatatgcctccattcgtgagtcttttgcttcataatcaccattaaactggttaacaactagttgggaatcacagtaggcgaccacttcatcggccctaactccttgtgccaacctaagtccagcaattaatgcttcgtactctgcttcattattagatgcggtgaataacaatcgaaatgactactcaaggatttccgaagtgggagattctaacttgattcccaccccggatccattttttgatgacgatccatcaacatgcagcttccaagtctgattttgcggctggtcctgccctccgggtatcggtaattctattaaaaaatcggctaggacttgagctttcatggcgactcgattcttgtactctatatcatattcacttaactccaccgcccatttcgctaatctaccggactggttcgggctatggagaatagtccgaagtggctgatttgataacactttgattggatgggattgaaaatatggacaaagtttcctagctgaggttactactgcaagtgcaagcttctccatcatcgtatacctggtctcaagatccgtcatggatttacttatgtagtaaattggttttttttctccccggtcttctcggattaagactccgctaaccgcatggttcgaaactgagacatatagatagagtttttcgtctacctccggtttggacaatacaggtggagaagttagatacgcctttagctgtccgaacgattccacacacttctcatcccaaagaaattccttgttaccctttaagatttgatagaagggtaaagatttatcggtcaacctcgaaataaaacgattcaatgttgcaatccgaccggttagtcgttgtacttccttgaaattcttcggagatggcatgttgagaaaagcgctgatttgatttgagtttgcctcaattcctcttttcgtgacaatgtagccgagaaattccccggatgggactccaaacgtgcacttcgccggattcaacttcatatgatattggttaagaatcgcgaaacactcttccagatgttttacgtggtcttccttttttaatgatttgactagcatatcatcgatgtagacttccattgtttttccgagattttcgttgaacatcttgttgaccagccgttgataagttgctcctgcgtttttcaacccgaatggcataactttgtaacaatagatgcccctattcgtgataaatgacgttttctcttgatcttccggattcatcatgatttggttatatcccgagaagacatccataaaggacaacaactcatttccggcggttgattccacaagactatctatgcgtgggaggggaaaactatcttttggacaagctttgttgagatcagtaaaatcaacgcagactcgccacttgccgttcttcttttctatgacaacgggaatgctcagccaatcgggatatcgaacttcgacaatagaaccagcgttaagtaactttgctacttcctcatttatcgcggttgtacggtcgtgatcaagctttcttcatttctgtttaatcggtttgaaagttgggtcgacgttaagctcgtggcaagtgacgtcaggatcaattccaggcatatcatcgatcgtccatgcgaacattgctgcattatcacaaaggaacttgactagttcctctttgagggaaagtgggaggtccacgccaacaccgacacaacgagtgggatcagtcgtgtcaatattgacctgaatgacggattcggtgcgtggagccagtctagcatctcgtggctaggtgggtccggtaacaacaaaagctcttgcgttgcgaagctgcttttcaacgatgaaacatgtgcgcgcggttaaaggatcgccacgcaaagtgtagattccacgtgtggtcgtgaatttttaggcattgatggtaagttgatgcgacagccttcattttatgtagccatggtgtgcccagaatgacattgtaaacgataggcttatcgacgacgacaaagttaaaacaatgcattgtgcctccaacgtaaaccgggagcaggatcgtaccgactgtcatcaccgtgtctccatcaaatccagtcaacggctgaacattgtgttcggttgcacgcagatcgacctccatctgtatgaggacatctttaaagatgacatttacagagctgtcaatgtcaatcaaaaccttggtgacattgctttcatcgattatgagttcgacgacgagtggatcattatgcggtcctgttaggccagctgcatcagcctctgtgaaggtgattggtttagtattgtcaaccgcaggtgtgctactggcgatcaagccgcgttgtacttccgcctgcgacgataatttctaatggaacggacagaatctcgacaagacgtcagaccgcccattatcatgtgaatcgttcatcggggaacaggtgcttcatcattgcgcgttcgcttgggagggcctggaagttgttcatcttcctgaacttgctcgatgcgggcgggctcttgtagacgttctcgatcatcgcgtttgtgttgatcgttgagatcacctccgtcagcgttgtctctgtgagaattcaggcagtgtcgatcgtgttcgacttcaatgctgccgttcttaaacttagaaagtagaagaagttgaagttgccggcagtcgtcggtggaatgaccggcgaatttgtgaaattcacaataagaacgtttcgcgtcagagtcgcggtagtagttgttccaaggtttgtgcggttgttgttggtctcgattgttgatggcgaatgccgagcccttctttcccttatcgtttttagcgtagtcacgatcatagtgctggtgcggttcatagtgtttgtcgcgagctttctcttttggggtggatgtcttaggttggcgttccaccattgcggccttctcttctttgatttcgatgtatcgatttgcacggtgcaaggcatcatc

SEQ ID NO: 15533 - DNA, 2596 bp, Arabidopsis thaliana landsberg
atatcatggctaggcgagatgaataagattatgggcaataggtgaattggcctaattcatataggattttaagaccacttaatgacagagaataattagagatcataacagagtaatacacttaagtttagcatacaattggtctctttggggattccaactgatcgatagaagtgcagatcgatcggtggagtgcaatagtgatcgctaaaattatatgaatatactactcacacatgatgtaggtgatgtgtgattaattttgcgtcaaggttttaccttagagtccacccattaactgcaagtaaacgtgtcaaatgggccagaggtgtcaaacggaccagcctgcgtccatatgggccggcccgcaataggcattagttttagatggaccgcaacaaaccggcccgctaggaccccagaccaacaggtttgcgggccggccagcgggcttaatttttatatttaaaaaataatcaaaatacattttaaatattaatttaaattatttttaatttaaaataatttttaatattacttctgataaatattaaaatttaagaaatcaaatttcttcatattatgacatattttatatattataatttcataataaagtaaaattatttatttatttttattgaatatttgtaacctgcgtgccgaccgccaatccgtggaccaaatccgctaacacccgcaatccgtttggaccggcttgaggcccgctattttacaggcatttaatatagtgtccaagcctggcccgttatggtactatatgggccaagcccggcccgcttgacacctctaactacaaatgcacattaattactagtcatatttaaggatctatcccacaaagagagatagctatagagattgaattcaaattaagaagaagatctgactaagacaaaactaaaccttggagttttggttttggttttggttttgggtttcctaatgactaagaaatgaaataagtaatgcaagaatgtaaacgtcatttgtaagctatggattaaaggtgttggaagttctagagtttctcagggtatcatagttctcgactaactaatgttaggatctcttatctaatattttcgttctagttcctagctacaaaacacaaataaacgattaaccctagggtattatagacttaatcggaagatatccatatacttcgttattacttaacttacgttcacatagattaaagcatgaggatcaggtatgctatgttctcttagctccacaactcaacttacgcaggttacgacactaagattcggtaactctaggttttaggttaagtttacccgattagagctcataccatcttggatcagtgtttggttatcaatccaaacaacttgtattaagtaaaagatgtctcaaaagatttgaagtatgagcaaaataagatctactaatttaacaagaattgaaccatgaatccccttaaatcagcccataaacctcaacaaagagaactactcgctcatgatgcaagtaaatggtatagatatcataaagtatatcatcataaaaaatcaataaacaaaaagcttcaaaggaaacttctctcgatgtcagaaaagataacttatctccccaaaagaggcacaagaaagaatagaatagaagagaaaatacagcaatgaagaacaagagagatttgtaagggacgaattctaaaatattggaggtggaagacgaagagcttgaaggctgtaggtgtcaagcttgttgtgaagggaggtgagaaaagaagctctaagaggttctagggttttcatcttaagttccagtttttataggtacatgtgatcagtgaaggagaaggatcaagagttttaaaggagatttaccaatggctttgaaatagtaaatcataaacaataaagaaagaatatgaagaaatgaagaacacctcaaaagctataaaatcgtaaaagtaaagtgtgccttgctgctaaagaatcaaacattatttataaggattgggacaaaatcttaaaaagaagaaaaggcggtttaacaaaggtccaaccgatcggtgtgcggcatcttccttaaccgatcggttcagtgtattcaccaattgggcttcttgatgggtcatcttttttttatgacatttttaaccatttccttctaaaaagtccacttatggtccaaaggatcaaaatcctaaaaacatttgaatacatcgaaatgacttgtttccaaataaaagactccataaaacatacaaacaaaatctataaaatgtgttaagaatatcacttaacatattattagatgcatatgttaccattttataaattatattcgtaattgtttaatttttaaaatttgaaacgaaatactttgaaatatcaaaaacttgtaatatttcttttttgtaaataatattatttcgcatgaaatttgtgatttttatgacatatttcacatattatatttttctaattatgtacaaataattatttatttataaattatattttgttttatgaagtttttgtagtcggccgtccgacacactaacccatggacaatttcgcattccgacaaagcttattca

SEQ ID NO: 15534 - DNA, 1116 bp, Arabidopsis thaliana landsberg
  unsure (1)..(1116): unsure at all n locations
tgaagtattaaagacaaataaattataaatgaacaacatcacttttatattatctccatttaatgtataaaaatattaaatacacttatacctctaccttgacaaagattaattcccgattggcgtgattgcaattgcaggaaatgcgtgaacaataaaggagcactgttcactatttataggcacaggacacagcctgtgaggaattacaatcatgcccctcgtaaaagtttacaacaacgactcaaacatttatggactaaacggtcattctatttttaagtcggtttgcagctccgaagcttcatggagaggaaccttcggtcatcacatgcggacagcttcagacgaagctgtttttcctacaggaccttcggcgatgaagcatggtcccaacagtagcccttcgcggtgctagatcgttttttgtaacgagcttgatccgtgaaaaaagtcttttaggcttcgggaagccgaaggtccgaaaaacaccttccctgagctcgttgccgagaaacgatacagtttccgagcgcggaggttcccaccatgcaggttcattttcttggtttttgcggcccatcattcagtgggtgcgagcgattgtttgcccggtgtaaaaatcttgacgattcaccttcttacctacagcactatataaacagacaggtaggtgtgaagttaccacagcattcattgctattgcactgttttgctgccaaaaatgtaaccatagccgaagcttgacttttgcattcaaacgaagctccagtttagtgtctgcttcgtcagaagaagagcttcggaagaaaggttattaatttccaagaaattttcgagaaattcaaaatcaaatggccagagtgcgttctactgctagagctgagcgcgaaggagacgaagccgaaactgtggaaattgttcctatctcgaaagcgatgaagcgatctgggttggtgnnnnnnnnnnnnnnnnnnnnnnnnnnnnnnnnacaagcagatattgaagagactgattctgaaggtgatcacagtatcgcagtaccaagcaagcctagccacctggatttcggaaagtcaaccatctctaaggctgattttcctaagatggtgaagt

SEQ ID NO: 15535 - DNA, 1534 bp, Arabidopsis thaliana landsberg
aagatccagtttttggagattaatggcattcccaatggaggatgggagctccaatagatttgagcatccgttaagatctaaaatcaaaagattaatggcattcccaatagaggagggaagtctgatcagactcgagcaataataaagatccaattcccgaagattaatggcattcccaatagaagaggggagctccaccagatttgagcaatagcgaagaagcaatttttgaaggttaatggcatccccaaaagagggaagctccacaagacttgagcatccattaagatgtaaatcctcgagattgatggcattcccaatacaagaagggagtttgatcagactggagcaattagaaagaatcaactttcggagattaatggcagttgagagatcaggaagctccttcaagtttacagaataactcaaatccatctgcctgagattatgaagcggctgtacagacaaataacacaaacatggctgagtatacacttagaagtgaaaccacttaacaacctggaaatacttccatggaaaaaatcgggagaggcaagatcattctattttttaaagctgattagctgtacaaaaaagccaaatgatagattaagaaataaagagaaagtacttactttaactccttcccacaacatatcaagcttgctgtgcgtcaggtttagttcaataaggaactccacgttcacagtagaaggcaaacatgtcatcggaaaatatatccaatctagtaactgaagtttacgagaaagatagctcagaccgcgggataattgcaatgtatcatggtcacaatcgaatcttaagaactgaagattagacattccttcaaaaactctctcattcatatcgaattcttcctcgattatgtagtggaaatctatgcctattacacttttactaccctgaaataaaggaacaagaaaaaaaggtctagatggttagtttttaaataaactaaatattgtagggagcaatgcaatgaacttactgctgcatcaccattcagcacatcacatatctcttctccatcaaacaaaaactggcgttgtccaggctcatggatagattggttacgaacaatttctccacctagttttgctagcagtttatgcatctctatagttccccaattgctaaaagatatgagagatttctcagctaagacgttaagtctttgcctgacttccacaaacttctttgcaagatgctcttccaatatcttaatctctttaccgttgaaaaaacatgctatatgaagaaataaatttttatcttcgtcatctaaagcgtcatagctgaacttcaaaatgctttgaatatcagcgtcaaggctactctctaatcttggtaatgactttttccactcttctctcgacattcccctaaaataggagcccataattcttagccccaaagggaggttaccggcaagatttattactttccaagcaaggttctgaaaaccatctttaggggaatttgaccaaagcatacatgcagaagatttgaagag

SEQ ID NO: 15536 - DNA, 3131 bp, Arabidopsis thaliana landsberg
  unsure (1)..(3131): unsure at all n locations
tatgtaagaaaaaatcactttttttttttgttaaattttaattttggggtataatatactgaaaaccaaacaaaaattgattaaaaaaagaaagaaaaaactggataagagaaatcaatttttggaaacagaaattctcatgtgttgaattccagtggacaagaagatacaataacaaggctgctgatcgttagcaagggaacctctagtgattccaaaaagctttatatcacacttttacattccatgttatcttgtaaacaacttccatgaacatcacttttcttattaatcaaattcagccgttaaaaaaaaataaaaaaaattggttcgtgtttagggttgtggttgcgcagccaagaggaagaagaagaagcgaaaatacttattttaccctctattaaaggtgaaatgattaaaaattagttgtcgtagttcaaacccgcaattaagactaagaattgttttatgtatatcattaagcataaatgtctaaagagtatatgtaaaatattaaataataaaaatcatgttttataaaataaatcaaataagaagttaaggttttttattgacaatgtaaaataagtaattacattacttaattgcctttgaatttttggttatgccataccattaacctactagacttttaagggtgatatatttttacttctcgtatacgcctcagaaagaaaataggtaccttgggtaaaaagtaccaataattaaaatgggtgtccgatttattattgaatctaaatttaactagttatacatttgaaaatatatcttcatctataatatttaaacatatacaaatttataggtttaaaatagttagtcaaaagtttaatatttgaaactaaaaatcatacttaaaataatataaattgtagaaccatgattgcaaactctaaaaaggattttatatgttgatttacataagtgtatacaactatacatgattttatattatagtagattgtttaaaactggtatctacgagtcagataatgatatgagtacaaaggaatagttgatacacgatattcagcccatatatgcgggtaatacaattatgctatatatattaacttattgttaaattatgatatttattatcatacccgaaactaccgagattttttcaaaaatccaaaaaactaatgaattaaagaccgataataaaaagcaacacccagccctaacgagagacagggtcaagagaaggagagactgtaaaaatctaaaaggtcactgaggcaaacatatttatactacaagggcatccttaacggaaaaagccaaaacaatcttcttttatgttttatttggaaatttaatacctaattacttttggttgaaagacaaatacatatacctaattattatgattatcaaaataacagtattttattttttgggtattaaatcatacattntaattattatgcgtatttttttctaaccaaaaacaacataatttgttagaaatactcttttatcaatactatttttttgaaaacgaacattgaaaaataagtatctttgcaaatgttttaaaaaataattagatattaaacttccaaataaaaaataaattaaatatttttggcttttttctcatccttaacttacgcaaatatatttaatttatatttttacaatataaattataatctatctgcaatattctatttacaacttcacgatgacagctttctccacaatacatggatccacaacaaaccgttgtatcagcggtatatcccctagacagcttacctttgactcacaattatagactgcagtgcactgaaacttcagatacgctttgcatttataatgtgtaagagagtgtttctaggaatcgaaacccaaatttatgtaaaatcattatatcttggattactaagttaagaaccttccacaagcgagttccacatgacaagcttaatatttttataatcctatttttctgtttgtgaatgcatgtaacattttcaaaactcaataatttaaaagatgattatatacattaaattaaagaaaaaaaaaagactacatcctacgttatttatctacagctggcttatatgcagctacatgaaagcttcgaggattaaattaaggaaaatatttggcagttatatgaaagagacgttatcacataatcacacattcaaattttaaaagtatttcgttaattatacgaagtattgtaattacatacagatatttctgaacgaatataagtcatttatatctcttttttttttttttgagcaacaagtaatttattatgttttttttgttaactaaaaggagtttgtatctaaaccttaatctccccaatagccaagaccggcatttgctaataccttatagcatagcgtaaagcatacctcctaccaaaaatcgaactagggagcatatggatctacctcctgtacttaaatcactagtctaacgcaaccgttagtaacataagtcatgttgcaaacaccataactatcctactttattgctctggtcaccaaaatttgacgttgaacgatgtgcaccgatattgaccaaaagtattttcttcatgggaggataaattatttaaaaatattctttttcatgtgacgataatctatttattatggtatatttgaaaataatttatcaaaattattataacaatctattaacatgttaagaataacatttaaagactaagaactaatcacagatcgattccagcttaatcttcgattttattgtccgagggcacctgaaacctttgacaagtgcctataaaaatttgctaaacaaatcatcacataaaatgattaaaacaactctaaaaaacaattttatgttttgaaaatttaaaacgccatgcaagccaattaaaatatattatgtgaaagcttatataagctgatgcttaatcgtaacaaagaaatcttcacacaaaaaacatatacacattaaccagttagcagatcgacacgaaatgtggaggctgcgaattggagctgaggcaagacaagaccctcacttgttcaccacgaacaactttgccggaagacagatctgggagtttgatgccacgggggctctcctgaggaactcgccga

SEQ ID NO: 15537 - DNA, 5774 bp, Arabidopsis thaliana landsberg
attaactaaagaaatcgatcctgctcccaagtactcaaacataacgtacctcctttgaagaacttgaaccatcagatacacagatgaaatggactggccccaacttgaataactgaggggaaaaacattgacaaagatataatacgatcaatgcacgcattctcagatacaacaagacccaataagattataaaacataagcaaaacaagttttaccaaaattcaaactttcagaattaaaatatatcgtcaattgtaaaaattagtatgaaaaccatcttcaatctcagattagttacagaaaaataacagagtttcgtcatcttcatgtagcaaaaacaaacgttttaaacgagatgggaaaaaataatcaaaaccgataagaaccagcggaacagtaacataagcatgtgaatcgacattcacctgagcggaagcgagatcaaaattgaaacaatgggtcgaatccgattgcagaaatcggagctccgtgactccatcaacgtaggaaaacgtagctacagctggagaggacgacgaaacggaagacgaagagagatcagtgactgactctaaagagtactccagctgctcaagctttttcacagaagatacctccatttttacaaaacgatgcgaatgtacagatacagtctctgtatgtgtgtgtaaacgaagcttaagaattttagggtttttctgctgagagtttccgaactctctgagagggagaagagttaaagccgccaaaaggagtaatgaaacggtggcattttcgtaatttttactatgattatgggataggattgtaagttacatttattaattcttaaaccaatttcatagatcaaaaagttcgaatgtgaatgtcatacatcaaccaacaagttctgcgaagaaaaaaaagctcgctttgatctgaaaacgaacgagatctttattcttcatcacacaagaagagaagagatccaaaatcatctactactttaaactaaccaaaacatcctaacaactaagtagctttgcatgttttcttgttatgtcctagtcccttgcacttgctacactgtagctgacgtttcatcatgtccaacggctcaaccttctttatctttggtcttcccggtgtcctccttgtgggtggaggagtcacgcaaactaacccctccggcggatcatccagcatcatcctgtccatgtttgggacaggttgaatcgactctgcatacattaaccggtgactctcaactgttaagtacgtagagcaatactcatacgggcttttctctatgcatccaatcacggcaattgcatggctacaaggtaacccagttagccgccaggtcttgcagtcacaatcacactgattgatatcaactatactgaccgaagattctcctccattaacctggaataagctcccttctggcgatgaaacctgaagtaattgcgcaagttctatttctttctgtagcttctcttcgttagatggtgttagagttgtgacccattcccgggattcaacctgcctggtataaatagattgcatcatctttgctcgaaattcgtcaatcatttgggtaatgggaaactcatgtgcttcagaaacccagctgtagaaatctttcccaaagtttgagttcatcctgttatatctctctccttggaacagcgcatttgcccaatggtgtggttcactttcgataacccaagtataagcatcaggggaaatgctttttatattttccaaggaacggtaatatgcatcaggttgtgtcgcataagcagcagcatagaaatcattgagtataaaccgtcttgcttcatgagaaaactgagcctgcaagtccatgtttaatttctcagcgaggtggcgcagacaataggcatgatggtgttgcttttcaaataccagaggtaatgcagtcttcagaccgttttgaaaatctgcaacaaatgtgattgtccggggatcggccagtgccaatttgaggtgctccaaaaaccaaacccagttatcttctgtctcagcatccacaactgcaaaagctactggaaatattccatcttcggcatcaggagctgtagcaacaagcataaccccttggtacttagagtttaagtcggcggtgtcaaggaaaaggagaggacgacaaccttgtctaaacccagatattgatgcatagaacgatatgaaaagccgatggaaactcgaatcttcttttgtcatgaaaatggcaatacttccaggatttgtctccctgatcttctcgcagaaagaaggaagttgactatatgcctttttataagaaccttgaagctgctctctagcaatctctttagctctccatgcctgcgagtaattcagttgaatcccatactctcttttgatatcctctgcaatatccttcggtttgtaatctggaaaagctttcaacttctcctttatgatacttccaacccaacctctacttgcacggtaaccagctttcacaaccgctctctcacacgtgtgcctcgtattcattttcttaatgcaaatcagctgcgtagtcgaaagcctcgatgcagtgatacgccatggacaaccttgagctttgcatttgactgaaacacgatggctatcgttcttcttgtacttgtaagtaaacccatgtgcgatcgagtacttgtgcaacgcatctcggaactcagtaaagctattgaacctttgatcaacacccgtaatagcgttttcccactgctgtgcagcttttatatgttgtttctcatcagtcaaaacaaaattacacggcaaagggctgctttcttcaggcattatacccatttcaatctgaaaatcatttgctatcatatcatctcccacaacaatatctcctgcagacactacaggtaccactgcttctgatgcagttgtcctacttgatctgtcaaatacagaaatccacacatcagtcattacaatcataaacaatgtcgataaaccgttaggtcttagaactagaacacacacctactagctggcatgttggagacattccttgcttcggcttcttcgggtaagacgaagatttcgacatttggtgcgtctgcggaaaagctaaccatgcgttggaaatctttatccttagagatagtaattaaggttttcttgtttccagggaggaagtacttgagtgtcatattctcccaactaaacccgaaattttcagctaattcggatttgaaatcgctcatacaagtgtcctgatcgatgtctatggcataagcatcaccaccagaataagctaatgagccatctttattagttacaaactctcctcctgactgacatatagctatcactttcttcgtcgccataaccaaaaaccttcaaatttacaacaaaaaagaatctgacttttaggtatccaactcaaattgggattctaatcctcagctaacgcaaggcaaaaagatgtttcgagaatcttaaaattacggaaccctaagatccaaaattgaacactaaaaactaagctgggtgataaaaaaagagtacctttttgaaagagagggacgaggcactgagttttcgttgaaagtcggagttttttttgcttggagaaacaaaatccagaagagcgaataagaacgacagagaagagtccgtatgtttcaaactttgacgtaaggaaaacggtgcgttttctgcatcataggtcttagatgtttcgtatagtaatatcacaaatttgttatctgcgaaagatcgagatatgaataataaagagattgagagatttcttattaattctcttgcaattgaagtaatgaattgtgtgctcacaacgaatcgattgtttatatagaagtctgcactgtctagtgtctagtggttgatataacagtcatcagaattcacaaaatctcaaagtataatgtttctctaaaagtagtcatttgcacaatctgcctctgatgtcagcctgaaaaagcttaaaaaagataagacagtaaataaaaacaacagcaacataccaaccaaggccagctttaacttcaattcagagaataagaatacacattttatacataaagtagacttttgagcttaagaatttctattgttacatttcttctatccacagttttttcatctaaaaatattacaacacacaagttgcctcaactttggtcacaaccgctagttttctatacccgcatctggaagcggagaatcgtgagccagtgactgcagaggagagaaaaaacatgagtgagtttaattagaatctgcctcagatttcgtttgtatctatactgataatctgatttaagctttttacctgctcttgtgagcggaaatacatgaagggtgtgtagttgaggaagttggagactcttgatgtgtatatatccgcatacctgaaaccaattttgaagaaagtaagtgtagtttaaatgtgagcttggtttgagcttatgagttactcggaaatgcagagaagaggcataaatacttttcgatttgtctcatcaagtggcttttatcccacaaacccgcgcgtgagaggaagccccacctgcaaaacagcccaagaattatggctcagacatatccctttctgtgaatcttgagtaatcttactacatttgtttgtctttttctttttaccttttgttaaagagctcgccatctgtttccagcattagaccaatcttgtcatctagtctttgcattacaataagaagcttttgcatggtctctgtcagttcttgatcatccaagttggtagcagcgagagtctagaaggaaaagagaaacggatatctttataagcaatttccgtcacaaatctctatctatttatctgttcatacacattgtgttccacacagggagagaagatagactctagagcttgtaaggagataaacaaacctgagcaggacggcctttgcttcgtctttgaagagcaagccgaagttggttaaagagatccccaacaacctctttttgatttataagctctattagctcttctcggtgaccacgactgccaattagagccatatactgcaaagaaacaagagaaaatcagggtttttatgttacttcaacgaacgaaaacccttcaagttctgtcatctattgatatagttcagagtataatttatccaaacctcttcttccagttcacggcaaatcagcgcagttcgccacctgagatggactttggatacgctgacatcagtgtagatgtggtcaccaacatacaaaatctcatctccatgaacgttgagtgaactctctatcatttgagcacttcctcctgagtacaaacctcctataggagacaaacagtgagaggaaattttttttagctttctccaccgtaaagttatcagcttaaattcagtagaaacaatgagaaattacctgtttcagccttgaagcatggacgcatcaaaccctctccagtcacaacctcatatagagggtgcgacatctggaagaactctggtttcctcgcagaaactatcacctatgtggaaacatgaattcaaaaacagtaaagtctaatgcaaactactctctgaaaaacaacagatttacaatcaaaatgcagaaacaaatttacgtttgctcaccatgtcaaaaagatctcgccagtccatgtcgttgggaaggaatttgttaaatgaatgcttcatcattttgtctgtgtagtgataaaccgaatatgtgataagcaagagcttcttaccagcctatgaacgaacatggcaat

SEQ ID NO: 15538 - DNA, 4558 bp, Arabidopsis thaliana landsberg
ctctactttaaagtttaacctcactatatactttattcatctatttttactcgcagttgggtattgtgaatcgcatctttgaaaaacacccggagactgcattagaatgctgtacgaagacccaagacgtgagagcatcatacataaatgtcatctttagcctaatcaagttgctctacaaaggggctcaggaacactccacacatgatctgtctgatgcagaaggtgctctggcatacatgaaaaatctagggtttaagttggattggttggagaagaaacttgatgaagtcaaagaaatcaagaagaaatgtgagcgagtgactgaaatggagaaagagctgcacgacttgatgaataagcacacaaacgtaagtaaactgctggaaaaggagaagttagagattaagaatgcgtcggctcctgatctatctttcagtgatgttatttgattactcgtgttcttagggacttgatgttttggttctgtttgtttgtttttgtgttctagtctctgttcgttaataagaaagagccctctgctctgcttcagcatgtgaagctaaatacttatttatcttgaagttgctgattttaaatccttgccttctggatggggaaggcacgtagaattgataacactagtaaaacaattttgtcagaaatcctcactagcgaaaggtgattctttccataacttttgttctcatttagtcgtgggacttgtgctgctccgtaatacgttgttttgactagagttctatctttctcagtaacacgacactggttaccagacttgtgaacgatgaactcaagattattgttgaggtcgatgttcttcaagttattggaaaactagatgtacctcttaaaaagataatgcagaatgatgatggttcggtgtctcgtgattagcttaaggaaattccaggagatttggtggatgtcaatgggtttcaagttcttccttcacaggtaagaaatgtacttgtaactatataatccacttccttgcacaagctgcatatatggtttagtgtgtatgttttcaggtctcgaaaaactcctatctgatatggtttaactacttattagtccatgtttcacttgcaggtagaatctgtgaacaatctcttcaaaaagcacccagacattgcatcagacttccgtctggagaacacacatctaagaactacatacttgaatagcctactatgctagactgagcttatgtgccagtcccctcataaactctccaatgtcgatctcgccaattctatattctacactatcttatgtgacaaaagcagggtttaagctggattggctagagaagaaactgaaagagattggtgagactcgggtgcaagatattgaggaagagttgaaagacatgaagcaaaagtgcgcagacatggaggctctgctggaattcttaagatgatgttgtttgatgacttgaggcagttaagagtttggatctaattggtgttctagtctgtttgtttttagttttagttttgaaaacagagtcctcttactctttggtgtagaacatcaagagacttgttctcattgaggtttccctatgtttcttttattgcacttgttgctattcatgttgatgatgatttcttgattagagacaatgaagcttatgcagaaaatggtagtacaggaatttcttaattagaattggttaaaatctgacataagaatagtgtaaatgtggaaccttgacagctacgatgattggattagaagataattgatccatcaagcttcttcttctccgctgctctctaccaatacaacatccttctgtgtcttagctctctttcttaatctgcttttacatgtctcttcctttgttggatcttcaacaagttgttcagagactgcttcgtgtctcatcacttcttctagaatcctgtctccatacttttctgttttcaattttcctataatactctccaactgcaaatccaaccaaataaagattaaaggaaagcctatagacatataataatgaaacccaattttattagcacaaactcgcctcttgtaatgaaactggtttttgggaacttatcgagccaatctgctgggttgagaggactgtgtgagggagtatgcttccatcagctgcagatatctctttccgtagctcgtcgagcttgagttccaacccggaaaatgtaatacttcttttcaatttcttggtttgcctgctagaggtttccattttgattgtctttcttcctgttccagaatacaaggaggtattttttgttttcagagttttgtccatcactaaaccgataaatgatgcttctaatatttactgcttctatgacttcttttgatttgacttcgtccaaaccgagaaaaaagggtattccatatcccgaagcctacatagtgttcatttgatcgtgaagagaaggtatttcttttctccttaccttgcaacaattggttggccaatggtcccattgttacataagcgtttgtcgaatatggtgtgtgctgaaattcttctttctgcagcaaaaaataaaaactcatttacagcctaaagagactaatggcacaatcacagagattataaggcattgctagatactagagtttttgtctgacatgctattatcttgagctgggtttatcacgtgtcagattgtaacagagaactataaacatggacaatgatcttaccaataccgagtcaacaatcagttttatcacgagatgttctacctcgtctctctttaactcagcacctaaagtcaaccacagaggtaaaaatcaacaacaaaatttttaatgcagttgacaccaatggaaatgaagaaaaaaacacgactaacttagatccttgtgcttatttctgagtttgtcacccaactgtaacatcgttactctttgatccttggcttgcgtttcttgcaccatagaaaccacgagcttagacaggtctgcaaaaatcatgacaccgaaaataattatgatattatcgacatatggctgatactctgatagttgatgagaaagtgaaatgaactgtaagtcctttaaacaaaataagctgaaattgttttggcagaagatgaaactttcaagctgattccaaacaaattgcaagggaatgtatttcaaataaacaacaagcgaatgtagggacgcacccgatacatcaacttccatgacctcacttgacaaggcacagttgtcacacattccttaccaaaacgatcagcacatcagaaaatctagaatcaataggcctagtacaaaatctatcagtagtggacaactaactgtaaacaagaataccattgcaatcttgtgatggttccccaaaatgacggaaaaatgcgcttcgacgacattttgttttagactgcaagaaggtagttcagaaaccaaggtttcataagatagcgtacaatttagaatatttcaagatcatgattctttaacgtgacaagataaagagtaaaacaatttagtcagtctaaagaagccttagcaaggtacacaattctctcggaagttggtgctgattgccacagcttgctccagatatttacaggtgcaataacgataatgcttcaggaaatggaaatgaatcagcgtacctgacagtatcttactatatcgtagagattttggagaccagaatactcgtagaagaccatggaactctgttgaggagaaaaggaaagcatcaactaaatctaagaaatatatagatatatacacaggacagataaccagggtacagtaacattgcagcatacctgcctgggaacatcagccgaacgaaaaaagaggatacattcggatgggaggccatcacgaccggcacggccactctcctacaatattatggttaagttataagaggcagccttataactatatcgagttttagtggacaagagactggaacctggtagtaagtctccattgatttgctcaaactgtggtggatgacaaacctgactacagcaatgccccatgtatcagttagagaagatagtaagaatggtgattaataaaacgcgaaggatggtggtttttagaaatataatgattttaagaaatcagtagctactagtattatgtaatcggaagaataatagcttccaagagaaagaaatctgcactaaggaaaactgaaagtgaaggtatatcaaatatcaactaaacaaaaattagcactactaagtactaaccatcaggcttgttgattcccataccaaacgcaacctgcaaagcaattattttactaattagagtttattaacgtagatccttgtaccactaaataatggaatgataacagagaatatacgtactgttccaacaatgacctgcaacttgttcttgctccatctgtgaacatgacacagcaaaaagtcaggcaatgcttaaattgcacatcaataacaagatcatcaagagcaccgtcgacctgcatcagagctggatttttgcatataaggttaaagtaagcaccacggactacatgttttaagaaatattagcgtac

SEQ ID NO: 15539 - DNA, 3184 bp, Arabidopsis thaliana landsberg
  unsure (1)..(3184): unsure at all n locations
tcaaaaatggatagcgaataataatgaaggaacaaaaaaattactctgaagaatatgctctatgttatgtcacacttggcgatttcttcatcaaacatgactggaccttttgaaatctgataataaccaatcaaagtgataattttagtaccttaaacatttgaagtggttttcatgttcatatttctacaaaaacacagattacaacattttgttaaccgaacatttcatttttttttacaataatgatgtggctttaattatttttattgttatttaatactaataataatattttgtaataataaaaatattaattttatttatgtcttcaatttaataagaataataatattgtaaaaaaatgaaaaacaaatttagcaagagaaatgtgtgatatattttctgaggtacaagttcttgtaaataaatgtcatcattcgaaactttactatacggtttaattcaaaataaaacttatgtattaaaaagtatttcatatgtatttcaaattaaaatacttttaaagattaatatgaattttagcaacttgacaaaataggcattttgtaaacaacatttgtcaacttaaaaaacatgaagaaagagtagaaactcaaggtaaataatatacaacataccttgtttctcatctaaaagtgagaaggtgtcttaaacctttttcatcaagtcatttctaaagaaaatccacatttcatattgttcagttctatatgtgctccaaaatttcaactcaacctatttgtttcaaaaccgataaaagttatttaaaataaaaaaatattttatttaaatatatatatatatatatatatatatatatgagaggtagaatataatatttgattaagactttgtcttactttttttttttgtcatccgaaaattaattaggactcaaacgagccaatcctgaggaatgttgtttacaaatgtaatatgaaacggttgggtacgaacttttcgtgccaaaaaatccgctttaacattagtactacgagagattaaagatagagaaaagtttgtgaactcatccttgtcgctctgtaactcctccaaatacgatgagaaagccgaccattcggttggggaagacaccatctccaccagatctgaacagtctgtaaaaaaatctacatcttggttgtcggcaccaatcatacacttcatcgcccagaggagagcttccacctcggcatgtaaaggagatagacttcttctgagattggcagctcccaaagttgatgtctctccagttgatgatgtacagtaccatcctaagcctgaaaacttgtcggaataattgttgtctaaagaaaagtgccgcactcgattacgatcttccaaattgaaagaaccaaaattttcattgtgaaactcaagttgagcggacttccacaagtctgactctttttccgctaaacgtaaaatttccaaagggtctttatccacattttcaaatatttttttcattccttactttccaaatataccaaattatccatggaaatgaagatgattcgaatttcgaatgtatgtgccgaaataaatgatctaaatatgcataaatagatgcataaggaaatttttatgggaccgtaggtatctgtgaaagtgcccgaatcttactcgcatgatagcataagaaaagcgtgtggttaatggtttcttctagagcaccacatctgctacatcctttctcacaatttataccgcgttttcgtagattgtctgttactggtacacatcccgctaaaatttgccacaaaaagtgacataacttgggcgaacactgtacttttcatgagtatgcttttaaaactttgatgtctgggccaaaaaaagaagagttatcatccaaagtttttaacctcgccgtatgatatccagatttaactgtatattttccagattttgtgaaatgccaacctaggatatcttccttagttgacgcacccaagtgcaaaacacttattaacgagacatcttccgggcaaaaagctcttgtaaaagatcaatattccagaaatttgtccgtgagtctataagacttttcaccttcaaagaaggatcaaaagcgtaaccattttttaatgctggtctcgggaattgagttggaatccacggatcctcccaaactgagatggattctccagaaccaactcttttaataagtcctttattaaccagagatctagctgagcaaatactcctccaaccataggatggagagtacgattttatattatccaaagggttggatgtccgaaaataacgtcctttaaaaaccctcgcaaagagtggaaatttttcccctggaaccatgattaaacgccataattgtttagctagaagagccgaattgggatcgtcaacattacnaaaacccaaacccccttccgannnncncgttcacagctgatcccatgccatgcaatgcatacctctagattcacgatgataaactccaccaccactttgcgatcgcactcgtgagcttcgatgtaattgttttcggtagtctatagcaagacataacataagttggtaatgccgtagctaccgatttaatcatcacatcttttcctcccttttttttcgataaaaacttagctgaccatccatttatcctattttgtaatctatctctaacaaaagagaagatttttgttttagatccacctagactttctggtaaaccaagataggagcccataccaccaagattagtgattcccaatgttgcttttatttctgccttaagtgaatcatcgaccttatgaccaaactgtatcgaagactttgtaaaatttatttgttgtcctgaaaccgtttcataatgctttaaaatttccaagattactccacactgctctttgctagctttgcaaaagaataaactatcatctgtaaataacagatgagttaccgaggggcttgccgtagctactttcataccagtaatcaatttttgttgttcagctttccgaatattcgcaataagcacctccgtacatagaataaataggtaaggagacagtggatctccttgtcttaaacctctccccggtattatcaagcctctaggttgtccattaataagaacccgatattgaactgttgttatacaccacattatccatgaaatccacttttcgcagaa

SEQ ID NO: 15540 - DNA, 482 bp, Arabidopsis thaliana landsberg
ttcatatggttttttcaaaaatcttcaagtttacaacaatcatgatcatcatctagttcttgtaacaatcatgaaaatcattcgaattcatttttaagttttaagtaactttttaaggggaaatctatggttgcctgaattttcagctcaatactagttacaatctcagttttctactccaaactttttgccaattaaaaaccaccaaaacaactttaaactcaatacaactacaagtatttttggatttgttcttagaactatagctgcaactgaacctatcagttaacaagtagtcaaaggtcatatttatgattaccaaatgtatgttttgtttcaaaaaaacatacctttagatttaaaaaagacaaatgattgccaaatggaaaatgtatatgtccttatattacccaatagcttaaaacaaaagaaattctgcggatattttacatattacttttttgctgaaattaaggtatagt

SEQ ID NO: 15541 - DNA, 2510 bp, Arabidopsis thaliana landsberg
acgagaatacattttataatggtctaataaactcaaaaactataatagtgtataaataatttgtcgttgaaattagcttgttgccgtagtcaatacaaatcatgtgatatcacatgttacgacttacgagtttagacgatttttatttatttacttataaatggatccatgcatgttattttctgcaaaattatacaatcacttttgagtccaataacttaaagttccacacctacctaaatatgggtcaatctcaagatatgagatcactatcgagacaaaataaaaagtttgatactcatgcactgcatttggatttcttacctttcctatcaaaattaaagttatacgctttattgaattgtcaacaacatcctaagcactaatgccgtgaatatttgggttactactatgcctttaccggatcaccacatcttgcctcggccgagcctcacattcattttgttgcgatttccataattctttagagtcaaataaaacgatccggccatgattcatggtgagcaattcccttaaaaggaaacaaaagtgtgatcacttgattcaggaaaattaaggaaagtaatcaaattaatttttaaattgtagaaaaatgaaaacaaaatatccagctggaatagctcagttggttagagcgtgtggctgttaacctcaaggtcggaggttcgacccctccttctagcgtttttttggtctttttaaggaattttactttcacaagcccaaaaatccattattgaagcccatacgaaataagatttttgtatttttgagaattaagagagccacctaagttactacaagcttttgtataaaaaagagttgagaaaggagaaaaggagatgcaaaatattcggtagctaataatcaaagaactttaagaatcagcttgaaattggaaagcagctttgggagaagttgaggatcagattcttgaccaccactactaaccgcacccgattccaaaatcacaaaagaaactcaatagattctatagactataaactatattcaattccaaagtctttccattttatatagagttaggagccatcttaattttggagaccaaaagttacatctcttgctcaatggaaaacaatcattaggttttaacacttttaaagacaattacatctcaacttcccacgttgttagtagacacaagacagactggagaaaacaaaacccacatcgaaagagacactcttttgatcgttagcaaataaagcgattcctcaatcgttttgtttgacaagtttgttacataattccacgtgaatggtttgaagtcacaaaattactttttatttggttttgcatttgttttggtatgtgacaatgatggtacgtattaaaagatgaaagatcagagtaaaaggattaaaaagaatataagaaacaaaagagcatctcatcctccggatttacaatagtaaagctcttagttaaagttgtacataacccagaatactagctactaccagcattatgtctctcggccaacctaagtccaaatcctagaaagacgagtgaaaaaaagatggctctatcaaccatgagccgtaggcaagatctgatctctcagcaaacccaattacaaccataaccgcgtgtgacatctaagccctcatatgacaagcattgctgctacaccggttaataagaagaccaatgtgttagttcgaacagacagcttctctccagcatttggatcgcctagtcccccgctaccagtcggtccaagagtagtccccgggaacaccgaagatgacgatgaagttggcatcccgttggaatttggcatcccagtgttagtccctgtgttcggagtcccggtatttgggaagccactagttggagtcccactggttggagttccagtggtgggggttccggtggtcggagttccggtagtcggggtcccactggttggtgtcccactagttggtgtccctgtggtaggagtgccactagagctgcatagaatagtcaaaaacattagtgatcattcgttacaagataattagtaatgatgctcatctagatcatgtgaatgatggactgtttctttgatgtgagttctctttttagtaaaggtgaaatgaacagaaatgatgaatggtaccaaataaaaacatttaatcaagattcctttgtctattcattaggtcttaaatcactatcattgtgtctcctcaaagacaaattaataacaaaattcaaccaaaaaaaaaagttagtcggtggtaaaaatcaaatctaacctagaaagccaactttatggagactaaagaatcaaacattactaaactcatctaaacaaagaatgaaacaagaatcaaaaacataccttgaaccagttaaacagcttgaagcagctgcaataaacagagaatcagtattaaaaaaatagagacttgatctgaaatatgaagtgggtttttgtgtaaagatgagtacttgacggaggggtggtagagggggag

SEQ ID NO: 15542 - DNA, 987 bp, Arabidopsis thaliana landsberg
aatccaaatgcaatgtgttacaaaaagtaaacgagagtctacgtgaactggagctggtttgtgacaaagtttgttatcaatttaagagtttgttaaaacccaaaaaaaaggaagaaaaaaaacaaaaaaacattgtatcgtgattgtaaaaatttgaattgtggagctctcaatgaatatgtacaattgagtttatattgctggattacgttctggccgagacatatcaatcaatcagacaggttgctatgaattagtagacttcgtgtagtggatcattcttcctcttactctgtctctatctcttaattgttctattattgtgtggttcgactgatttttctcggactttaatcaagacttcttgtttatttgcgtgttacacaactctttgccctcaaattaagcttcactaacgttttttttttgctaacttgtaaatatcatataatgaaattgaaggtattacaaagagctttacataatgatagtgcaatcttggcaaaaaagataaaaaaacaagattacaatatattcaagaacaacaaagaaaagaccgagctatcgaatccaaagaagcatgaacttccgccatcttttcttatgccttctacccgagatagcgttgcggatatctcgatcaatattcttaaagataattggaggagggatgatttggttgttgtggagaacattatttctttgcttccaaatatggtagataatattatcaatatatatatggaaactttacattcactcatctgaattttcctaatttttttgctatgtgttgtttgtacattttgaatattgtactttattatctgtttgttgtagtcttgtagagactagagattgatcagttgatcacactttgttcctatatgattagactgagcaatagcataacttatttgataaagttaggactaccacatttgatttgtaattaactattttcttatacggtatgtgaggtctgtg

SEQ ID NO: 15543 - DNA, 1180 bp, Arabidopsis thaliana landsberg
gaaccgaactccagagggctttgctgaaactgcaacccaacagtaagtgatccatggtctcgggtgcaccagaactcaagcaacaaagaggcgagacaggaagtccccaagcaagtaaccttgtcctagtgggcaacctatctagatgagaaatccacatgtggaaggcgtttcttggagttgagcccttaaaccaaatagaagcagcccaatctttcttctcttcccgctgtcgaagagcctgccaagtctttgaagaggagaaaccaatacagtccacattatttacaatccagcggtactcatcatttacattcaggcgcagaggaaggggaatagtatcaagatgagattttaagctttagagctgcggtgaacgtgtcgagtacatgccccaactaatgccctgagtagcgtctgcaacagaagcttcaataggaatcctcaacatattaggacctgcagcaccaatgtgaataagtaaggggccaaatggcgtccaattgtctgtccagaacctagcagtaaggccattgcctatgttacatcgaaggaaacgctctgctaaaggtctcagccgcaagagacatttccaattccaggaatcagagaccaattcttgagaggtccagaatttagaaacagaggcatccccaagaccctgaagatggtgatacctatgccaatccacccataaagatcctcctccggagaataaccgccaaacaagcttcagattgagggttgtattccattctgaaaaccacctgagacctagccctccctcagcttttggtaagcagactgttgaccacgcgaccttaaccttgttgtgattttcaatgccaccagacccaaaacgtagtgtttacaattctactacaatatcgcgcgaaacaaaaccagactaatctatgttacagagctacatatatagtgttattatgtataaactactattctttctgtttgacaaaaaaaaaactactattctttctaatgtcgtaataagctcattaacctacgcaaacaaacaaactcgcgatcttttttatatactttttgttttgtcacaatagtctcattttatttcattcaagttcatacaaagacggatactaaaacccgctatcaaaaacgggatagtatcgtagtcacaaacccaaaaaggagacatagt

SEQ ID NO: 15544 - DNA, 3360 bp, Arabidopsis thaliana landsberg
  unsure (1)..(3360): unsure at all n locations
aaaccacacaaaaatacataattgaatatgatgctcttgttacgtggataatcctcatggcctttttgggacattttgattttccacgtctcaatatttcacacgcctacttatgtgatgactgatgcgtgattagtcaattttctgtattaaattactgttttgtttgtttgtcaccattctctgtatttccttaaagagtaaaagaaagtaaaaattnnnnnnnnnnnnnnnnnnnnnnnnnnnnaaacaagagttttaatgatggagtgagtttttcttgtactttgacatgttgctatggtagatgattcttgttatatcgatatataacatgagaactctttttaatacaaaactataaattatacgtgttgcatgtttgaaaactatattatcactaagatcaatagatctctttagagatttgacaaaaataaacaaagacatatatataatttttttggatatttttatggactgcccagttttcacatgataacacatgaaccttcgtctcatatacatgtgccatcttttactaatctaagattgcattcaaagtaatcagcctccatgtcattgtcaccatttaaagtttttcccattccttgttcattattacacacacattatatttgtcagcgattattaatgtgaggtattcatattttgacaattttaattcttataataaacaaaaacacttgcattcattctcaaattaacaaacgcaaaagaaagcatgagaccattgtcttattacgttgggcttaggaagtatgtacaggcccagcccaatccatgtacagagtcggtttcgttattggatccatagtttcaaaacggcatcgttaaagttttccaccttaaggcggtatcgctagcttatagaaagaattcgcagtcgaataaacgaaggagtgtctcctttagtcatttaggtcgattattaggagatagaggacgtgagaagggagggatctgagtctcctactagggtttcttctactggattgattcgttgcagagagtgaagctaagaagagattttcgtagctgtttctgtaagttttttttaatctccgtttcctcgatttgggtgtggttttattagggtttatcatctctgggagcttcttcgtttcacttttggttcgtttcttcgatttgaggttaacattgtgtatttttttttgttcctgtttgatttggtttctaggttttcggattggtagatggcgaacttgggaggcggtgcggaagcacatgccaggttcaagcagtatgagtacagagccaattctagtctggtgttaactactgataatagacctcgggatactcatgagcctacaggagaaccggaaactctgtgggggaaaatcgatccgaggtcttttggtgaccgtgttgctaagggaaggcctcaggagttggaggataagctgaaaaagtctaagaagaaggaacgtgatgttgtagatgatatggtaaatattaggcagagtaagaggcggcgtctaagggaagagagtgtgctgactgatactgatgatgcggtttatcagccgaagactaaggagacgagggctgcttatgaagccatgcttggtcttatccagaagcagttgggtgggcaacctccgagtattgttagtggtgcagcggatgagattttggctgttctcaagaatgacgcatttagaaaccctgagaaaaagatggagattgagaagttgctgaacaagattgaaaaccatgagtttgatcagcttgtttccattggaaagttaatcacggacttccaagagggtggtgattctggtggtggtagagctaatgatgatgaagggcttgatgatgatttgggcgtggctgttgaatttgaggagaatgaagaagatgatgaggaaagcgatcctgatatggttcaagaggatgatgatgaggaggatgatgagcctaccagaactggaggcatgcaggttgatgcagggataaatgatgaggatgcaggagatgccaatgagggcacaaatcttaatgttcaagacattgatgcatattggctccagagaaagatctctcaagcgtatgaacagcagattgatccacaacaatgccaggtactcgcagaagagctactaaagatactcgctgaaggggatgatagggttgttgaggacaagctgcttatgcaccttcagtacgaaaaatttagccttgtcaagtttctgctgcgtaaccgtcttaaagttgtgtggtgcactcgtttggctagggcagaagaccaggaagagaggaatagaatcgaggaggagatgagggggttaggcccagagttgacagcaattgtggagcagttgcatgcaacaagagcaacagcgaaagagagggaggagaacctgcaaaaaagtattaacgaggaagcccggcgtttgaaggacgaaactggtggagatggaggcagaggcaggagagatgttgctgatagagattgagagagtgggtgggtgaagggtcagcgtcagatgctggacctggagagcttggcttttgaccaaggtggtctcctgatggcgaataagaagtgtgacctcccccctggctcttacagaagtcatggcaagggatatgatgaagttcatgtgccttgggtttctaaaaaggttgataggaatgagaagctagtgaagattacggaaatgcctgattgggcgcaaccggcttttaagggaatgcaacagttgaacagggttcagagcaaagtgtatgacactgcgcttttcaaggcagagaatattcttctttgtgctccaactggtgctgggaaaaccaatgttgctatgctcaccatactgcagcaacttgaaatgaataggaacacagatggaacttataaccatggagattacaaaattgtctatgttgcacccatgaaagcccttgttgctgaagttgtaggtaatttgtctaatcgtctgaaggattatggagttactgtgagagaactcagtggggatcagtccctaaccggaagagaaattgaagagactcagataattgttacaacaccagagaaatgggatatcatcactaggaagtctggagaccgaacttatactcagcttgtgagacttcttataattgatgaaattcatctccttcatgataatcgagggcctgtgcttgaaagcattgttgctaggactcttaggcaaattgaaaccacgaaagagaatattcgtctggttggtttatctgctacattgccaaattatgaagacgtggccttatttttgcgggttgatcttaagaaaggtttgtttaaatttgaccgcagctacagacccgtgc

SEQ ID NO: 15545 - DNA, 2316 bp, Arabidopsis thaliana landsberg
agtgcaattgcgtattgtaatgaagtattttcacttataatgaatccaggctatcacaatcaacgtttaatactgtttaaagttctgcatcagtaaaaacctgtgcgagagaaagatctccgcgaacatggtgaacaatctccgcgagtaggctgtaagccaaaggcctcaaagactcaaaacatgctcgcccagttccaactagaaccctaacacagaagacaaagaagaatacctgaaaaaagtcaatacttgtttatagatacttcaactagataaactatatgcggacaaaagctgtgcttgagttaaccaaacatctccttcagaaatatgaaaattttcgaaattttcgaatttcagatgccttaagcctcatacctctcatctaaaagagtgtcaatcagaggaaataagcctctcttgaaatccgtcccaagcacatgctttaatgagactaagagttcctgcatttcatgtaatgaaaagtaaatctttagctgcactcccttaactgtgtcaccagagaaaacatactgacgaaaaggaacataaggttttccacctttctgatagaagcagaatctgaacacgtcacaagcaaatttacaatgcttttgcatatgctttcttcatgcggacggatatattcggcacaactttttagcaaataagtcaaaaaagaaaccgtctgcaaatgatccgaaaacaaaagtcaatatatcatgtcatctcccagttacaaacaatataattcagatcaaacaatgagtcggtgtaggccttgatataataatatttccaacaatgtagaaagctttgattcccttccttacgaagaaacattgtctcaccttaacctgtgcaccttttaactctatgaactgaggcttcaaatgtgaagggacattctcaggtccagggacagatatagcagcaaccatcagtggaagtaaatgaggaatgttggtctgaacgagtcggctatacagctggaaaaggaacataacaacaagggggctctctgtgattatcttgaatgaccgagtactcggattaagctgcacattcccgataggtggggtaggggtaagggactgatcagaagacgtaggcatctccataggcttcacttcttccattttaacattatcgaaaaaatggctgacagtaaatctgaaaatcgaatagattttgcagacaaagtctaaaaacggttgaacctcgttttctagcgtgggcctaaaattcctaagaaggtcaaagattatccgaatgcaaatcaaaccgttttcttcattatctgcggtgagcacctgcattgcaaccttcaagaggtcctgaacaaagggacgaagaacctcactgtgtggaagacgattgaggatctcaaccacaatgttccgcagtttgtgctccggattatcgataaattgcggtttagtaatctgtagaagaataactgagaatgctgggaagtagcattttaagaaattcaagtactctgccgtatgtgctatctctagactgtccctgacctccaccaccatctcaagccttgttggaatagctacacaaaacaatttccaaacagataaattaacaaaaaaaaacaaaagaatttttgatttcacagttaaaactaaaacaagaactgagtcgaagtcagactataattcatacgagaatcatgaaaattctctcaaaattcaaaatcaaaggaagctgatttgagttatatagagagtgaaatcaatagagaaattacgtaggtcaagatccacgagacgacgggagtgttgctcgaaattctgaattggactcatggtgaacaaagagctgagcgaaataatttacacggcggagctctttcgccgatcaccgacgcgacgatctctaaacgcaccgtacaagtgccagactaggtcaaaacaagtggaattttagcgaaggttttttacaaaagctactgaactagagacaattctggagagtttcccagaatcgtttgaacaaagactaacgaattagaggaggaagactatggaagatgatgcttctctaagcaattttccctctcatttttgtttctctgtgacgactctctttgaatagtgagttctgtgaactccgagaggattcacgggcgagatcgccgacttgtaccggccagttttattgtttccttaatgggccaaaattttcggcccaatataatttcaagaggcctgtgtgcattttattttattttaggagggtgttgttatcaagatggtcacatttagctaacgaatattaattagacaggagcaaaag

SEQ ID NO: 15546 - DNA, 869 bp, Arabidopsis thaliana landsberg
aatcaagaaagcttccttcttcaagattcaaaggtgttgttcctcaaccaaatggaagatggggagctcagatttacgagaaacatcaacgcgtgtggcttggtactttcaacgaggaagacgaagcagctcgtgcttacgacgtcgcggctcaccgtttccgtggccgcgatgccgttactaatttcaaagacacgacgttcgaagaagaggttgagttcttaaacgcgcattcgaaatcagagatcgtagatatgttgagaaaacacacttacaaagaagagttagaccaaaggaaacgtaaccgtgacggtaacggaaaagagacgacggcgtttgctttggcttcgatggtggttatgacggggtttaaaacggcggagttactgtttgagaaaacggtaacgccaagtgacgtcgggaaactaaaccgtttagttataccaaaacaccaagcggagaaacattttccgttaccgttaggtaataataacgtctccgttaaaggtatgctgttgaatttcgaagacgttaacgggaaagtgtggaggttccgttactcttattggaatagtagtcaaagttatgtgttgaccaaaggttggagtagattcgttaaagagaagagactttgtgctggtgatttgatcagttttaaaagatccaacgatcaagatcaaaaattctttatcgggtggaaatcgaaatccgggttggatctagagacgggtcggattatgagattgtttggggttgatatttctttaaacgccgtcgttgtattgcaggaaacaaccgaggtgttcatgtcaccgatgatgcgtatgaagcaactagttttgttgttgctgtttaacaacttgggaaaa

SEQ ID NO: 15547 - DNA, 2996 bp, Arabidopsis thaliana landsberg
  unsure (1)..(2996): unsure at all n locations
ttgggttcttcgtcgagcttgatatatagatgatgaaactctcccccaatgacactttgaaggaacccaaggttcccacttcctccttcttgaacactcaaattttttaaactcatatctacacaaaatggagattttgagctcaaaaaaaatatattgagagtagttcaaattttggggattatgaagaattagggaatgaaaaatcgatttgggaattttaaggtttgtgctcatcacaaaaaatcgtttggtattaacggaagacgactaacgtcgagggttatcagatctgttaatacaagttaacatttcggagattttggcgaggcaaactttatgttttgtttaaatagcggatcaacatttttatcatattttatttgatcgatctaaaagtttacatataaaatgaccattcttaaaaacatcacgtataaaacgatattttcccgttttaaaaagtaggttttgtttccgtttattttgtataattattgttcgtttatttcacgtttgggaaggtatcaaaacgaacaaacaataaacggtgcgttttggaaaggtattaaaacgtaccgtttcttctctcttgctattcgtaaccccgtgcaaaaaaaactgaaaaccccaaatccaacctctctcactcaaaaaccatgtcttggctcttcaaatctcgcggcgatgacgatgacgatcccgatcccgatccttccacaactcatggcggtgtcaaagaagatttatcttccttactccgtggcgtcgcagctttcctcgcaccgcctccttctccacctgtaaacgaacgccgactctccctctgataattcaccaactcagctaggtcttgtcgggatccgcaacgatctagccgagattcgtggaaatttctccaatttcgcatctaatttactccaatttcctagtaatctaagagatagagaaagtagtagaagatctctgttgaacgatcaagttcctggaatctctgaagaagtagtcgatttcgccgttaaaatctcgacgagacctggttgttggacagattttccattgtcactcgatactggtaatgctcctgtatagtcaatagaggaatcataaagcttgattctcattagtcttaagttctgcattgaccttttttttttcagtaggcaaacgtaattgttactaaaataggttttatttggaaaagattgattgcttctacagttgattggctttctagagggatcactagggttacagattaagcttatttggacatatttcttcaagcatatctttgttcccagtatataggcttggttagtttggaagtatagtcgaagcacgtagaggtagttgcattggtggtttctaactatctttgtttagttatgattttcttactgtgattattaggaaaagattgattgcttctgcagttgattggctttctagagggatcactagggcaaaagattaagcttgacttgtcgagaagtgtactctttggacatatttcttcaagcatatctttgttctcagtatataggcttggttagtttggaagtatagtcgaagcacgtagacataattgcaatggtggtttctaactatctttgtttagttatgattttcttactttgatttattaggaaaagattttttgtttgtacagttgattgcttgtagcctctggtgttttagattaggttagaccggtcctgccatctcctcttgggatatatttcttcaagcccaggtctttaggatctcgggttcccattactctctgtagatcacatttttcataccttgaaaatattgtcgaagaacttgcaggaataaacatgattgttcttcgaaatatagttgacttgttttcagtcgctaaagatgattgtgcttcagtctttcgctctttatgtgttttattctagacctgtttggacaagattgatcgtttctgcagttaatttgtttttttgaaagtccctgttctttaaatagatctctaggaattacgaataggcttgacgggttctgcagtctcttcttgggatatatatgtagttcaatccacatgccactttaaatctttttattttattttatttcaaagaatatcttcattctgtacaaccttgtatataggcttggtttgcttgaaaattttgtcgaaacacttcctgataaaaagcattggtggtttacatcaattttacctactgaattatgctgaagtttttctccaacttttcatgtccacattgcagaatttgaactgtctgaggctcaaagggcacatgcatcagccattgaagatttggttcctggccttgtagctgtgaagaatcaagttagtagttacatggatgatgaacacttctggctgatttattttattttgctgatgccgagactgaatgggcatgattttgaactcttagcaacatgcaaggtaagactgtatactggaaatacattcttctgaaatgtcagtattgatccaatattattaaaatcgtaaacgtttatgctataatgaccccttcaaccgattgcaataagaacaagtatagcctcaggaaaaactgtaaacgcataatgtactattggatggttcgatatcttttatgctctgcattttttcccaagttactattgtacctatttctgaaactttaataactatattgtgcggcacaggtatttgaaacaagggatcaacttttactaaagctgcaaaagaaagagacagcgtcaagcaagagcactactggtcacgaaactcctgaagaaggtagcagtagggaaacagaaaccgttgagggagtcatcgagaagatagagaatctaaaaattgagcaaagggagataagtgatgagtcatctgaagaaacaacgangagtttcagagatgaagaggtaatcntctttagtgatttagatgtcgacgatctctcggagaagccaagtcccaacaggagtacactgaaaag

SEQ ID NO: 15548 - DNA, 297 bp, Arabidopsis thaliana landsberg
cttcatgactattatcggattgtgcacagcctatggatctgggtacggtgaagatgaatctggaaaaaggtttatatagatcgccgattgatttcgcttctgatgttaggttgactttcaccaatgcgatgtcgtataatccaaagggtcaagatggttatttgatggctgagaagcttctgagtcaatttgacgtttgggttcatccctacattggaagagattcgaggctcaagaggtggaaagttatgggatcattcgtctcgtccctggaccctgaggattaatcaaagagtg

SEQ ID NO: 15549 - DNA, 1174 bp, Arabidopsis thaliana landsberg
atacaattcgaattaaaatagcgtgtggtgtttcagaaacgtttttacatgattcctaaaatattgggtagttattaatttattgatttaatttgattttgttttaaaaataaaatccaaaatatttatttagttctattagttgttaatttactaaatttcccatgcaaaaattcatttagttagttttaaactacccttacaatgttgtagttcacacaatgcttcccaataatagttgatgtaattttgtgaattttctcattaaaattaggaaatctaatattgaggcttatttattagttatccatgttagtcattgtaggttatgaaaaaaaaatcttctctttttgacaaattattaaaattttgaccgatgtattttgtaatacagaaacaacctaactattcttttagttaaactagggcgaaacccgcgccaagccgcgagctattttttaaaaaataattttattaatttgtatgtaagtattgaattttatttgtcatgatttatgatatattgtatgtagaacaaaaggattcattagaaaatgattggtaacacaatgcatttgctattttttttttataagatctatatagcatttataagttttggaagctaatgtttttgctttacgaacatttatttagaagagtcattaaaaaacaaaattgaaaagagttaaaaatcaccatatgctgattctggtgaggttaaagtacacatgcacaacttgaaagttgaaactttgttttttcataagagtatagaacgtaatcaaatgattattagttattgattaagatccacaatgacccttagttaatctgataagatccttaatattttgaggaagaaacttaaaaatctttaatgtttcttctttaagattcttcttccattgatcttctttctcgatgtttccttctactaagacttcattcagttcagaaataagctcttgaacaaaaaactggataaaagatgcacgttaaagtaggcatgaccaaaatctaaccgtaaccgtatttcggaccgtaaccggaccgtttattaaccgtaaccgtataaaacggttaataaccgtaaccgttaaccgtgaaaatagatcagttacggttaagaaaatatactaaccgtaaccattaattaaccgtaaccgtatca

SEQ ID NO: 15550 - DNA, 5148 bp, Arabidopsis thaliana landsberg
  unsure (1)..(5148): unsure at all n locations
atttatggtgagacactcttatgcatagctagatgaaacactatatgtttaactaggtgtaacatatacaaaacgtgaaatatgtaagtttgaacccgaaattatncataaatcttattcttataaattgaaacgcctatttaacggagaattcaaaatgtattttgtgcaactactaactaaactagattatctatcaaagtttagttataaatatatatatatatatatatatatatatatataaaagtctcaaaaaaaatcatccattttagcatttaaatatgatagggatctaagcgagacaacaagcaatggagaatgatcaaatggttacatacctttgttttcttgtcgactaattaattaacctactcaaaagccacagatcctgtattcctgtttgaaactcttctctgcatggagagaacaacaacaaaaacccagatttgttatcgtggtctaaagtaaaagtttctgttttaaattgatgttctaatgagcttgagaagagaaagagcagaagaagctcgtaacaaccaaaaagatcaagaaagaagaagaagaagaagaagaaagatgtgatctgatctataaatacacattatattatatcttcgattaattagagcttctcttttctatgtttatcttttgaaaatcatttatctttctctctctcctggtctcatgagtatacactatacagactaatatgtataatggtctgacatgaatattttaatccagcaagagcagctacaaaagctctcttaaagcatcaatattctacacatatgaacatatacctatatatcatgtgaatttagtagataaatatcctccgaaagataaattttttttttttttttaagtacaactaatgagtagtaattttatgaaatttacagttaaaatttcttaaacaattcagattaaaatcctcaagtgggtaccgggtataaaacaatacaaaattacataatacagtaattagttggaaacgggtttacaggaaatatcggagcttggtgtttgatgagtcccgaagacagagagaatcaaatcatgggaactcggcccctgatcatgtgcattcctatgcaattcgttctttattctttctttttttttttttctatataaacaattgataaacgaactaaaagaccccctcttttgaacaatttacaatttatagtaacatgacactccaaattactctctttaaattagtctcatatatagtaaaaactgaactttatgtgagccacttggatatttttatatgtagaatgatcatatatgtcaacgagattagtaggagtatttaggagttctaaaaatttaatatggattttatgtacttgcgcataactttacgtagactaaataaacagtttctcaaattaactgtattatttgtcgtggttttcaaaatctgtaataagcagcggcgttgacgcctttttccctcttatgtttgctgcctttagaagcactttgcttgagcccatgcacgtgcgatgctgcgaagaatcacgtgcgccgggctcaaaggccgccacgtcgatgctcctctttaattctttaggtaacaaagttttcaccgtccaactgtcagtatgtcagtgacacgtacgcacacacccaacggtcttcttgcaacaagagtcgcgttctcattctgctgcgtttgcgtcactgactgcaatatcttcttccgttttggacacagagtatgtaatgtaatgacacgttctccttttttggttgactttaagaagtcaacggcgttagctgtacgtgtgttgtggaccgcatttggataacccgtaatacaagtaattttattaatcacggacaatatactataatgcaactagtcgatctttgtcaaattactggttttgatatgtgtgacactaatatgttcataacttcatatatacgcgttccacggccggtgacggactccattatgaatattcttcttaaatttaaacttatatgcattggaccagaagatgcatgttgacaaaagaaagtgatcagaaagcatagaagagaccaaataagttggtttagtcgaatacgtattcaattcatgttaaaaaaaaaaatcaaatatacaaatataatcattgtcatgattaatcacacatgagaaaattgatatttgatagcacaaaacatccccatttctgcatttctggtttttgttggttcttctgttaaactcttaatgcttaaagcaaatatggagatgttgatctgatttaattagtagtaacccgaaactgcgaagaattagctccggagaaggccggccctgaatttgggcaaatttgggcttgattaggctacaaatagtatgttcaaactcgaactgaaaacattaattagactctattaaaaaatgactatggttaagctgccaactcattgctccacatgaaattgagaaatgtaacatggagatcgatctttatataatatttagtgataattaaaagaagcaatctttggattattcttcgaagaatatgacagattacaattccaacagcaatgtttaatttatatggcagaacatgccaatatggacttcaatgttgctattcgttgggaaatggatattggcatgtggtacaattatttaatcatgcttgtttctatgcctaattttatcaaataagaatgttaatttggccttgagtcatttgtcagggagattttagtgccgacgggttcaaaagacaatatgtttattgcaaagttgttatagcaaggttcggaaaagtcatttataaattcgctaaaagttgcgtttgattaaattatgcttattttgtttaatcttagaggataacaactattggactcctagtgaaagtgaaacatatgataactaatttattttagttattttgactaatcatttgtttgtaactgttaaacttggaaattattcagcaaaaaaacatttcttgtatttgcaaagtcacagaatatgatgaataggttttattataatagaataaatcacgagttcacacaattctttaaagaattacagaaatcgtaaaatgattatgccaaatctgatttcacgtctaacatatttggttggttgataagaataaaatcatactttaggttaccccctcatcgtcagcattgacgtttataatttcaatattctcataaacaaatacctcgaaagcgaccacgttttatcgcctagtattgacgaacaagctaactaaaccactcccacatgttacatgtaatgacattatatatacagacacatagacacagcaagtttacagggacgcgaatcgtaaacaagacgtaaaaaacaatgcaggatttttcttcaacggtgtcgtatagcccaagcttcagttactacgcttccggtgaattcgccgccgctgcagttaaagtttcccgcgaaaacgaaagctacaatatcagagatcatgagtccgttaaagtcaactccgtcaatgacgaagacgttgacttcgagtttgaaacgtcgccgttacatgaagaaaccttcgtccacttcccgacgttcaaaaccaacgtcgtttccactactaacaagacagacaaagaagccgccgctgaaaaaatatcagagcgtttccccggaaattgtctgtggagtccactcagatctccggctgcttcgaaacactcagaatcatctactagcacaccgaaacggtgccgtttgaagaaatttctaacgagaagtcatagcgatggtggcgttttgccctcaagtgcatcaaaacggtgctatacttttaaggatcttatgcggaggagccacagcgacggcggcggcgacaccagtaagaggagctcgccgaccgtgaaagttaagaacaaaacggtgtcgtataaggtcggggaaggtgacaagagaagaaaatcttatttgccttaccggcaagatttgatcggagttttcgccgtgattagagggttacgtcgttaattgaaactcaattaatttgtatagttttacacaactggacaaaaaattactataatagcaattaggtacttgtttaaatattgtatttataaatatttccatgtaacttttgtttcgtgtattgaagtccaattcaatgcgttgactcaaaggaacgtttgatatttttattttccatttttttttttctcactgagaggaaaagacacataaggaaattagatacttccacgagaaagcgggacctacgtgaagacacgtggaccactaatttctttcttaccttcctctgccgcctcgttttctgctcacagttccaacttcttccatacacacacattctcggaaaaatctctattggatcggtttaatggcgtttcttcaacaaatctccggtttaggagctctcgaacgatcttgtccgtcaattatgatcggatcttcattccggagcggtaatggccgtgtattcgacggaagaggaattgcgtacttgggttcgagggaaaagttcggattcaacagacgaagaagagtcgttcttagagttgttgcgatgtcgtcttcttctactccgttcaaaatgaatttgaatgagtatatggtcactctcgagaagcccctcgggattcgcttcgcactttcagcagatggcaagatcttcgtccacgccatcaaaaaaggggtattctccgatccttagaatgtcatgtttaagtagtagtaatctcaggagttttgaaaagttattaacttttttgtttgtttgtagagcaatgcggagaaggcgagaatcatcatggtaggagatacactcaagaaggctagtgattcttctggtggtactcttgtggaaatcaaggattttggtgataccaagtaagaattgtacagtactaggcttctatataacttgttaatgttgttaactaaacattgctggtgactagttaacatgggaagatttagcatggaaacactttgcatatcagtgtttttgaaattttcttttttatttcttccagtttttgatttattcaggaagatgctggtagagaaaactggatcctttagccttgttcttgaaagaccattctctccctttcccattcagtatctgcttcatttga

SEQ ID NO: 15551 - DNA, 3781 bp, Arabidopsis thaliana landsberg
cctaatctccaataatgtcacctatgcttctgtatgatgtccgcacgctggcttttagtagactcatgctttgtcgtgatgacaccatgcacaaataatctcgtccgtatgaaatttatgtcgttgccaacatgtttggtgcaagcatgaaacaccggatttgcagctagcatgattgccgagagactatcgaagtgaattgtgacaggctttgtaacctcaatgccaagcgttggtagtagctgtcgaagccataggagctcacttacggtatcggtcatatggtgcgatattttgcttcggctagtgtaatttgttttgtttagtttcggagtaacgcaatgaaaaagttgagataagaaaaaaaaaaaaaaaatagtcaatgttaacagaaaattacgataaaaataaaacaaaaataataactgtcaatattttaacggaaaattgagataaaatgaaacaatcaaaataaataaccgtcaataaaataaaacctgatgacgaaaataaaataaaataactgtcaatattttaacgtaaaattgagataaagagacacaactaagggaaaactaactttcactatttttataaaaatttgtgagaaaaaacactaacaaaaaaataacagttaatgttaacaaaaaattacgatgaaaagacattaacgaaaagttgcgataaaaagacactaaaaaaaaaaataatcgttaatattaacggaaaggaaagatgagaagatatgaataaaaaatgaccgtcaatattttaacagaaagttgcgataaagagacaaaaccaaaaaaaataaccatcaatatttttacgaagtcactataaaaatttactaaaggaaaaataaccgttgatattaactgaaagttacgttgaaaagacatagatgaaaatttgcgataaaaaaaatactaaagaaaaaaagaacaatcaatgtgaatagaaagttacgatgaaaagatattgacaaaaattaattgtctacattttaacaaaatattgcgataaaaaaaaaacataacaaaaaaataaccgtcaatattaaaatgacaaaaatacaaacaaaatattgcgataaaaaggtactaatgaaaaaaataaccatcaatgttagcgaaaaattacgatgaaaagacatgaacaaaaaattaaccgtcaacattttaccaaatgttgcgataaaaacacaaccgctcagaaatgctaaagacattattttattcatcatgaaacaaataatctgtgataaagaacaaaaattttagaaattacttaagaagaaggacgaatatatagagttcaacagttacaaacatttaagcagacaactattaataagaaaaaatacgatgaacagacacaaccgaaaaatataactatcaatattataatgaaaagtggagaattttggaaaagaaaaacggtgcgttttgctctaagggtgaaaaaagtgcgatctcgggtttcgatgtttgcctagaacgctccatgccgccgggggattctccaccgccggaagatggcgagttgagtagggggactctagaagtagggttggtgatcgtgagtgaatcggaggaagtggaagtggttagatcagaagctttggttgttgtggagggggaaaaaacagagagggagagactacaggttgcgggggggagtagaggagatagaagcgcaaaatcttatggcgaagggaagcgaggagatctctgtgggtgtaagtcaagaggttgcagatccaaaaaacgttcgcacacaggtctcttatgcatcagtggtgcaaaacacattggaaagaaaagtagagttggtggtagaagagatagatgggatgcaacagctcgtataccgaatagtgtctttgaggatgctaaaccactttgggaagactttctagtgggtaaattcttcgcaaaagctccttttgtgggtggaatacatgccctagtgaataagatatggactctagggaataaaaccgtgaagattgatgtttttgttgtgaacaatactaccgttagatttcggataaagcatgatcgcatcagatcacgagttctgagaagaggtatgtggaacttgtgtggtgtaccggtggttttgtcaaaatggactcccattattgacatggaacaagaagaggtgaagattatacctctttgggtgatagtcaaaaatgtaccaccaaagtacttctcatgggaagtcctgaaagcaataaccaatcctttgggagtccctcagaaacttcaccctgatactaaagcttgcaaatcttttgaggaagccaaagtgttagtggaagtggatttgacgacgaatttaccaaaatttttctctttcaagtctgaaacaggaggagatacaatcgttgagtttgtgtatccgtggctacctccaagatgcacagattgtgagaaatggggtcaccaaacgtctgagtgtttgattgggaaaaagaaggccatggtaacacaaaaagtggtgacagaaacggatcaagttgattcacggtttgaggaggataatacagaggaaacatggggaacaaaacatcaaaaaaattcaagagaaccctacagctgtggtgatattagaagaaacagagcaaagaggtatggatctggagggaaataataaggagtggtctactccaacaaaagttggtagaagcccgagtatgaaaaaggatctaacatatggagaagtgtccatattgaccaacagtttccaatgtctaagagaggaaggagaagagggggaagctactgtctctttggatgagaatacaaaagaagtacaaataaacgaaaaggaggaaaacaaggcagaatctgtcatagaaaatcagaataaaaaaaggagtgaagatgagactaagagttgtccaaaagggataggggaagtaactcttaggcaatccctgccacgagcctcaaaagatgaacacaaattagtttcgacgaacatctcgcaaagtagaaggaccacaaatcctattacttcgaaaacacgtaaactcaacaaacagaagtaatgtcgggtttcttttggaacattcggggtttcaataagaaaggtaaacatggagttgtgagagattggattaatgcaagaaagtttgattttgggtgcattatagagacaaaagttaaagaaagaaaagcagagagaatagtacaatctgtttttagtggctggtcttttctctcgaattatgaagatcacagacttggcagattatggttggtttggagaaacaatgtccgagtaacgcctctgtacaaaacatctcagatgattgcatgctcgatctttattgaaggacgtaaggaagaattctttgtatcatttatttatgcttcaaactttatagcgaaaagacggattctttgggaggatcttaaacatcatcatgattctcctctgtttcaaggaaaggcttggctaatatgtggagactttaatgaagtcttggagggagaggaccattcactgtatgaaacttctccatctatatcaccggggatgcgagattttcagcaactgattcaacactgtgagttaacggatctcagctaccaaggtccgagattcacttggagtaacaagagacatgaaggagttgtatgtaaaaagctcggtagagttttagttagtaagcaatggctttgtcaatatgatcaatcatattccgtgtttgagccctggggatgttcacatcatttgagatgtcgcttctcataagggaggagga

SEQ ID NO: 15552 - DNA, 1208 bp, Arabidopsis thaliana landsberg
  unsure (1)..(1208): unsure at all n locations
agttaaagcaacaactctaaaccttttatcttccttaattcgctgtgtattatacctcagagaaccacgaggcttcccttcaaaatttctcaaatcattcnnnnnnnnnnnnnnnnnnntctgaacagtagctgcttccatattctgcaaatgcacagtacatgaattcagcaaaatctattactcatcttcaacgccaaatatcatcaatggaaccatttcctttctgagaattaaactaattgcagatgacacttttgaagaaacttcgtgagtaataatagtaaaagaaagagttttaaggaataaacaaatccaaattctgcataaacaatcaatgcaaagacaaatgaaatcggagaatgtataaaggtttcaccttttttccccgacggcggagcttgagaggcagagactctttctctctctctcttaacttacgcttttcttattggccaaaattagttttagaattataatctgaataaaacgaatttataacgtaggggttggtgaaaatttccaaaactatctgttaattactaaatttatgccaagtcaataattaagtatttaattgaagataataagacaattaaaagtccaaataaaatgttagtggaaaaagtgtaacgtgttttaaaattaagaaatcttccttatgatatgtgacaactgttcatattgtgagtatctcaaatgatcttgattcgtattctttccaatgtttacagatttgaatagatagaatttctctgtaaactaaggatgaaatttctaaaatctgtcttcttattaaacttaatcataaaatctagatatatataaaacataattactccctctgtcccataaaaagaaattttctaggaaaaatatttgtcccacaaaaatagaagttttatatttccaatgcaaatttttaaactgttttcccgttttacccttagataaatatttattattatttttaacgtatattaagaggttaaaattgtctttatacaatatttcttaaagaatgtgaaatttaaaaaaaatttatcttagtgggacggagagagtattatttatgagaatcccgacccgtttttactaatcattaattttttaacataaaaagggcacatttctcttttgtatacatacatattactctttgactttgaaggattttttttttcacagattttgaaggatattttgac

SEQ ID NO: 15553 - DNA, 1586 bp, Arabidopsis thaliana landsberg
ttgtccactcgctgagttacatgattcaatgtctaaggattttatgggggtaaaaactgacctttctaaggcctttgatcgtgttgagtggagttatctgcgtcacctgttgttggctttgggttttcataatgattgggttgagttggtgatgtcttgagtgactactgtgtcttacactggcttggttaatggccacccgcatggtcttgcggttccacagagaggtctcagacaaggtgatcctttgactcccttcctcttcgacttatgtactgaaggactatagcatcttttaaacagagctgaacagcaaggtctcatcagtggtatgaggttttttcctgattgtccttctatacaccatttactttttggggatgatggcctttttgtgtgtaaggctgatgatgatcaatgcacatcacctgggatcgatcgatccagtgctggcggacgatttctcgattcttgctatcttttctggtctaaatgagcccgataagtcccgaaaatatttatgtcccgcttaaacacctaaaacctgcaaatgactcaagacacaaccgaaaagacgcaaaagacggactatgatacgataaataactcaatactaaaagacgtaaaacaccaaaaacgcaacatatcaatgatatgaaactaaaatgaagaaacttaaacggtgattagtttttgtttttcggttcgagagaaatcgttaccaaatcgtgtagaagtattatcgcatacaatgacaaattattatttttgttgaaatccatttaaaaagtaatatccaatatgaaacttgtctgtatatgtttttaataattaagtacattatattcttacatttgcatatatcatttgactaataatgagaatatctagttatttcactttctgttctttttcaacgttcttttagatttcgcagtttgttaatttatgtaatcgacgtttgtaattcagtacatatcgttaagactaacaaaaaaagagaatgaacattaacaaattcacccaaagattaaggacaacgagaattctggccaggtcctccaaagtaaaagtagggctctgacatgtatgttttccggtggagctttgtagaataacactcgtactcatcagcgtactcggacagatatttggggtatttgatctgcaaggaatagtccttgattctaatgttgctgtggtaacaagcttgagcccagaggtaagaggcccattgcccactccccattgaagttcttgtatgtggcttcttccccacgtttgggctatgtacttctccaccccactgcacagcggttgcgctatgtttgaggtaggcgaatagtgtacccggccaataacccaacacgttgttttcgcaagtcaaccaccagttcccactgtttggatcctacaaatacaatcgatcattaaacattaaaggacaatacaagcccgttccaaaacatattcaaaaaaatttaacaccggtttttggggcattaaccaaaagggacaattttataattttgtaggattgtgtagaatgttgatcataaataacctaaaaaatcctacaaggaata

SEQ ID NO: 15554 - DNA, 1204 bp, Arabidopsis thaliana landsberg
tttggaattaatattgatagaaaacctccataagatatacttcctttgttttcttttactataaaaagttttaaaagtttttgttcgttttaaattatttgatttttttcaatttcaatttatatttgtttaataattataactattcaaattatgtccttcttgtttccattggttgaattattattttttatctattaaatcatagtttcttaattttgcttttaactaaaaattctcattaaaacttggttcaatggttaactgagagttcattaatacttttctactagggtttgattcccagaaaatgtagattaatggtgcacaatttatcggacgtataaaatgccgcatgtagagccgttcgtagtggttttgagttccgggagtgactattatcataataggattatattaaatatttctagtgatgatgtaataagacgacaaaacaaaatgaaatagatacagctttgattgatctaagcagtatttgtttcatttaataaaacccctttaacatagacgatctaaagatatagcggatttgggtgtaggaaggacaaaaacatataattttagtttttatttgttcgttcttcacgccgctctaccccccccccccccccccccaaagaacaatagattttctaggtagcccaagcattagcacgtttgcgtttgtgtacaccattgttctttaagcttttgactttgtgtgaccgagtctaagtttgtttactccatctaaaaaaccattactattacctcttggcaagtttgtttttgtgatgtctactaaagtctaaatcatggaacagtaaacaaaaaaaagtctaatttgttatcttttgagttatgactcatgtgcttattcgacttaggaatcaagtagtcattgaagtagtgcttatcatgttgttattgtacatctatgttaccatatagttatagttaattattttatgattccaataatgtcaagacataaacatctagattctcgaatatcatttgtttactacatacaggccaaaatttggctgccacgaaaatatatgtatctcagtattttccctgtttttcctctgtttcttctatcaacatcttaacattacaactggattagaaaaaaaaacctcgggcataatgaattagtcattatttttgccaatttggaaatattaataccatatatgtt

SEQ ID NO: 15555 - DNA, 707 bp, Arabidopsis thaliana landsberg
catcattaacctctattttcaacgaagattaacactcgtgatcgatgcatcattaatggacaaagcaaacgacatggtagtagacggaccaggctccaatctctcggctagtgggtttgactcggatctgaccctgaaaacaaatccaggtgactgaggcacgggcagagtaagaaaagtattagtgagcatttgaaatactgtggacatggttggccgatctgcaggatttacttgaacgcacaataagcttatatggatgcatctgatgacttcatctttatcataactctcccccatggccgggtctacgagttccaagaatgattcgttgttccaaagcctccaaacctgttaagtcgatttgtcaataaaccaatgttcagagcaacgatcaaagtttaaagaggtcaaaaataagttcaagattgcattggctttgtaggactaacatatgtgaccaagtttcctactgaaccatcaatctcatggaagctactactctttttgccaacaataatctccagaatcaatactccaaaactataaacatcagatttcatcgagaactgcccattcgccacatattcgggaggcatgtaaccgctgcaaaacacagcacatatcactttaagttttattagggaaagaaaagggaatagacagagtgtaattgaagtaacaattacttacaatgttccaactac

SEQ ID NO: 15556 - DNA, 900 bp, Arabidopsis thaliana landsberg
tctgttcattaataaacacagggctatccgagctatcaaatttcattccattttccacaatctcccaaatgcttggatggagagaaaacaggtgagtacgcattttgtggctccaaaatccgtaatcctctccatcaaagtgagggggcttgcaagtggaatggggagcaaatgagcatttgaactatgcgggatgcgcgaataatcgaaagaaaagtttgagttaaccgtctttcgtctatcgtagtcgtcgtcatccttttgggaggaggaagattcgtcgctgtcgtagtagacaatttccttgatgcgccttgtcttcttcttcctcccgtcttttcttttgtggcccgagcctgagtcgttgggcctgtcatcattgggctcgttgacgaaggactccttctccttatcattgatcaccatccccttgcctttaggatccatctcttcgggcggttagtccctttcttgaagaaaacggcgccgataccaattgagagcacctagaggggggggtgtgaataggtgatcctgtaaaaacttgaaacttaatccaacaaaacttgattaggagttagcacaataaggccaagtggctagagaggagttctcttgtgagacacaataaacacagtaaggacaagcacaagagacacgatgatttatctcgtggttcggccaagtacaaaacttgcctactccacgttgtggcgtcccaacggacgagagttgcactcaactcctctcaagtgatccaatgatcaacttgaataccacggtgatcttctttacttttctctttcccgtttgtgaggaatctccacaacttggagtctcttacaattagaatcaaaatgaagcactagagtaagggagggaagcaacacactcaaaacc

SEQ ID NO: 15557 - DNA, 1673 bp, Arabidopsis thaliana landsberg
ctcactgtaagactggactggctcaccgtttggttcagatccagcccgaaacaaccgacgaggaatagggtggttcgccatctaaaaacagtattagggtatacagatttcacctgcgacgacgagaactttacttgcttatcaacagttactaaactataaatttgtgaaagatactaattgtgtgcttaaaaatccagatctaacaatatttacctttgggaatgatggattcgaccccgtatgtagcacaaacactcgaaagctgcaaataccttccacaaatcggcagattttaaacaggattccaatgtcgcatgtcgttttttttcctgcagttatgttcttcaacagagagagaaacgaaagaggcgctagggttttctgtttacaggggaatttctgatatatatgtaaattattcattttcttgaaattgtagtctatatcggttgcgtcctcaaaccaactttgtgctccggatgatttcaaatttcaaaatttgaaatgatatgcctatgaagctatttgtcccctcaaccaaaaaaactattgtagagagatgaaagtaatttaaagtagatttccgacagatactatacaaccatagttagtttgtatattcttttcaaatccataatcatttattataaattctcaacttacaattcactaaaaccatatataaccttattgagaattattaatttaacacaaataccgacaaacattatacacaataaattttttcttttataaaaattgaaaataggtaaaatatatgacccgcggtatgctagtagattattaagcagagaagaaaataactccgaacgacgtcgcctcaacttgatccacttcgactcaacaaaagataaaattctctctcaaactcagccgcccagatcaaaaacaacaatgcaactctcactggttcaagtctcttcagtgtccaacttcagatcccaatcaaacccatcttgtttacttcttcaaaagtccatctttcccgggtccaagttaaccctccatcgaatttttcgttatccgaagaaaatctcaaatggctctactcgtgcttcactgcttgagacccctatcttatgggctggtcggatttgtgtcttctacgctctcgtgaaagctggctttgctggatccaagtctaaccctatcgtttctggttctggctaatttaacgacttctctagtttttttttttaatggttcgtttttattgttattgatttttgttgttatttggataatcttaggtttggaaactggtggtgttgatgttgaatatgatgatggtgctgatcttggtttctcaaagtggcttcagaacattaagggcaacaaaccaggtttttgtttcaactacatagttatgcttatgttacaacacttattacttgtctgtctataggattttgtgtcccaatctagagctttgatccaatttcagacatactcttgtgtgtggtctgttgattctgctataaattcaatttcattagttcaagagaatgcttgactctatctagcttcagtgttgagaatgagacaatcttttttttactttatatgttcagataaggatgcagctgataagaggaagctagtgagcaaaaggcacccaacgacaaagggaacacttagaaggaactaca

SEQ ID NO: 15558 - DNA, 3076 bp, Arabidopsis thaliana landsberg
tctctcatcatgctgagctcaaccgcttttaccagttagcaattgggaccatatttctacttagttgatacttaaagacgttttaaacatataaccaaatactcggtttgatacggttcgtttaaatattaaaattattcggtcgagaacaataatcaaaacttgcgatgataactttttacaatttgcaataatactttaaacttttcgagagagaagacaaagattatcataaaaatgtttacaatttgagaacaaggtccaaacggatatatatacatataaaagagaagcaaatgttttttttttttttatttattgtttaacaaccctagtggcggctgaagcagcagcttgacctctcctcctagcagcaataagaccttctgtccgaacctacgcacctctgcgactgagagtttgtgacatatgtggtgatggaagagaaaatttgacatgagggataagcacggttctgttcttatgcttaccaacccagggaaactaatttgaagtcaaggagagaaatagataagttgagtgatctgaggcaagagccgtcttttgttattgatgatatgttgttttctgttaatcttcatgactcaagagagtattatccaataatggtgtatgtatgatccaattatccaaaggaggcgcattgaaaacccttgtgggtttttcaaggttttccggctaacgtgcttcccaaggtgtctaaaatggtgaattttgttggattttgagcctttgatcaaacttgcaataagtgtgatgaagatcagaaccaaagcaacagaagaaaagagaagaagcgtcggagatgagactcgtgaagagaggagtcaacgacaagagagaagtcacgatactgcttcttgtattaagttgctccctttctttgctggtagaagccagtctcaactcttctgtacagttagtgaaaatacaggatctgttcaacatatattcaaatgttatagatttgggccgaacaaacaaaaacaaagataaccaaacagctcttttacctgtattggttacccacatcaggaccttgtccaaacacttgtctagaatcatgactagagcagaatacatctaagagccgacgataaccaattatccttggaccatattcaacctggaagacaattatagagcaagagcaacacaaatctagctattggatcagatactaaaaccaattcctcaaagtctcaaacgctaaaaattgatggacaaagacaatttaggtaaatctcaatcacataaacacaaatatcacacattaccaaaactcagctaatcaactatagaatcagacttgtattacgcacataaatgtatttgagtcctctgtgtcattttgaaggtttgctgcaagattcgtttttaagattccttgtattttttttttaggtacttcagattgcttcaattcaactaacaccaaagacttgattctttgtgatagcaatgcggcgggctgctgtttcgatgaaaatctgcaattcaactaccactttaacgatcacgagaattggttacgttgttcttacataattttcatatgtacaaaatgaaaactttgcgtattgagagtatgcaatgtgaataacataagcttttcgagaagagagaaaggtttatcataaaaatcttttaggatttcagaatgaggttcaaaaggaaacacagacaacaaaacttgaaacatagaaaacaagagaaacaaagtttatctcttttaactctagtctgccttggcagctgaagcagcagcttgacctctgagacgaccagtcctccttgcagcaataagaccaaccttctgtccaggaggtgcatcacgcctaacagtactggcgtgaccaatgtgctgatggttacctcctccatgaggatgctccactggattcatagccacaccacgaaccttaggccatgagttcctcttcacacggtacttgtggtacgcgtttcctgccttgagcatcggcttctcagttcttccacctccagcaacttgtccaatcatagccctgcatccacttgggacaatcttcttcgaacccgatggcaacttaatcctgcacaaacatatactcaaaaataagcattcacaagactacaagaactataccacaagcatttctaattaactaaatgattccattaacatcatcataaactacactaaataaccaatgatacataagcattttctaattaatccgattaagatcatcataatctacaacaaacaatcaacagatctgaaaatgtttataagcctcagaagatttttggataagagaaacaaacctagtagtgtcgctgtcagggttgtgagcgataacaatggcgtaatcaccagaagctctagcgaggacaccacgatcaccgacgtgatgctcgacgttgcagacaacagctccttcaggaatagatctaagagggagaacatttccaacgacgagagtagctttcttaccgcagtacaagaactgaccggtgtacataccttcggcggcgacgaagagctccttttgtttcttgaaacggaaaggatgacggaaagtgacgcgagcaagaggagcaccacgaccaggatcgtggatgatctccgtcacgacgcccttgaggtaaccatttctctcgccgaaatcgaggctacggaacttagccggacctttgcggtggtgagtgtgggatttgaagacggaacccgcacccttacgttgagctctgatgacacgacccatggatgctctcgacggcgaagtttagatattagggttttgagatccaacttgagagtgaggaaaatgaaccctttttattctgcaacctcatgtttgttctaaccctaatgggcctaagtggatctttatttgatatgggtcagaagaatctaaatggtgtagtaattgttcaaacccatacaaaagactgagttaagaatcacaaaggcaggcctaccaaactagactaatccggatgctaaccaaatcatattagaatttttcttagaaaaaccaagttaaaaagcccaacccccaaaccttta

SEQ ID NO: 15559 - DNA, 2814 bp, Arabidopsis thaliana landsberg
ctcctctacaagccaagactgaaaaaaacacagtacacattcattgtaataaacgttgaattcaaatccaaaacaaccaacagtaaaattaaaaactgacagctacttacacattggttactatttgcctcatattcatcattgttgtttgatgtggcagcttcattggatactacagggggctgagactctttaagaactcttatatcagtctccacagcttcaaaccttgtttttacactcgcttctaagcaagtaactttcttctccaacccatccaatctgctgcttgcattcttgtccatgtcactaatatgtgacattcattttctccaacatattccaaatatccagcaagcttgtcttctcctcttcatcaacctataatgaagcatatagcaatgttaggtaattcactgtcaacatatagacctatgtatatggaaaactcagaaatggtaaaagcaggacctttatatgagctttccctgttctttgcttcttatgagatacatcatctgcaggcgttgattcaatcactttactctcaccatcctcgtttgatgattcctgattttgtttcctcttacgccgtgctgccacatgtgtccacgcatgagattgtaaacggttgtggatgatgtctttaagcaagttgtcaagcgtcgtatcatgattctcagctgagtcactccattgaggatacatgttttcttcagatacagggatcatatgcctcacacgcacctacatacatataatgacaagattaatcagtttcagttttttttaaagacaagtagcagaattgatctataaaaccttacatacctgtccgtgggcagctttctccttttcaatgaaagcggtgaagttaaaacgttttctagaagatctccaatcaagtagcggaacacccgtcagatttgtttttctaaacccacaagcttctccaattccaggcacactctcatatatccacacgagcaaggtctgaacacaaccgtgaatcacataagaatctccgtcatacttgacaatcttcacagaccttaatagagagtcaaaagccactcgaccccaaggatacttctcaaaagcaacaggatcaagcactcttttagcactcgacaacgggactctagaaccgtgatgaatcccatgtactcccacagatagtaaacataatctaccaaccatcatcctcttctccaaactccatgtcttgctaatctcaaagacacgttccaactctgtaaacaatgggccaacagacgttgatacccccatttcattccagaaatctttgtaatcagtttcaccagtgtcagactcgtcaaacatatcgcaattgaggcccgttatgttctcaaactcgtagagagaaaatcttattggcctgcgatcaatcaaacaccacatctcatgtatgttgtcgactcgcaactgattcgtgaggaagaaatgaactgtctgggcagcccatataaagccactttcagtaaactttataaaaagaccaagtgtagttttcttcaactcatcccacacatctgcacctaatccgtctttgatcttcccaatttgagaaacatagcagctgtgggccatactccttttttgcaacggtgattttccttcttcatacaagcgaagcggataactgcgggtatgactagaagacgccattcctaatcacagaaaaaacaaggttgcataagcaaataacttagaatcttagatgccttgtgagattggcaaactaaaatcataacaaatctgtcaccaatctattaaaaattgaataaatctgtcaaaacaactcagaaattcaaaagaaaaatcatacgaaggcgggagtttttcttaaaacaaaatacagacgatataggctcaaacacttactagagacttgtgtaattaactctgaatccaccgatgcaaatgagaaaaacaatctgcaacaatacaaataaatcacactctgatttccattgcaactgaaatgcaaatgagaggatttttcttaaagtattgagttaaaattgtcgataccctaaccgaacttgtgaccagtgacgccggcgattagaaaaaagatctgcaactgaggaaaaattcattactcgaaagtcctattcgtaaacttcaatcggaaagggaatttatcaaaaacaggattctaaatgtgtttacctataacgaatgtagagaagagaaactaccaccaccagaggagagaaaccgtcagacctgattgagagaaacacaattcgccgccgtttgtgtggccggagaagaagaacatgtagatctacaacaacccaaaaccaattttcattagtcgagagtcgatttcatcatctttaatctaagaagaggatgaatgtaaagctgatttcacatctgattgactccgaatttacctatatcgaatccaattacaaaaagaacccaacagttttcggcggtgaatgggaagaaccctaaaccatcggacacgaacgcccaccgctgttcaccgccgcaggtgaaaccggagaagaggcgaactcctcactgccgtctgtgcatccgaaacccacagcgcagtcaccaccggagaagaagtatccctcgtttgagagagaagaaacagcaacgccaccagcggagaagagatatcgcctagtcgagcagcgaccaccggagagaggagccacccccggagaagagaagttggcggatcgagaagccaccaccggagatttgctagggtttcgatttgaaatcaaagaaaaagaagagacatgcaaaaggggaaaagagagagtt

SEQ ID NO: 15560 - DNA, 2252 bp, Arabidopsis thaliana landsberg
atataacagaaatttttacagaaatggctgaaaaaagaattgctctcatgattttgcaaagtgagatgttgttttcaccgtttgtcttttgaatggtttttggtccaaaatatttttaatgggatcaaccaaaccccacagcagttagttttggtttagtttctatagttcagtttaaaaaaaaaaaaaaaaaactgaaacgaagaaaccgaagaagaagaaaaagaggaagagaaagagatggagagatttgaaagagaagtagaaagaagttcaaacttcattatccacttcttcatatttcgacacctctccattgaactccaaaattgaggaagaaatttcttgttttcagagatgaacaaaaattgaaaaaataaatctcagagattcaaacaatttagctttttaaactaaagatattctaagtttacaagatttatttataaatagtaattaaaacgtaaaaaaaatgagattttgagaaaactgctaaagacggccgcaaaattaggtttggggaaaaggatacacaggttgaagatgactggaaaattacaattatacccttcaacgaattttttctgtgtacgtatattcaatttatagtgtacgtacacgaaattatttattggaacatatatgggacgatttctaataactcaaactattttattacgtattcttatatctcaataatctcaatacatacataataattaaataaaaatagatggtgaaataatgtacgtacatttttgttggtaaattaatgtatgtacatgtgtaataatatacgtacatctttgtttgtgaattaaattattaagaaaattttatttatacaatattaaaccaatattggcagtggctgagataagacattgtttgttgtatgattattctgttcttaaaaacacttcccaatctatagtatacgtacagtggtacaaaccatgttgacacatatttcttggagtcacagctggtgtacggtcacccgagtgagaaatgttatctccgtcaggtacacgctgacttgtggacgtacactctgccaacagacgactgaattcccctggtgtgagaatgacgttctcctcaacattccctattccatgttcttctacaattacatcgttccacttgttgtaatcataatcttcgccactactttcactaccatcaatagtaggatcgagggtacttccccctatagatccatcgtcaccctgataatcatcatacccaccaccatctttgttgtccccctcctcttcatcctcatttgttttatcgtcttcatcgtcgtcttgctcatctacggcctcattattttcatcaacatttgaaacactatcacatacacggtaactttcagcatcatcaccatgagtcctagagacattattctcgagtgtcttgacggttgtaatgaaagagacaaacaagttgagagaaggataccgaccacgaattaaaaagaacgtatccaaccccacttgactgtcaatgtagacaggagggcgtttagtatctatcatcactaacatctctcccggcatccagtaactaattatgggattgatctctatggaattcaaactgaaagcctcgcttagtgtacgtacaaattctgtgtacgtcatgttttccttacacgtacacatcgaccaaacatgtctttctttaggttaaattccattcttcttctttgcatctccactcaccgaccataataaatcgggaatatctattatccaacagcatcataaattcaggagaaacccattaaatgcaactgaaaacatgattatatgtacaaaaacaaatagaatttcgatatacatatttataaacataaatatttacacatttagcattttcaaccaacaaaattgaaaataaaatatttctgggtttttctataaaaaaacaaagttgatttcgaacacaatgaagatcatagtatgttataactaaaaaattctttaaaacttcattacttatacgataatgcttatcttggctccaaacttcgtaaataaacaagatcaacacttcttgagcatcaatgtacgttcgcaattaatgtttgttcctggattcatctttaactcaacaattattatcaataattttataatattataacatgtaatgatgattttgcattaattatgacaagagtcacgtctaaactttttgggccattaaatgttgatgtcattcagtatttaatgcgaaagatc

SEQ ID NO: 15561 - DNA, 3212 bp, Arabidopsis thaliana landsberg
atgtttcagtgtggccattgacagcattagggatcgaaccaaagtttaccataccacactctgtgaaagttgatgaagttgtcttagccaacggtttcgtcggaagtgtcctctctgactatttttggtatgttttaatgatttcagctattacaagataaagtggacccaacaagcaatgttgagtttagctacaagtgtcttgtttattgctaggctagatcctataaagaggtgtgtaattacttgtttagaaaataacttggctgttttggtgcttttgcaaccaaagggcactttctgtggtgtggacaactccgctggtagcgacactgggcatgtctctcacaattccgcttgcgatggttgctgacatgatgatccatggtcgtcattattcagccatttacattcttggctctactcaggtaactaaaacttatattccatcaacaacagagaatgaataatttttcctgatgctcaagaattagcatttggtttattttgcaggtgtttgctggattcgtaatagctaacatatcggatttgttctcaaagaagcttggattgtagcacatatgattctttttttttggttgttttgtggtatttctgggtagaaaatgtatcctagaagattcttggttggaattgaaagctaaaagggaattttccctgtttaatggatgaaagataagaatgtgattaccaacgtttttgattcccatgtgcacgtctttggaaaaagaaagtgcaaaccagagagagttgttgtctgttgagcaaagatgagtgaaagaaaaaatcaaattcatgtttgaactagctcgtatacatgaaaccgaactaataaccttgttggcatagataaaatatttttttgatctttaaaactccatcaaccaataaccttacgttgacagatatgaaaaaaattctatgttaatgttgttttattattctaaattaaaagccagtaattgataattacgattattggttcagaacgaaccttctttctgagccagaaagtttagttcgccttgttctgtctgtgtttcttcctcttcccctgaaatcgaacgatttataaaatcgtcgtctggctttcgacgatctgctgacgaagaccatggcgccgattttcagatccacttcccttatcgctttttctctcttcttcttcttctgtgcttccactctttccgatctcatctgggtaatcaatcctctatctccacaaatcctctatagagcttgttgacatagagctttaattttcattcagtcgttgcttttcgtagctgcgatatctttttagcattaccctctaagtcttccctcgtagtttagtgatcttgatatcgttatctccaagttttggggtttgataataatttgtgcaacgttgatttcaatttgatctacttgtttgacgaatttactactttagctgcttatacatcccaaggatattattaaattcttgtctttgattgaattcagctgttcaattcattctttccttttcttatctgtttggttttttcaggtctgaggatagttacacgatcacgggtagagtgagggttccagcaagtaggtttcacaattcattctttgtcttttctctcgagaactcagtttttttttactcaatttttgctatgtttttggttttatcagtcaattatctgaaacctccgttcatggcactgttctaaggaaaaatacaattatctacaacttatttctattggtcaatactcaatagcagatttatagctgttatgcaacttccactatgggtgtgtttgctctgtgtaattagtatgtcttgtgatattgatgtatatttgtggcttagatagtttcagcaagtgagaagtaggtattagtaattccatgtatgaatttgctatgtagtatgccatctctataagtggtagactggctaaaagcagtgtttgcttaagaatattagcaaatacgttttgatatgtctcttgagtacttcatattattctaattacatgatacttcaaccaccgtctcgtatccattacgtaatagcctcactactcttttactgcaaactaatctaaaagttattatggcaggcaccgtgattggtcatgcagctaaattctcaaatatcaaagttatactcaacggtggacagcatgttactttcctcaggccggatggatactttaccttgtatcctactgttccttcttcaaacaatatgttcttctagttatttactcacgatatctactaattggtttcttactcatctttcaaatttgtcatctcacacatctgtagcttttggtataattttttttagataaagttgagaaaacttgacaccgtattttgttgtgagaacaatagtatcagtacttttgatcttcgttttcctttacttctctaatttcaaagccacaaagtgccagcggggactcatctgattgaagtttatgcactgggctacttcttctccccagtaagatcttttagttgcaatattctatgaactacatctattttgagaacttgcttctcatctgtcaatcaaatattttaaattaggtgcgagttgatgttagtgctcggcatcgtggcaaggttcaagcaacacttacagaaaccagaaggagtcttactgagctggttttggagccattgcgggcagagcaatactacgaggtgaatacttcatactgtatcttcttctattttgtatgtgttagttttagctatatgcgtcttcctcctgttttctgatcgatcatgtactatttgcagatgcgagaacctttctctgtaatgtcaattgtgaaaagtccaatgggtcttatggtgggattcatggtcgttgtcgtgttcttaatgcctaagttgatggaaaacataggtacacgtctctaaactcttcacttgtatccatgtattgataatgttcatcattaaaccgatttgtgggtctctccctctctagtagcaatcaatgcgacagtaaccaacctaacagtgtacctaatctactgaggattctagcagtgccttgtttttttatcatttcataaatctcttcaagctattgctgaattgaaacctagcaaattagatgtaaatggtttgatgagaattgttggtatgtgtgataaacagatcccgaggaaatgaagagcgcacaaaac

SEQ ID NO: 15562 - DNA, 5465 bp, Arabidopsis thaliana landsberg
  unsure (1)..(5465): unsure at all n locations
aaaccataaagggaaagaaaatgcatagttcgctaacccgtccgcaagacggttagcttctctataaacatgagtaacatggactaaccagtctcttgataagaagccatggcacaatcgcaccaggaacgataaaggatgagtatcactaatccccctcagttaaaaaacccaccaccaactactgaatcaacctccaactccactcgcctaaaccgcctctcccaagcaatataaagcccgtaacagacaccaatattcaaggcgaacccaccgcaccaacgaccttgaccatcacgcacaactcctcctactgtagccaatcccgaatttccccgtgaagcgccatcagtgttaagcttcatccaatcttctttcggtcatttccaggccaccattctctccatttgagtattcgatctgcccgtatagcgattcagtttgtgagcttgacttacttgagaagcgaagtccttaacaaactgaactctatctctacatttaccaatctcgccaaaaacgtagccacacggccacttccaactccaccaaaccacaatggagaacaaggttgcccatgaatacccgacctcatcattcaccattcccagattcaaatataaccaaccaagaagagacccattgaaaaaatcatgtctcctgcgaaccggcactaaccttctccaatgcaagactcggggtgagtctcacacggggatagatatggtggcttcacaagctggcgatcgcttctctcttgtgaaggaaagatggtcgaagtggaaatctgacacgctagcggtcgcttctctcgtgtgagatcaaatcagggttttgatggtggattgatgatcgccactcaaaagtgtgaaagcctttgtgataagatcacgaacctttgtctcaaggaatccacacaagagacattgattcacacgtttactaagtaaaggaatctacctaactttaattaaacaaaaacaaagcctaagctttagagaaaactctttctattactttcaaatttcgtggtcctttacaatgaaacaaatgagctttttataactcttacatgactaagctacattaaaagaaaatattctaagttaaatacaaatcaatcgatataatagagaaagcgtgattggtggtgatgatgaggtacaaatcgtgggcattgatggagctttatgtctagatgcattctctggattaaatggtggatcaaggatttcgagcaagcaatcctccttagcaatcaatgctaatttaattacgtcgaataaggaaagtttatttcctttgaatttctctttgattccttttgatatttcggccaaagatgttttgcaagcttcttcttcatttggagggtttgaaatctccaacataaacgatccaaggttgatggatgattcactttccttgcttggttcgacacgtagtagttcaggaagtccttcgttcagcaagttcttcaggaagttcgtcagaaagtccatcaaccagtacatcagcaaatgtgatgtctgcatcattctccaaatgcccgctattgacggacaatcccttcgcacatgcaagattggttcgtccccacctttgcagacctgacaaacacttgactctccaatatgacctcgaactcgttccacattcgtcatgataacctgttgagtaaccaaccaaagaaacgttctaaccctttctggagccatcacctgccacagtctagcaaaaaaggaagacatatctgttcggcactcagaattttccatcaacatctcataagccgacgtaaccgtaaaagcaccatcggcagagtaccccaagataacctatcccgcacgccagtcacgttatctaaagcaatagaggctaactccaactgagtattatgagaaacgtagggcaaaattctgtcaagtctccaacccatgccatccacccatagattgtgagctcgcaactccttatctgtatttggtatctctagaactgctctttcagagactgatacgataaccatttatcccgcccaaaaacgaatttctcgcccattaccaatcacccatctactacncggagtagccacttctcttaaccctgccacgatgcttctccaagttgacgagcatggcctttttttctccatccaagttcgatcatgaatctctcccactttatactttttgcgcaagattctagcccacaaactctgccgatcatgaataagcctccagccaattttagatactagagctttgttcataaactttgacttttgaatgccaagacccccctctctctttggcaaacaaactctatcccaagctaccaaatgcatcttctttttctctaacgaactaccccacaagaaagctctcgccagcttatctaatccctccaacgttgactgtggtaaagagagagtactcattgtgtgtatcagaatagaggagagaaccgacttggttagagttaatctccccgcaaagcttaaagaacggcctttccaacccgctagccttaaagccactctctcaagaacctctccaaacgtatctttatttatccatctttcgagaataggcattccaagatacttccccaattctcttgttgatttaatcccactctcattactaatcaacttttccaagtctcatgaaacattctttgagaaaaatatcttatatttctccaagctcactttttgtccagaagctacacaaaatgtttccaagattcttcgtataacccttatttgagagaccgttgcttctgcaaatagaattagatcatcgacaaaacaaatatgtgaaatcttcggccctccctaagacagaccaataggcttccactcttttgcagctacagatcgatcgatcatgtgacaaagtcgctcaagatagagaacaaataagtacggaaacaatggatctccctgtcgaagcccacgtgacggtttaaagctagcagtcttctctccgttccaaaggatactcatagacagaccagtgatgcattgcaaaatccattggacccatctctcctccatacccgcagcccgtatcgtatcctccaggaagtcccaccgaatacgatcatatgccttcttcaaatccagtttcaaaagcatctacccttttctcccttgtttccttctcatcgagtgaacagcttcttgcaccacaataatgttgtctaaactgagcctctccgggatgaagctagattgtgctggaccaattagctttccaataacttgctttaagagtaacactaacatcttagtaagcatcttaaaaagagcattgcgcatcttagtatgtgccaaacttcaagacttgtagagttttgacgagtggagtagaagacttggattttaggatcctccagacagtagagaccttcaagtgttcttcccattatcagcagcttcttggttgccttatcatttatacgaacactatcaacatcaaactcaatagagcacgggtagtcacttgtgagttttgaaacagacaaaagagatttagcaatatcatggcaagcaagaacttcttttaaaggtattttacctgaagaggaagcaatactacctgaaccagtgtgagtaatgggcaagaagttaccatcaactaccattataaaatcagaaccatgatagggttgagactattgcaaaacttggtgattattggtaacatgagctgtagctgctgaatctggaatccacttgtggccatgatggtttgtaacatttgtaatgcgcattgtaccaagagtcattggtaagtcttcgtattgatagttgttgtcaaacctatgccaacatttcagagcatggtgaccagctttaccacagatttgacataccacacttgagttttccgactgagaaacagatgaagataaaatttgttgatgaaaatcatgtcctctagtcgagaatgaactcctgccacggctagagtttgacctttcttttcctatgttgttgcgaaattagccattgtctgagtgagtgacattgaaagcaacatgaggagagatagatgcttcagtcacatagctttgaagacggtcatcatagccttttaacttagaagcaacttcatcaagagaaagacttggagtagagtcaacagagttttcaatatttgttttaattggctcatactctcttccaagaccattcaaagcagaaaagattttcattttctctggaacatggttaccaatagaggctaactgatcaaatatatatttcagatctttgagaaaagtttccatgatgttatgtttcttttccagagtttgcaatcttctttgcagttcaaacaagcgagaggatgatactctattaaagtgattagcaagagtcatccatacctgatgagaagcgaagcagttgaccaccacacttaagatatcttcagcaaacgaaccaagtaaccaagacttaacaacttggtctggttggtgccaagtgtaaaactcctgaatttgttcttcaaaggtgacactgttgtgagtagcagtccgagtttgcgtcagagcaaagatagaaccaatgacaaagccgaccagcccttgaccagataaaaaattctcgaactagctcttccttctagagaatgtagttttgttggtaaagagtaatggtgaaacagttggaaatattgagaactgggtggaattgtataaggtgccatggatcttacttctatgagatctgataccatgttgacatttctaaactaagaatggtttatgctcaaatgagcttattaacatagaaatctaaaattggaaaatacaatagttcaatgagctttattgaaatataaagaagaaaaagaagctttaggttttgtcaccaagaacacttagaagaaaaatccaccattttcaatggaagacaaaaatccaatcagatttcccataaaaacctaactcttcctcaagtcattgaagagctaaaagagctctgggctatggttttaccaatcatagcaataatttttatatgtattagcgttcttggtgaaataagaatgaagcataattgttgttaatcagtgacaaatctaatatacttcattcttttttctccaagaacgctaatatatatataaactcgtcaaacaatctaaactattgtttgttaattgaacttcaagcaagcattatgtataagtttgacatgttcacaaaacatgttaaattcatttggtggttggttgaggaagttttgctcacctatgttctttcaaacaatttcaacaacacatttgatggcacgttgaattaaatctaagatcataatctcggtgatcaatctacactacgcaataagaaccaccatagatgtataaccatatatgtatttaatattaatcttattaattctgaattttgttgctttcaactcattaccccgatagtattagaaagcg

SEQ ID NO: 15563 - DNA, 5944 bp, Arabidopsis thaliana landsberg
  unsure (1)..(5944): unsure at all n locations
attactgtttctttttgtcgtgaaaataactatggctttgtgtattaaacattactgtttcttttgtcttgaacatcactgtggctttgtgtattgaacattattgtttcttttttgtcttgaacatcactgtggctttttgtcttgaacattactgtttcttttgtcttgaacatcactgtggctttatgtattgaacattattgtttcttttttgtcttgaacatcactgtggttttttgtcttgaacatcacctgtttctttttgtcttgaaactcactgtggctttgtgtattgaacattattgtttctttttgtcttgaacatcactgtagctttttgtcttgaacatcactgtgaatatgagtttgcggctgaatataaattgatttagatatgtttcaagagtctttcatataatctgaaatcattcttatggtcttaaaggttttaaaacatgttttcaatttataatggtggacaaggactaggtgcatctctgcaggtaagattttcagtaggaaaatctggagatcttacctctctttttattctccttttaactcttcactgaagagttgatcatataatgatttttttttattaccctttaactcttctctgaagagttgatcctgcttatgagagaggggctacaaagtttgtgcgagatgtggctgcagctctgggagacgtagatatgattatatgtccctgcattgattgtcgctgtttagatcgtcattcagcctctgttcttgttgatcatcttgtaacaaggggaatggatgagtcatataagaagcggtgtgactggtatcatcatggggaatcaaactctagggctgagaatgataccaaagtgagtcagtggaatgatgaggtacttgggttatatcaagctgctgaatttttggatgaagagtttgcttataaggttggctcttgagtgagattgcagagtgtgatgacaagaaagaatatgagttccttgcaaagcttgcagatgctgaaccaccgttgtatccaagttgtgtgaaccatagcaagctgtcggctattgtatctttgtttagacttaagacaaaaaacgggtggtctgacaagagcttcaatgatcttctagagatattgccggagatgttgccaaaggataatgtgttgcacacatcactgtatgaggtgaagaagtttttgaaatcttttgatatgggttaccagaagatccatgattgctgcctatttagaaagaattacaagaagcttgacagttgtcctaaatgcaacgctttaagatggaagactaacttgcacactggtgaaataaagaaaggtgtcccacagaaagtattaaggtactttccgataatcccgcgccttaagagaatgtttaggtctgaagaaatggctaaggatttaaggtggcactttagcaacaaaagcagcgatggaaaactctgtcaccctgtagattcagtaacatgggatcagatgaatgccaaatacccgtcatttgcagctgaggaaaggaacctaaggcttgggctttctacagatggatttaatccatttaacatgaagaacactagatatagttgctggcttgttctgttagttaactacaatctgcctcctgatttatgcatgaagaaggagaacatcatgttgactttgctaattcctggtccacaacagtgacgtctacttagaacctcttatagaggatctatgccacgtgtgagacaatggggaattgacatatgacgcttatagtagatcaacatttaatctgaaggcaatgttgctttggacgattagtgatttccctgcttatgggaatctagctggctgcaaagtaaagggaaaaatgggatgtcctctatgtgggaaaaatactgatagcatgtggttgaagttcagcagaaaacatgtctacatgtgccacagaaagggtctgccaccaacacatcatttcagaatgaagaagtcttggtttgatgggaaagctgaaaatggcaggaagaggagaatattgagtggtcaggaaatttaccaaaacctgaaaaattttaagaataactttgggagtttgaaacaatatgcaagtaaaaggaaaaggacggtgaatattgaagcagactttgatagtgaagatcaatctagtgaatcagaggaggatgaggaggaccaagtagacgaggaggaattatctagatggaagaaaaagtcaatttttttcaagttaccttattggcaagtgtgttaaacattcctgttatttaaatttgaaattttatcactaatcattgattaaaacttccttagtattatctcagatttcatcactaatcattggttaaaaaattttgttttctttcgtgtgttgtataggaacttcctgtgagacacaacttggatgtcatgcatgtggagaggaatgtggctgcaagtattatatcgacattgttgcattgtgggaaatccaaggatggactaaatactagaaaagatttggaggtgcttgggattagaaaggatttgcatcctaaaaccaaaggcaaaagaacatatcttcctgcagcactttggtctctatcaaagacagagaagaagatcttttgtaagcggctgtatgacttcaaaggtcctgatgggtactgctcagacatatcaagaggcgtctcattagatgagtgtaaggtcacggggcttaagtcacacgattatcacgtgttaatgcaacagcttctgcatattgctcttagaaggttgctacctaaaggtccaagggttgcaatcgtgcgcttatgtactttcttcaaccacttgtgtcagcgagtaattgatatggagcagcttttgaaactagaaactgagatcgttgaaaccctttgcctgtttgaaaggtttttcccaccaagcttctttgatataatggtgcatttgacaatacatttaggcagagaagctcggttaggtggaccaattcatttcagatggatgtatccgtttgaaagatatatgaaagttctgaaggattttatgagaaacactgcaagactggaagggtgtatagctgagtgttatctagctgaagaatgcatacagttttgtagtgaatttttgaagaagacataaaattttcaggaaagtgttgatagaaacactaagtatgagagcaactctatacttgaagggcgtccaatctcagcaggatcttatattaatcttactaaaatggagacaaaaatagcccatatggctgtcatccagaatatggcagtctttgaatcttatgttgagtaagttccaatctcaataggctcttatattacttagctatatatattttacttatccatatggctgtctctgactacttctaatttttccttgtattagtgagcatctgcaacatctacaagactcaaatgtaagatgcagacgtgatgcatcacacttatggaacttgcacactcagaattttgcttcatggcttaaaaaactggcatgtttatctctcacacttgacacttaaacactatactttatcgataagcatataggtgtctgatattttctttttaaattttttagatacctcttgattcaaacagacatgaagaaacacttaaatggttagcttatatatggtcaacggagttgtgcaaggacatattctggttatatagtgaatgggcagcgatttcatacaataacagtggataagaaaactcagaacagtggtgtgtactatgaggcaactgctatctgtaggtctagtgcaaaagacattctcaagtggtcgatttggtttcatattatggctgcattactgatattatcttgctggattataatgtcttttacgttccattgttccgatgcaactgggcagtaaaaggcaatgaagtaaagcaagaggatggttttacacttgtaaacctgaatcatagtcaagactcatttttgagggctccatacatactagcctctcaagcaaaacaggttttttacctaagagaagatggctcgtcaccttggtatgttgcattgagaggttcttcaagaagattcagtcagaaagagtttgtagattcagttgcagcgattggcacattgccaccaaatgttgacatagacgctgacttggatgaagctgagaatgagaggactgattgtgaaggaatttatgtttgtgaaatgtagtttttttttgcttcattttcattccttgttgcattctgaatgtttgatgtctgtttcccatagtgtgttcaatgtcttatttgcattcagtgtacttaaccctttactctttcatttttctcaggtgatttaagatgggacaacagaagcaaaagcgaggtaaaagtaacaaaaaaaaggtcaatgcaaagaatgccaatgatgaggttgagtatattggaacaattgaaccacaagtcaatgatgaggaacatgcacaaccagctgaagttcaagtatcagatgcagatcaagtagcagatccagatcaggtggttgatggagatcaggtagcagatccagatcaggtgaatgatgaagatcatttggaaccagatcaagtagcagatccagatcaggtggttgatggagatctggataaggtcaatgaggaagagcctcacggagagcttgttttatctgttgttgatgattgtgttgagccaaagcgtaagcgacatcgaggaccaactagcctgaaggatattgccaaggatccaaatgtcagagtaagagtagagttcactaacatgggagagcctattggtaaaggctcagttaagctggcatcatatgtaggggcattggtaagagaacacgttccagtcacaattgaacgttggactaagattggtaaagaactcaggacagttctctggaagtctgttcaggtaagatttgtgtaaaatttacaagtttattagatattggtgagtacttgactgttttgtttttgatggcaggcaaggtttgaactagannnnnnnnnnnnnnnnnnnnnagtgcttaggcagatgggatatttgtggaggtcctggaaatcatggcaagttacaaagattagagaagctaagactanccacgagaggatgaacatgcgacctaaaaacatttctccttttgattggcgtaaatttgtgaagctcaaaactagccaagaatttaaggtatgcatttggaatttgtaaatttatctatatacattagaaattaacgttcatctgttaggttataagcgatagctacaaggaaagaaggcgcaatcagattccacatacttgtagtcgcaggggaatggttagacttgccgaagacatggtaacagttgtacacacttatattgttcatattgctcaccctttttccaaagtccaaacacttatgtattaaatgagatcattttttttgtttagaaaactgctagtgcagacccatctgaagtgacaaggctaaaggtttgggttaagtcacgtactaagaaggatggtacaccactgaatacgaatgttgctgaaaagattgtgagttattttgttttgtttgatttgcattttgtcattttgaatcacacttaatattttaaaatgtatcttatgaatttcagaaaaaggcagaagagattgttaacagtgataatccatcaacaaatgaagcacaagattcattaagccaactgttagggcctgacagtcctggtagactgagagcaatgggtcgcaatatgaataagaccaagttatcttgtttctaagtgaagcacaagtgtatggctgaaatgcaagagaatcagcttcatctacaaaagacggtcaatgagctacaagacgtaattgaaaaaatgaagaaccaggttagtgaacttatctatttatatatacagacttaaggctcaattagtacatacgatttgacttt

SEQ ID NO: 15564 - DNA, 415 bp, Arabidopsis thaliana landsberg
  unsure (1)..(415): unsure at all n locations
agactattcggtccaagattaggtcaaaaagcccgtgagcccaaaaacctaagaaaaccttgttcaaattgcaaaccctcgattgcatttctccaattcgatagacgctgggtaaaaaaaattcggaggacgacgaaagagaaaacgagtgtttcagtcactgccccacggagctctcggaaatttgtcttccccttgtcgtcgnctccctatctcctgcttcttcttcgttttcgncttctttatcaaggtgcgctttagcttctcaacgccgtttgatttttagaatttcgattttttttttttccttctagntcttgaatcaaaccggaatttggcgactatgttgcttcgtttgtaaatcgtattctcctgtttagaaatcttcaattgactgtgtgataggaacaattta

SEQ ID NO: 15565 - DNA, 1423 bp, Arabidopsis thaliana landsberg
  unsure (1)..(1423): unsure at all n locations
tggtttgttaccatcttttgcgcactttggtaggttcagtatgggtgggtataaacggttattttcaaaataatataaaagaacaagtcactttacccagtcgaattatgccacatgacctatgtttttatattaataaataaaaaacaatttcctctgattattgttttcattttacatattttgatatataaaattttatccaaaacaaaaagcattagaaaaaaaaacagaaaaaatattctcaaaaatagaaatccctaaattttctcacataccatgatcgcactatctttggaagcttggaaccatatcaaaaaaaatctcaaattcacgttggagtcaaattcatatctcactctcacagacgcacacactccggttttccatctttttttgtatatctcagattcatcataagcataaatctaaaattatatatgacacaaaattgtcaacaatccaggtttccaattatatacgcactcctctttatctcagattcatttctctttgtttcagattcattgtccttgtttccgaaattatcaagtttcatcaccagctgatctacccatatgaactcaagcacgatgtgagaccaaacaacagtttcctattataacaaggaaaaagtggattttcaaatatttcacaagtcccttgcgagcaaaaaaaacgagtgtctatgagggcttacatgcaaacccaaaatgctcactactattcaaaattagctttgcaatatcagtttcttagctgacgcatgtaaagagtaaaggttttatgtggacaccaagtttttcgtcattggtcttcagtggctctttctaggtctgctcacgttagagctctgatcggtaaggaacttgaggacatcgattagggatcttagccggtcccaaatgttgagtccataaagagtttcgactagggcctcctggaattcaaatgcgttttctgctaccggatactgtgatatgaccatgacagagagatattaattaggacatttagataatcagattggattttcaatctctgttattgtttagaaaacttgcctgaataggttttggaatcttggnnnnnnnnnnnnnnnnnnnnnnnnnnnnnnnnnnnnnnnnnnnnnnnnnnnnnnnnnntaacccttctattccagcaaaccgtccaaacccactatcctttacacctccaaacgggagcgactgcaaaatcaaaggagaaaataaagtccaactcttaaccacggagatcatgacgaaccttctgttttttttttctcttttccaaaggtaacatccaagagtaaagccagtgaggtgtacctggcacatgtaatttgatgcacagtcattgattcccgcaacaccgcactgaaaatgagaagctataaatttggcgcgatgcttgcttccacaga

SEQ ID NO: 15566 - DNA, 852 bp, Arabidopsis thaliana landsberg
ccatcactgccgacacaacagcagcaatattccgtccataaggaaacactctccagtcacgaaccatgcgagatgtaaaaaagtcttcgccggccgcgcgggggataggaacattcttaggccaccaacccccggtaaccttcagcatccgcgccgaagactcccggagctcgggcgaagacatccttcctccgggggccgcacatgtcctcatcaattccctagcaaaaccatcggaaacccccagtcctcccgtagcagtacctagctttctcttcttagaggatggggcggccgtcgttgcggggtcgtctccagcctctgccgtcggcttcttcccgcgacgatccacatcgtcttgcccgggataaccgccatacggcagacggttcaactcgaagaccctattcaagcgatcgttggacccgcgtatatccgagctacgctggccctccgtcttcggcacgtagcgccccacgagtcgcaccgccaagtcttctgcatcacgcacgaaggcggccgggtcacggttccgcaaactcagtgcgaacgcaggactccgcacctcccttcctccgtgaaagggcatctggcgagggcatacttcgcccagcgcccagccgtgcgccaagggccagaccccgtacgccgcaaactcttcaaccaaatcacgcccgctgctctgaccggcggcgtaccgaagggccccttcgtctgtatcctcttctgccacttcgaaaggcggatacgcagagtaatagtgaagaacacatttcggacacggggagcccttgatggccttcgacagtagcctcagcaacataaaaccaaaacccattccaactgccccac

SEQ ID NO: 15567 - DNA, 1208 bp, Arabidopsis thaliana landsberg
gaattctattgtcaataataagttgaaaattgttaatacaaccattatttccccattgtgcactaataggatgtattaacaattttacgacgttaaacttttccatcaatattcagatttctaattgaaaattcttttttttggggcaaaaaattgaaaattatatattattatatctatgtgaaaatttatctctaactcatgatggcaacactcgattttgcctgctaacattttagaattgtgataagcttttgcatctattaatttgtgagtaagtgcacttttaaagatcgaacctcggacttattatttaaacccttgatcactaaagcaaattccatggaagaaaacaagaaatagtatttaggaaaaaaaggaaaaataattagaatgacaagaaatagtatttagttaaatagctcacatgtttgcacttagttgatatttttttctttctatgatttgataaattgttaaaacagttaatatctgatgattggaatttgattcccaagtaaaatttgagttgcctttgttgttagtcattgatgctaatcggaacgtaatccccaagtgtatcagtatttctttttcttgcatttccttattatgatactgaacgattgttgaccacgacgtcgtccaccatttgtattttaaattgatgctgtcacttcttaaaattgactattaaacagaattttctttgccccgttcttaggttattgccggatatatatatacattcatgtaaatttcggatttgatctgatttatataaatattaaaatttaataaccaaacttttctttgacgtttgttacattgtcataaaaaaatattgatctaatcttgttacaaataatgatcaagccattaaacttagttacttgcattagaacacatacaattatacgattatgataaacggctctgtaaatagttttactctcatactcagatttctgtctaacgattatatttgtaccatatgtgataaacaaatccacctataaacgaaagcacgacaggcatgcaaatatacctgcaaggctgcaacattcagtaatttctgacaatccttgtatccattactctgttagaaacaaattcaataaaaatctaaccgttaatattatgtattcaaacctgtgacccttgggccaatctttcgaaaaaaaatagtatccgaaaaggaatatatc

SEQ ID NO: 15568 - DNA, 1287 bp, Arabidopsis thaliana landsberg
tgaggggcaatcaagtttacggtttggttcaggtttctaattttattggttttatatacgggacactaaaatcgaaagaaaatacggtttacttttgcatttggtttgatttttgttttcgtttctgaatcatttctattttagttaaacgtttttaagtgagtacaataaagaataattttgttatattatacatttttttgtttgttttattaacttacataaaatgattaaattattttaaatataaagatgtaactaaaatattttttaaaaatagtacgttttatttgtttagttcgattgtgtttagtaaattcaaaatgaaatcaaacagtttataagtctttagactaaggccagaccgcaagggcaaatcttaggcattggttccaaggacggtaacctactgagaatgaaggaagagaagcgtgtgcaacccttcaacaacacctcaaatccttaaatttgagggctttttgaactctaacaagccctcaaccctttatttttttagggtgtgaatagtacaacctcaaatacccttaaaatctttcttatatttcattttagtctttataatttatatattttacaaatagttatatttagttcaattatttcaaatataaccatataattcaaatacattgaaatttaaaattgaaattattaagaaaaattctttctaatgcccttttcatgatgcccctttttaactctacccttttgttttatcaatttctatttctaccctctttaaatttttaaagaccattttacccttatttggaaattgttttaggttaacaaaatgaaatattaatatttttcgcctaaaatattccaaaataaatttcccgccaaaattttcccgccaaaaagtttcccgccaaaattttttgaaaaaacaatttcccgccaaaattttgttttcaaaaaggtttacaagagattttaaaagggtgatttacaagggatttacaaaggattttaaaagatttacaagagattttaaaagggttttaaaagatttacaagaaattttaaagggatttaaaagatttacaaaggtcttttaaagatttttaaagggtttaaaattgttttaaaaggattttaaaatatttacaaggggttttaaagggttttacaatatttacaaaaaaatttaaagggctttaaaagatttacaaagggtttttaaagattgtttaagggtttaaaagtattttgaaatatttacatgggattttaaacctttaaaattacttgtaaatttttaaa

SEQ ID NO: 15569 - DNA, 4932 bp, Arabidopsis thaliana landsberg
  unsure (1)..(4932): unsure at all n locations
gtggcgagtgttatgtgttcttacaatcaagttaacggcaaaccgacatgcgctgatccagatctgctctctggtgttatccgcggtgaatggaaattaaatgggtaatgatctgatctgatccgatcagcaagtttaaatccttttcgtgtgttttggttttgattttggttctatttttataggtacattgtttcagattgtgattcagtagatgtcttgtataagaaccaacactatacaaagactccagctgaagctgcagccatatctatattggcaggtttggatttaaactgtggttcattcttgggtcaacatacagaggaagcagttaagtcgggtttggtaaacgaggcagctatcgataaagcgatttcgaacaactttttgacccttatgcgtttaggattctttgatggaaacccaaagaaccaaatctatggcgggttaggtcctaccgacgtttgcacgtctgcgaatcaagagctagcagcagatgcagcaagacaaggcattgttctactcaagaacactggatgcttaccgctttctcctaaatcgatcaaaacactagccgtgattggaccaaacgcgaatgtcaccaaaacaatgattggaaactacgaaggcacgccgtgtaaatacacaacaccactacaaggactagccgggacggtatctacaacatatctaccaggctgctccaatgtagcttgtgctgtagcggatgtagccggcgccacgaaactagcagccactgcagatgtgtctgtgcttgtgatcggtgccgatcaatcaatcgaggcagagagccgagacagagtcgacctgcatcttcctggacagcaacaagagctggtgatccaagtggctaaagcagcaaaaggaccggtcttgctcgtcattatgtccggtggaggtttcgatattacattcgctaagaatgacccaaagatcgccggaattttgtgcgttggttatcccggagaagccggtggtatcgccattgctgatatcatctttggccgttataatccaagtaagagactctgtttcaaaccgatttttgtaattgcaaatttgaataaaccggttttggttatgtaggtgggaaattaccgatgacgtggtatccacagtcgtatgtagagaaagttccgatgacaataatgaacatgagacccgataaagcaagcgggtatccgggtcggacttaccgattctacaccggagaaacagtatacgcattcggagatggactcagctacaccaaattcagtcacactttagtcaaagctccaagtctcgtttctctcggtctcgaagagaatcacgttnnnnnnnnnnnnnnnnntcaatcgctagacgcgatcggaccgcactgcgaaaacgctgtctccggcggtggatcggcgtttgaagttcatatcaaggtacgaaacggaggagatagagaagggattcacacggtgtttctattcacgacgccgccggcgattcacggatcgccgaggaagcatttggtaggattcgagaagattcgattggggaagagggaagaagcggtggttaggtttaaggtagagatatgtaaagatctgagtgtggttgatgagattgggaagaggaagattggtttgggaaagcatcttcttcatgtcggagatttaaaacattccttaagcattagaatctgattctatatttttatttgaggaagaaaaaaagaatatttaatatgcttaagcttttgcaagttggaaaagaaaagtaataaaaaaagaaattgtgaatctctttaaaattatagcattagtagccgaaaatgtggggcatatataaacataattcgaatatctaaaatatatcatgtgtaattcatgtgtaacataaatctagctaatatcagttagagttagatttatgtttggtatttcaatttaagtaaatttagtcttttttttttttaattagttgctcaaactaattattctgataataagcagataaactcgtagtatatcccgatcaaaaataaattaatttttattttcttaatctaaactaaaccgggttttgggtcgaatttaggtaattcgactcaaaatgagcaacatttaccagaaatcagggttattattaccggtttattccggttttaaaggttgaatataaataagattcacctctaacagaatatatcacgttttcctttttttttctgaaactgtaaaactctctcacaaagcaaaaaaaccaaacctaaacaaaaatctagaaagaaagatttccgaaaatctttttaatgaaaaaagagcagacaggacgagaattcgcttttctgaatcctttagagtattgttatctccgtcgaattcgcatgaacacttgagctcaacaaggtcagattctcttgttcgctttttttttttgatgaagaattcgactgttgtgttgatgctggtgctctgaattttacagacggcgtggaagtggacggtgaggtaattttttttagtttttgaaagacatggcgcaaaacgggtacttggttccagcggatccttcggcggttgtgacggtgaagaagaaaacgccacaagcgtcgtgggctcttattgacgcgacgggacagagtgagccactcgatgttgataagtatgagatcatgcaccgtgtccagatccacgctcgcgatctccggattctagaccccaatttatcttacccttccactattcttggccgagagagagccattgttctcaatttggaggtttggttctgttttttggttcttcaggcattcattgtttctgggttttgtttttgtttcagagtgtgattagttttgttccttcttctttatgcagcatatcaaggctattatcacttccgaagaggttagtagtttactctttgattcctttgcttaccacacttagatttgtagggtttttgcagtaaaaagtttcgatttttattttgttaggtagattacttgagcaatcactgaactaggcaaaaatttggctaatttttcagttctgttcttactatgctatagtgtgttgaaagttcataatatcagccaggctttgatctatttagcactatggaatgcttagaggagtatagcttttgagttctcttcttgtagtaatgacttgggcttattacaggttttgcttcgggatccgtctgatgaaaatgttattccagttgtggaggagcttcgaagacgcttacctgttggaaatgcatcacacaatggtggtcaaggagacgggaaagagatcgcaggtgctcaaaacgacggtgatactggtgacgaagatggtattgtccctagagactcttggctcttttcctaaaccatctaaactctgtgaaattcatctcctttttgatgacccttaacttgccttttcatatatgttgaaatgtctgcttgttgcaatatagaatccccatttgaatttcgggcgctggaagtagctttggaagcaatctgtagcttcttagctgcaaggacagcagaattagaaacagctgcttatcctgctttggatgagcttacctcaaaggtaggtacctcaatgatttattatcaccagtgatccagttttcaactacatttttacattcgtcttgtagattagtagccgtaatttggatagagttcggaaattgaagagtgccatgactcggttgacagctcgggttcaaaaggtgagcaggtatctttttcttatgacttatgagtatttgtaaagtttgtaatatgaatagagaactaagtagcttcatcgccttttgcaggtaagagatgaactcgaacagttgctggatgatgacgatgatatggcagatctttacctttcaaggaaactttcaagtgcttcctcaccgattagtagtattggtgaaccaaattggtatactacttccccaacaataggctctaagatttcaagagcaagtagagcgagtttagccacagttcatggggatgagaatgatgttgaagaacttgaaatgtaactcgaggtttgttgatcctgcacaaaatcttttatctgattctgatctatcttccattcaaatgccaagtccaaatacacacgtcttgatatctttacaggcatacttcatgcagatcgacagcactttgaacagattagcaacagttatcctcttgctcccttttctttctgttcttttttgcagactttttttactataaaaacttaatttttgactctgatgcagctacgtgagtatattgatgacacagaggactacattaacatccaggtatccaaaaacgaaacctcaaaatttttaacatgttcttgaaatctgaatataagtcattatattaaaagctaaaactcgtcggttttctattcacagcttgacaatcatcggaatcagcttattcaggtacgtgaatgtcgaaagccaaagtttttttaatatgtcatcttcttttgttgatcatcttcaaaatcctgcagttggagctagtgttaagttctggaacagtttgcttatcgatgtactctcttgtcgctggaattttcgggatgaacattccatacacatggaacgacggtcatggatacatgttcaaatacgtaagaaaccagaattctattcgcatgaggatgaaataaagatctctctcaagattaacttatgtttatcgggttttttggttgttgcaggtggtgggcttgacggggacactttgtgtagtcgtgtttgtgatcataatgtcgtacgctaggtacaaaggacttgtgggatcttgatggctgaatttgggttagatggagagattgtgaaggggcattgggcagatcttgttttcgattattatacttgggggccgtctgagtttagaacgagctttacaattatttt

SEQ ID NO: 15570 - DNA, 1988 bp, Arabidopsis thaliana landsberg
aagttcaactacatgactatgttagaacttagaagtttgagatgaagaaagaatctcaatatataaaatatatctttggatgatttaaattgaattcaattgttagtcatctaatgactatttgtaatctggtagtttcacccgataagtgtatatatgaagctagagaatggaacatgccatttcccatctcttaattagaatcttggcctctgaaaaacattaattaccactttaatccatcttcaagtctttctagtttcttgataactaactcctgacttattaattctagagttaggcattccttaattaggtttacaagatcatcaatgtacattcgaacgtaagaaattttgaacataatacatctaaaatatcataaataatattcttattgttctttatatcttttcttatctcaatataatagtcatggttatcgaagaaagtactagataccaaggatagcatcaacacctgaagtctagagattttatgatattgatgagtcaaaatcacagttgaatatatggcttgtaattaatgagagggagatgtcatagatgcttcgtctaagattagatttttgcttcaagacaagggaatagagtggagaagagatcttaggaccatctgaattcattaggacactagtgtcacactacccatacatttgcaataattggacaaattgtgagtgagctttcactttctctcttctcagcgttactcattttcagtcccacacaaacacattcataccttggtttcaccctctctgtgttttttttcacatggaatgtcttgttgtgacacaacagctaccacaaccagattacaatccaaaagggtaaaagcaaaggtgagaataaaatatgtaatgtaacaactcataagcaagattccagcataatggagacactagtttcattttaagacaacgaaaattctaaaaaattagtttttgcttgagtatgaaactaaatgaagttcttaagaatataaggggcaaaagtgttttttggtctaacacaattgacatacttgaaccgggggcagattgatcatatacataactgcatgtatatatatgctgatatgcataagccataatgttctcgaaattcgatttcctgaaattaaccacttatcatgcaaaattcaaccgcaatgtacatatccaaaattcctacacgaataattgtggcagcagtgaaaaaagaaatgcaacaaccttaagagttaaaccactaattgttgccttaaccggaaccagacaacaacgggctaattaagtaattaactccactaccgagacgtcggtgacaagaaaattagaaagacaaatttgcccctcaatgaccaaacccaatcgccggaaagtctaattacttaaaagatccggtggacttcctgaatccggcgacgattcattaatcgccggaactttctcagtcacgtctgattccgccgcttgctgcttcgaaagaggaatttttgggatctcagtgagaatctgaacgacttcacgcatcgtcggcctctccaccgcttgttcttcaacacagagcaacgcaacgtagaagacgtgtgttacctcgtgaactggaactgaagagagtctaagatcgattactttgagcacacaatctttatttgaatccgtcatgcttctcacccattgaacaatatcaacgccgtcgccaaattctccgacgggttttttcccggtgatgagttctagaagaacaacaccgaaactatacacatcgctcttctcatctaccttcaatgtatacgcgtactctgctcaacaaggaacaaacaagttcagagattttacatttcaccaccaagtgtttgattaaatgccattttctgcaaatttgttacctggagctatgtagccgtaggagccggcaattgcggacatacattcagaagtaccggaatcttggaggaacttggcgagaccaaagtcggcg

SEQ ID NO: 15571 - DNA, 2709 bp, Arabidopsis thaliana landsberg
taaaggagggtttttttttttattaaagggggggctttttttttgaaaaaaaaaaaaaggggtttgtttttttttttttttcccccaaaaaaagaggggtgcttttaaaaaaacccccccccattttgtgtgggaaaatttttaaggggaaaaaaaattttatatctcttcggaaaaaaaaatgtttttatataaaaaaaaaaaagaaagccccccttaaaaaaattgcgaggaaggtttttttggggggggggaaaactccccttttaaaaatgggggccaaaaaattggaccaacttggcataaatttggcaaaacgcatatatttgtaaaagttttataactaaaacattagatcttattattaaacatattatattatctgtccaactataagttaaggacatttattaagtccaactctaaatactaaaacttctacaaagtacaaataagttgatacacggacaactgaataacttattggacaactatggctactgcgtagtcttttgtctaatgcccacattccacgtttattggtaataactcttgtgttcacactatatgtttacactatgtgttcacactatgtattttcttatcattaaattatatttctttctctctctttcttatttctttcttgcttctccttcttttctctttttcttctctccttctctgctgaagaacaatgccgacgaacattgccgacgaacctccgctgacgctgaccaccgaatcttcctcatcaaccgccggatccaagttctctgacatccattaagctccagaggtaagtttcgggttggattgaaatgaaattaaagttttgattttttccccttttgcatcgaattatggtttgaaatggaattaaggttgccgtttatgatagtttgataatctctagggtttggattttggattttcttaaaggcgagaactacatgatattttaagatttacatgcacaatgacttttgagtgtatgctgtttcactacacctgtaatacagatacgtcagcatcttcatcgccaggacacgcatcaactcccctaatcaagtttattgatcatcaagtgagtttacatgtagctaaatgctttcagtaatatcccaatgaagcaggatatgctttcagtacaaaatacataagcatactatatcataaaaatcctcacttccaaagtattcgattcttgaaaggcttttcaatgagatctatcccctccaaaacgtttgtaatatcatatatacgtcgtttctgcacctccaatgtttctgcagctttgtttaggtccagcattccatctttggcttgtttaattagattgacgaacttttttgtaaggagacctgaacagcttttatgtcagcatcttcatatacactataacatgtatcgaatattaaatatatatgtgaaaagttgttaattacctaaagaactgtcataacgacaacttcctgatggagtaagtgtgataggagaacctgcaagttgaccaggaaagtaatcagctcttggacttacttgttactctagacatgaaagatatttcataaaaggatctaactatatagaaaggccaaaaggggtagagagtcaagaatacaattcttcttaccagcgtttgtcgagatgggtgtttgaggagttgacttgttgcctttggcctttgacttgatgttgactctgcccccttttctaggagtttgacagggactgctaggtatgctagtgaaaccagaactcgtgaatccattattagatggagcaacaaccatatccattgtcgcctttctctttcgtgactgcatataaacaagttgttattagcttaaaagaagttggtcaaagaaatatcatccaaaaggttttaaagcatccacacacaaattatctatatcattcctcataaactttcacaacattgggatctacttgaaacattatacattaacaaacaatgtcaagcttcatacaccaatactttgatatcaataagctaatgctcaacactatgtgaacattcaacacctcacgcaacaatcagagccaatttggcatggcaattggagaaattgatgtctgatttgcgtcaattgggtgtaattgaaacgcagtgttatgagcaaaatgtaccatcgcgaagctaaacaaacgacaaaaattgacacgaatcgacgataatctaacgctgcgaagcttttgaatcagacttagaagcaacaagtagcaatcgaaatccccaaaacatcctcgaatttctaaaccaatctcactggggaaaatctctaaatcgaagaatcaaaagcacccaaaactcacaggagatctaacaacgacagcatcttcctcccgatctacaacaccacaaccatgaacgaagctcctgtcgttattattactgagcgaagaagggttaaatcgatggtaatcatcggaaggatgaaacggaggttttgttgaggcgaaagctaagtgacgacgtataggtggtataaccggcgtagatgtaaccggaaccggagatgacggtggatggtgcggcggcggcggtggcggctgagaagaaccgggagaagatcgtacgacaccggacatggatcgtagtgaagcgagagtcgaatttgaagattccgatgacgggaaaagcgaccgcgagtgaaagaaacgagggttttagtgagagaaaga

SEQ ID NO: 15572 - DNA, 627 bp, Arabidopsis thaliana landsberg
agttgtcattgcttgaagatgaaatgcgaagggttgaaagagtgaatgtaagacgagcatttcccttgaagctatcgtgttgttcattgattagaaccagaagacatggctgaggtttcttgattgtatatttgttgctgaactgctgcatttaagctcttggaattgtcattgattgatcaggttgctctgatgctttctggaatggggtcaggagcagttgatgttttcagaatggtaagaaggaaataaaacccgctcggttcggtagctgatcaaagctgaaatgttcttagtcattttttattcccacatacaaattggcaacaatgtagcctattgttctttaattttcatctaactgataagtctttgaatcctgtttcaggcgagatctcgatgggaaaagaggcaagcaaaagttttggtatgaactttcatcacctttgaaatccttggaaaactatttgcaacataatatctaaacatcacctcgtgcttacctatgtttcagaatcaagctagaagtagaatgatgaagaggaaaaacacagatgaaacaccttcctattgggataacctctggggcaaacagaatgaataccagaaaagcggtaaaattgatga

SEQ ID NO: 15573 - DNA, 323 bp, Arabidopsis thaliana landsberg
tgggcttataatatttattattgggccttaatttaagagcccttttataggcagatacaaaaacgacggcgtttaactcatccgctcagcgacttccacatagccgttaaaacgatgataataaacccaatccggttcatctccaacagaagaacgtaataactgatgcttgtcttcaagtcaaccatggagtgttcgatttcatccaccattcatgtccttggaagctgcaaaacttcagatgacgtgaaccaaatccacgggcgattgattaagacgggaatcatcaaaaactcaaatctcactacgaggattgttctggc

SEQ ID NO: 15574 - DNA, 444 bp, Arabidopsis thaliana landsberg
atttgacaacataccatattaaaagaaaattttgatatttttttttcagggtggtaaaagtgttgtaggtatatattccaattcagctgagctattaggcgaattaaatataagtgaaagagctttcgaaggaatgtctaatcttaaattcttaagaatcaagtgtgaccggagtgataaaatgtacttaccgggaggtttaaagtatatatctcgaaaacttagattactagaatgggatcgttttccactgacatgtttgccttccaatttttgtacggagtaccttgtcgaactaaacatgcgacacaacaaacttgtgaagctgtgggaaggaaatctggtatgtaattgtgatgtgtttctctctaatatggcttcaaaactgtagttccatttcgattgtcatttgtatgtagtaggttttgatgttcttacacattt

SEQ ID NO: 15575 - DNA, 783 bp, Arabidopsis thaliana landsberg
gcaatagtacttatgatttgctaacctctccaacgtctgatcaataaatggtaaggggaaatggtctttcctggtagcagcattcaactttctgtaatcgatgcacatccgatgtcctgtgattgtccgagtaggaatcagctcgtctttctcattcttgactactgtgacacctcccttcttaggaaccacatgaactggactaacccaactgctgtctgaaatcggatagataatccctgcttccaacagtttcataatctctttcttaaccacttctttcatattcggattcagccttctctgatgttcaactgaagacttagactcatcctcaaggtggatcgtatgcatgcatacatctggagatatacctgcaatgtcatcaagagaatagccaagagctttgcgatgatttcgcagcttgcttagcaataaggtgagctctgcgggattaagagaagcattcacaataacatgataagtagtttagccctacaggaagtggtttcaattcgattttaggagcctttgttggatcccaatctcaattattagtcggcgttggagtcacagatggaagagcttcttcaactgtaagttgcattacatgttcggtctcatctagcagcttagtattgtaagaagtttcactgtccaaatctgcactatcctctatgggaagagaccaaaactcgctctagtggggtcttctaatttcttctctgaaatactatctgaagctgatgaagtgaaagaatctatcgagaatggtttcccatc

SEQ ID NO: 15576 - DNA, 596 bp, Arabidopsis thaliana landsberg
gaccttattgtgataaaactcgagcttgaactaagcttacatttttcataacaactaaaaagcactttaaaaacgtcacttggcttcagcgcacgaagcagaagcgtctgcaacagtgatgaagcaggccagaagagattagctttgaccagagcatggatcaaaatacaaaacgacgccgtggaatggtcgaatcctcgatgcaaaccgaggaaattgaaaaacctcaaacccaatttgggatcatcaatggttccaatcagaatctcttcaacatgaacagtcttcaatcttctcgagactagctcactgctcaatgcgatctcccagctccgtttccctcgcacgattcttttgacagcatcgacgaattgcttatcttcagcgattctacattcttcttgtgcagaatcgatcacagagctcacatttctaaagctattgcgaaaatgagagcttgttattgatcgaatcgtgcaagggagcttcatcaaagaggtccaccgtgaaaatcagaaccagcattggtctgtgttagtgtcgcaacaacgaaccgatatctggggacccggacgggtcgggtcgatcttactggt

SEQ ID NO: 15577 - DNA, 712 bp, Arabidopsis thaliana landsberg
  unsure (1)..(712): unsure at all n locations
cagggctaatgccaggtacagtctgcacatcgaattctgaaaccagctttttttggatatgaatttggctcttgctttccaggaccagttaaacaatcctaggatagcctcgatacttaagaagaaagcaaaagaaggtgatcttgaactgactaatttgctgcaagacaaggggttggaccctaactttgctgtaatgttgaaggaaaaaaacttggatcctactatattggcactacttcagaggagtagtttggatgcagatagagatcaccgcgacaatactgatattacaatcattgactcaaacagtgttgacaatactttgccaaatcagatttctttatccgaagaattgagactccgtggactagagaagtggcttaagttgtctagacttcttctgcaccatgtagcggggacaccagagagagcatggggcctctttagtcttgtctttatccttgaaannnnnnnnnnnnnnnnnnnnnnnnnnnagaccatcacgattataaattctagtcatcaacaggtgagttccaccctctgatttattgtctctgtggaaaaaattntgggtcttgctttggcttcaaattactgccagtttactcaaattgatccttgtagtttaaatgaaggttattcgtacctttgctaactcacttgttatctaattgtagttacgatttggtttctctgtgctgctatt

SEQ ID NO: 15578 - DNA, 990 bp, Arabidopsis thaliana landsberg
gatggtggatgatacaatacaaatacattgcaagtttacatattattccttcacttatattatactttggaaaatctccagtagaagctaaagctctctggcattattcttcttttaagccaagtttatatgattctttttttacttcctgcacacgataccgtaaccagaagacgctccacgggtacaatccaaagttgcatattcaatctctgacttaacagaatcaatctctgcttgtgactcagagaaaatgcaagttttacagtcattggagagtagagaagaagtcttgaagctgtcttcaccaccaacaactggcattgcgactccaggcttagccggattttggaaatcgggcctgtaggttcgtcccaagattccatcaaccttaggtgaaaggttaaagaatctgaattgaacctcaagatgtgcaaaacaatcatctgatggtactttgtagctatggattctgtcgtcttcttttgtcactggaaccacattgatcatgatctcggctttgtctttgattgtcacgatcacgctgtttctcatactcactctctcgatcttgatgtccttgtttggtgagtacctgtttataaaacaaacatatatacgtttcaagaaaacagaggaaaatatcaaccatgacatgtagtctaatggattgttttagtgtcatccggattcaagctcacatgttgttgacatagagattaaatacttaccaggtggagagagtttgttctggaacagataaatcttggccatcgtaactgaatttgagatggtcgatttcgttgtcccatgaggcggttttcgcggcttcgagggagaatttgttggagttgaaaaggaatcctagagcttggatccatgtgaagtctctggcacgaccagcgggtctgtgaccaatgaacctaccattgatctgaaggtcagagtcagacacgaggatgactagttcatagctctccccatgtagtg

SEQ ID NO: 15579 - DNA, 533 bp, Arabidopsis thaliana landsberg
cgtaattttaatctcataaacataataacatcagttagtagtttggcgttgaaattttgtaattttgggtgattcaggagaagttggtcgtactctggtggaatttatggaagtagccatcacaatgattgtatacctcaaaggtttttacccatctggtgagtaaagagcgatttgtgagattgacatgcatctccaagtgattgattgatcaatttagtgtgttgtatgtaaagcggcatttgaaaggaggagatatatgaatgtggtggtgcaaagagcaaggcatcctgagctacgcgactatattcactctgctgcttctggacttcttccttttattgaaaaggtctcttcttcttctttttgtcctgctttaagtgtaacatgatgtatatgtgggaatgctgcaattcttatgcatgatcactgaaacagggtcttgttgagagagtagcagtcgtgtttttcagcgaggataatgttcctgtagagaggttcattttcaagctcacaattaaaccgtcttgcgc

SEQ ID NO: 15580 - DNA, 821 bp, Arabidopsis thaliana landsberg
  unsure (1)..(821): unsure at all n locations
acctcctttgatctctaagtcactactcagacaacatgctcaaagacataatcgcaaatagataagtatattgtttaagtaaagagataaaaagtacagaaacaagatgatagacgaaatcaaatgcagaatctgaataacttagaaaaatctcgaattacaagttgtagaagcaaaggggcggagctagagtaaactagttaaaacagaatagaaaactgaaccaaaaaacaagatgtcgactagatgtcttaggacaaaaccctcaaaacccctatatatacaaaacgaaatgaaatgataggagatgtgccgggaatccaatcgaccgacccatagagtgttaatgggccaagatgggccttgtgatcgaatgaagctcctaacctcttccaaacccttcttcttctcctcttctcttccttatgcccagcttgtctggttgagtgcagagttgaaaagactctaaagatgccatggagtgcttggtcgannnnnnnnnnnnnnnnnnnnnnnnnnnnncgacctctgggtcgagtgtggtgatcgagtggatgctcgagtggaggtcaggtggtgtgacaagatgttactcaacctcgtggtcgagtggtgtcatcgagtgaccttgactgcgggtactcgaccacagtgtcgagtggatggaagaatggctccaatgttactcgaccagggggtcaagtatgtgagaagaatggccccaatgttacttgaccaggtggtcaagtatgtggcttctgattctggctcgcttgttacaatttgctcgccaacagctccaaatcacctgaaaacaagtc

SEQ ID NO: 15581 - DNA, 786 bp, Arabidopsis thaliana landsberg
  unsure (1)..(786): unsure at all n locations
tgcttctctgtaaagggtgaagaagaagaagatgcagtattgtaatgtaaacaacaaataggagtcaaattggtcctcgcttgttgccaattccgaatactggaggaggaaattggaatccgctgaacaagagccattcaacaacacacacacacacacttgcacatgattcaaatcattagtatcatcatatagaacagtcatcaacataaagtatactcagaaactatgtgattggtaaaagagaaggattcatcaaggaggaactaagaacaccaaaagagcaacaagtaggaccaaacccagattcaattttgacaaaatttactccttccattgaaaaccctaactatggtctgggcccttaagtctaatagatgttagaggatccatatgaaacccaatatagtgtctcatgagtaagccaaaagcccatgtaatgctccatgtaactagggttagcaagatagtgacttttgatggtaactttgagagttgtctcaaaacaattcttcttttcatctttatgaaagtatcaattgaatcattgtgttcttggtgataacaaaatagtttctttgaatagtaaagctctaatgagctatctgatttcagttttatatttctctttataagctcatttgagcataattatcattactttagagatatcaacatggtatcagatcgtcatgagatcagggatctattgcttcaattatctattcttctagnctatgctngctntcatgattgaagatttgtggggtctgaaaaaagaaaaaa

SEQ ID NO: 15582 - DNA, 1014 bp, Arabidopsis thaliana landsberg
aaagacatgacaagaatacacggatcaaatgcataagacactcacacaacttacacaactaagtttaacacttaacattacacaatacacttggactcttattactaagcagacacatcacaataaacttacactcttatcacttacacaactaaaggagacacttaacattacacattacacaatacactaacacacttacacaactaaaccagacacttacacaactaaaccagacacttacacaactaaacaatacacttacacaataaacttacactcttatcaattacacaataaacttacactcttatcacttacacaatacacttacacaatacactcggactctaatcaatacattgttaagaaagaaacaatacaatgttaagaaagaaacaagacaatatcaaaaccaaacatcaaaacacattctccaatcaaaaccagacatcaaaaccaaaatataacaagtaaccaaaacacttcactaaatcttagcacagctagctaatgagctaatgagctaaaagagaaagaaacacataaaagcatggagactgagctaaacagtaaaccctaactagaacctctttacacaattgcaatcaaaacaagttccagaggttatcaaagcatggagactcctcaagtgttatcaacgaccactcgatcattctcctatcaaaacaagctccagaggttcaaaactcaatgaatcttaactccaacactcgatttctcatttactgtcttaactcacatttcaaagctaatgttcggaaagaaacaaacaaacttcatcgatttccattacactcggactcttaggacttacacaactaaactagacacttcacaatacactcacacacatcaatacactcagactctaatcaatacattcagacatcaaaaccagacacatcaactaaatgttaagaaatcaaaaataaaacacacttaattctaaactagagaccaaccacctaaataatattggaaaaccagata

SEQ ID NO: 15583 - DNA, 584 bp, Arabidopsis thaliana landsberg
gtcgcagtccattaattattcatttattaataaaattgaatctaaaaataatatttagcctaaaatacttcataagcattagaaaattcatatcttctccatcttaactctatttttagtgattctcgaacctacgatctcgtagcgacgcgtagaattttcttacgcagtttgttctcatattttggtgtagtgttatcatatccattatttttttatttgtctgtattgctacgaataaaagcgaggccatgaggaacttgaagaccaacttttggggaagcatctagacaataaggttatcgtaagtaaaagacaagttgtgtacttgatcatattctctgactaagagcacctagagggggtgaataggtgatcctgtaaaaatcaatactaaacaccacaaatttggtttatgaaatgttagtgaagtcaaaaccaagatgttatgactagagagggagacaccttcttcacttaattgctcttcacaagatgaacagtgtgtgatctccttccttatttggcgaacgaccagttgcagccgaggtcccttggcacatcggatagttcggtgtgcctgg

SEQ ID NO: 15584 - DNA, 643 bp, Arabidopsis thaliana landsberg
ttggggcctatatatacttcatccaactggtcatttgaatgtatgggagcccacgcaacataccaacacatgttatagacatttccaagtgctcaaaacaccaaagtgcttaatagaatcactcagtgattagcgtaggtgctttacgaagtgcttaggttagttagaccgcttatgtagttgctctaggtgatctcaagttagttgagtgagtttagaaaaacccacataaccccttggctcttgcgcgtgctattgtaatattgtaccaagtggcacgaaaatcttgcaagactgtgtcaatcgcgtttgtgacatggccgccaccgtgtaccaaagggaacaaggcccacagcttttcagctagaagctcgatattggagatggcggtgagcgtccgagagaagccaaaagcataacaccacttgagttactcaaccgtggtgcttggccctcacgtgggctatcctttgtgtagggtcaccaactaggattattcgggactttgtgtggttctagatacctcggtaaaaataccggagtcatccatgagagtttgctttctctactagctctttaatcttctgcctttagtctctctacttaagttgcaatctttactattcttaatgtagattatata

SEQ ID NO: 15585 - DNA, 502 bp, Arabidopsis thaliana landsberg
aaaaataattaatatagtatttaaaagaaaaaaggtacattgaccctaaattaagtaataataagggaattttgcaaaatcttccatatgtcccctatgaaacttacattccctaccatattctacctcaccttataaagtctaccacatttggtaattcgtggacgaaaatgcccttaaggtgggtcagggactctgacttagatggtgacagcttttggcagatgtgatgatacaggacgaaaaatcatgatgaaagcataaaggattaggagaaaaaataatagagaacagatgtcttctactgttgttattgggtatttaaaattgacttgtataagaaaattggttatccaaaattttgcgggggacaacgtaatagataatacattagaagatatgattacctgctggcgggggataacgtaatatataatgcattaggagacatgattacctgttagtggagaaatttcgcgggggacaacgtaatatataatac

SEQ ID NO: 15586 - DNA, 1031 bp, Arabidopsis thaliana landsberg
cggtctggcaacgccaaggagccacgacgaccatgtaccttcaaaccacgatgaccagaaataggtacgtggaaaactaacacgttcaaggcagctgatcagttggtcaaatctagcccgacctttgatcaattattgtctaaatatgtgaaatgaaggctggccccagcgaccgcccaccaaaccgaccttgcttgcccacccaggagcgacagatagttaggccaattggaccacctcaccaatcggaaaggacgagaggtcataatgttcaattaagacctaacgcacctgcgtggacacctccacctccacatacacccatgtcatgtcattatacatacataccaccttaccatatatcccgaattagatgtggggcgcgcaccatatccattcgggataccacaataccccgcctgggggcacctcaatcatcttttttgacaggttgacacctccagtacaagaccgattgagatcccctcaatctggtccacgagcacaggcccagcaagattgccgaacaacttggctccaaaggctgactaatccggcaggggggcatacagctacaacctccaacagtacaataaaaggagacgtcattaaaataggaacgacagatgtcgtcatacaacaaaataacgaagggccgatgatttttggtgaatcggccaacacaaacaaaaaagaaggtacggctgtcaacaaaacagccgatccaaaatactccatggcccaatggtgcccatcgggattgacacgatcgcaaaagcaaaaattacagcgcctcaaagcaaaggagaatcaggaaaaggaggcggaaagaatattcaatgacacgcatacgcagtatccgccaccacaaaagagatggagaccaaagttcgttgagaaaaatcaaacggctacaaagttagaaaataaaatgacaactgtgcagctctctgcaggtatggtagactgttcggctataaaggacggatcatctgcacaggacgcagacagtccgaccctgaggttgacca

SEQ ID NO: 15587 - DNA, 518 bp, Arabidopsis thaliana landsberg
gcaacgcacctggttcagttgcaagattccaaacttcaatcacagagtcaatttcacgttcttgaggggcatgtaagacaattgttgtggaacccacaacacataaggcacagccaagaattccaaagatatgtagtttttcccgtaatataatatgagctaagacagcactgagattcagataacaaagtgtaagagaaaagaaagaaaaatcacacattcaatcgtatatagaaaacctgatggaagagtcagacatgagtaatctcttacctgataatgatactgacagcacctagaggagtgacaagtatagcaggcgcaaatgcataagcagcgaaattggcaatttcaccaagtaacactggaagtagcagaaaccaatgagcaacaaaacaaaccaacaacatagtaatcaaatcactaagaaagaagattaaaaagcaaagaagactcacttgtcgtcatgccaatccaccaaagaggctcgtagagataagaatacccaccaacacctt

SEQ ID NO: 15588 - DNA, 742 bp, Arabidopsis thaliana landsberg
ggtcgtcatcaaaattccaggacccaagttatgtataccggtggcgcattcaggtttgtttatcacataacaaaactaaacagtttttaatgcgtttcttctatacaaacacggttttgtttttggtatgaacaggcggaaatcgccatgaggcaggatggccaagctgggatgtcggatgaggaggtattgatacgttttgactaatcagttgtcttttcttgtggttaaagaaacaatcactgtttttttttaatgttaaaaatatctgtgttttttttaggtgaatgactttgtgtcgcggtatttgccggcgtataaggcctatcttccaactctttacgcggaagggccaagcggctcagacccagaccgtgtccttgcgatagatatcgatgaagaaaggaacccgatactcgcaaactaatgcgatgctgtctccattgcctttatagtatatcatcattgtatgtaaaagagagtaacattacgttcttcttccttctatttgacattctttttcctacactatactttcacatatatacatattcttttcttgaatattattttattattttaattgtggtcagttgtatttgtgtgagatttaatgaaacaagaaaattttgaggatccggatcatcacatcatcgactcaggcaattaacacattacagaaataaaaaaaaggaatctttatgtgaccgtttatgtgggaaaaaaacaagcttataaatag

SEQ ID NO: 15589 - DNA, 1051 bp, Arabidopsis thaliana landsberg
gcaggtcgactcaatctagtggatcccatcttcctcacaatgtccgcatcacctagcttatttatgccaatagagttgagctcattgatgattagatttaaacgagaatacatgtcacgaacaagctcatcatctctcatagcaaaagtattatactcatttaagactaggcaatgtttttgctcatggacattagatgtgccgtcatggagctcatgcaattttagcgaaatctcattagcagttttcaaggtaaatacttgattaaaaatattcacgctaagagattcatacaagcaatttttggctctagcattcaaatgaatttctttttcctcactcgcagtgggtttctcaggattcttggggggtttcacccgtcacgagtgactctccaaacacctagatcaacgacctctaggtaacaagccattctagcactataatatgggaagttagtgccgtcgaagtgtggtggcctatgggtatccatcgttcctctaaaaagcgtcggctcttctagcgggtgaagctaaaacgtttcaaatgagccaaaccaggctctgataccaattgaaggaaacgggtgacgcctaagaggggggggggtgaattaggacttctaaaactttcactaaactaggccacaattaaatccctagagaaaaacctatgcaaataatcaaacaagaatgtgcaaactaggttttgtctaagtgttgctatatctaccgcaatggataagtttcaatctacactatataagtatgaatacaagattgaaacttaaatgcttaatataaatgcggaatcttaaagagcaaagtagagaagcaaactctcgtggatgacgccggtgtttttaccgaggtatccggaaccgcgcaaggtcccgactaatcctcgttggtgcccctacgcaaagggaagccacgcgagggccaagcacctcggtcgagtactccgtagagagcacatgccttctcacacgcaagtggtgctccgcttctggctcctcttggacactccccgctgtctccactatcgagca

SEQ ID NO: 15590 - DNA, 830 bp, Arabidopsis thaliana landsberg
ttggaaagttagccatgggatatggcctcttgtatcttccttcaatgtctgaagttaaacaacacagactttccagtgagggtttcacaccagttgaaggtgtcaagtttgaagaaataaaattcaagtaggtttttctaccaaaatccctaaacatttatgatatatatccgccttctcccattcccttagtttccgagacactaaaaatctgaaacttgatacattcaactcgtctacacgtacaatgaccatttttagatttagaggaaacaagcttttgtagtgtgaagtctttgtacatccgtgtcttcaggaatcatatgctttctgagttgacaagtaggcatttctctaaacctgaatgttttgaatcaacgcagggacaaatatcgggagaaacaaagacagcaaaacttacaagtaaggaaagagaaacggccagaagagaaaaaagaagaaggcaagagaaaaagggttgatgcttctgctagtaatgatcctaagaaagcgtcgagaaagttaacggggaggcaaagacaaactatccaaacagcgcaagatgaagaagaaatgaatggagattatagcttactgaaaaaactgaagaaaggttcaattacagaagatgattttgctaaacttacaggagctcatgattatgtctaataaagaagcaagaaaacctttcaggcttataactgagatcatgttttgtcttttggttgattctaaacatattggtcaaaaagaattaaacaaaaggattctcaaatttaaaaagctctcgagtggttttgtttttggtgagtacaagggttggaaaaatt

SEQ ID NO: 15591 - DNA, 1706 bp, Arabidopsis thaliana landsberg
  unsure (1)..(1706): unsure at all n locations
ttggaatttgaaataagcaattaactaacatgtcatgttctctcagattctagtgtccgaaatcccaaagtcataaattaataatagtctttgtttaagataccctgagaaatcatacttatcgtagtcttaaaacattgcattataagaactgagtggtgcaaacatattttacgatagtcatagtgtgggtttggattaggaaaattcgatttaataaaaggaggatgtagttttcatggattcagacagatggggtgtgagatattgacaatggaggcccaaatgaagacaagaagaatgggaaattagggattggtctcaactttgggactatgtttgtctgaagttgaaaaaagccaccaaatgtgcccattcgtgtatttttttttaacaccccaacataatgtcccaccatgaaggggacatctccccttagctatccctttctcattattcttgtatttctataattctttcgtttgttacaaacaattgttataagaggtataatttgtagaaagatatatcaaaagtaatcactaaataagtaagaatcgtagacgcattatccttatactaatgatgttgtcttcacttcctcgagaaacctcgtgactcatgacactattttaatatacatgcaaattgcaagacattggatgttgcgtaggtggtcattcttgtataataataatataatcatgaaagaaaacactaattaaggaaatatccattcttaagtttttcatatcttttatattattcaaatatgtatcttcataataattcttcatattttttggtatcattattcttcatggttatgcttcatatttctcctttttaaaattatcttcctcactcttttgatatatacatagcctctttcaatattttatgagaattaattgggtgatgttggaaaatattacaagacatggttatgatcaattaaacaattctgagagtctaaacaataatgctttgcaaccatcaaataaacaaggttttggcaaataaacaacggtggcaaagagatatcagaggaaatggatccgacagtttgatgaaaccctaggaagcttcataagagcattggtgattctcaggtacgtattactagcatcgttgtcttctcggtgatccacttcaacgcgcaccttgacagtctccagacatttcaaatttgccaagaaatgactcatctgcttctgctcacgacaagttccgcgataccctataatctttaacaccttcacttgacatgtcaataaacaacattctcccctcgtcttcttacggatgcaaaggcaggcgtcaccgcatctactagtaactttgtgcacaagtccctgaaatcgaaaggaagaaattcatgtaaagcaaaaagaataacaagtgtgtgttttgatcaacagaaatttgatatatacatgtatttaccttgatgactaaagtttccaggtttggagagctgttaagaagaagtggcaccacttgccagcctctttctttgtcactctcaaacgatgacttaagnnnnnnnnnnnnnnnnnnnnnnnctttacacagagagtgaataacctgatttatatcacaaccaaaaacaactcttgttagctagcttaaaatcggaaaacaattaacacaaaaaaaaaaaaaaaaaactgacctcaagaggatctgaagacaagtaaagggtc

SEQ ID NO: 15592 - DNA, 685 bp, Arabidopsis thaliana landsberg
aagaaagaaattatacagacaagacaaaaagaaattaagattatttatacgtaccagtgtttatcagggtcgggctaatgatgatgttgttgagagcgtgaaagagcaacgatatatataatgaagtagaggaaaaaataatttatttcaaaaaaacaaaaagggcaagagaaatatatttctaatacgatctttacaatgatatctacaaagttaacaaaactctacaataatatatccttaagaatgagaaagattgtgagaatatgtcagattccgtgatacaatacctttataaatattagagaatcacgagattcctaaactattgtagtcattaaaaatccacgtaaatcaagattgaataaaccccctaaatacaagagagacaatgtgaagttaagataagcgctagttagtgcctaaagaaagagagactaaaattttagggttccgaaatttgctgtgatatcatttaagaaaatttagatgttcaaaaaataaatataaaaaccacacacaaacataatatatatatatcactcaaattacaatcatgcatgagaatacattttcattaaattggctttgtttgttggccaacgtttctaagcgaatttgcctttctttgcttttccttaaataaagatgtaacaaatgttcctacaaacaaacgtgaacttat

SEQ ID NO: 15593 - DNA, 771 bp, Arabidopsis thaliana landsberg
cgaactgacatattaacacgtaaattcaaaaatacaatttttcattggattagatcaacatttcctgttatgacccaatttaaaaaaaacaaatacaagtactcaaaatggattagaactactttaactgttaaaaaaacatctccatatggatacggctttatggataagcaaacggtattgcagatgtttgtgatacaatcaggatatgtttcagcaataactaattataagaactgaaatattttatacaattacgttgaatagagatttgtatcataaaatatattaataattggtgcaatcaagctttactttgaatcaaatcaacaaaaatacctttaatcattacataaattaatggctttacaaaaaataatctaaaaaaacaactacaattactaaaaatgaattataactacttttcctgttaaaacatcatctccatatggataaaagtttgtggatagttaaacgggattgcacagacttgcggtttagcaagatatgctaattatagactattttaacacaataaataaacatatatacttatatttggtacatcaagaactaggtttacagaaacgaaaaaacatttatgggaatatcttacaataagaaatgaaatattttacaaaaacatggaaactagttacagatcatacattaattaacaacttaaattcaaaaataaaatttctcattggattagatcaacttgtcctgttatgacccaatctaaaaaaatcaactacaagtactcaaaat

SEQ ID NO: 15594 - DNA, 1291 bp, Arabidopsis thaliana landsberg
aatgtcatggacaagtatcatcaacgcataccatcaccaatcttgtacgacatgacctaggttgcttgtaacaaaaagattatttgattgcgagataaaatattgtttgttgtatgacttttttgttcttaaaaacactctccaatctatagtgtacgtacattggtacaaaccatgttgacacatacttcttggagtcacagctggtgtacggttacccgagtgagaaatgttatctccgccaggtacacgctgacttttgtacgtacactctgccaacagacgactgaattcccctcgatgttgaacagtcagttgtatgagaatgacgttctcctcaacattccctattccatattcttctacaattacatcatttcacttgttgtaatcataatcttcgccactactttcactaccatcaatagtaggatcgatggtacttgcccccatagatccatcgtcaccctgataatcatcatatccatcaccatctttgttgtccccatcttcatcctcatctgttttaccgtcttcaacgtcgtcttgctaatctacgacctcattattttcatcaacatttcaaacactatcacacacacggtcactttcagcatcgtcaccatgagtcctaaagacattattcccgagtgtcttgacggacaaacaagttgagagaaggataccgaccacgaatcaaaaagaacgtatccaaccccacttgactgtcaatgtagacaggaagacgtttagtatctatcatcactaacatctctcctggcatccagtaactaattatgggattgatctctgtggacttcaaactgaaagcctcgcttagtgtacgtacaaattccgtgtacgtcatgttttccttaacacgtacacagtgacgaaacatgtcttcctttgattcaaattttcatttttcttctttgcatctccactcaccgaccatagtaaatacggaaatatccattacccaagtgcatcataaattcaggaaaaactcattaaatgcaactgaaaacatgattatatctacaaaaacaaatagaattttgatatacacacttataaacataaatatttatacatttagaattttcaaccaacaaaattgaaaataaaaatttctgggtttctatataaaaaacaaagttgatttcgaacatactgaagatcatagtgtgttatagcaaaaaaattctttaaaacttcattacttatacgataatgcttatattggttccaacttcgtgaataaacaagatcaacattttttgagcat

SEQ ID NO: 15595 - DNA, 658 bp, Arabidopsis thaliana landsberg
  unsure (1)..(658): unsure at all n locations
tataaagtctttagatacatatgtaaatactttaaaactccttttaaaacctttgttaattattttaaaaccttttacaaaggttataaaagatttacaagagttttaaaaggatttacaaggattttaaaaaaattataatctaacattttcaaaaatttagaacactcacaaaaagttacacgaatttttagaaatttacaaaaatttacatatccctatgccttacgttttaatcacttgaatttacacccttataatctgctattgcttgctttatttttattttttactatttcgtttagcttaatttcaacactataacctcttgtttggacaaaagaatttagtagaaatcgatcccctagtattacagctgacctcttatttgagagagtagtcaaggagaatttgaacatgtatcactntgctntcttgtgttttcggtatactgacattntgttacattntttcagttttttgtgtctgtttgatttggtcgtcttcataatatttagttgagagatatgcgcttaattagctgccacattgacaatgatgggaaacaacatgagaataacaaagcttagcttgtttatatggagaggttcaagtgaagcaagtgtggagtaaaaagagaaacagacactaagattta

SEQ ID NO: 15596 - DNA, 1126 bp, Arabidopsis thaliana landsberg
ccggtgctttaactccagattttctggtggttcttgagatgactcatcgcaaacctgatgggactttcatttatggaatttcagaggagatctacaaggaagtgtcatcaaggattgaagaggcagagtctctgctgcaattaggggataatatagagagctctgcttcaggtgggttattagtggctgccaagaacaagatttatgctcaggtaattctgtatattttcagttcagagtgtctttagttagtacttaggctttgtgtggtgtgtgattatgtgatgatgttagcagcatacttgtgtgatgatgttagcagcatacttatgtggtttgtatcaggttgctccaaggaagaaaggaaggttgtatggggttggttctctacataatgaagcatcctcagccactgttggtccacagcctcataatgatccggttgttctatcggagaagcttgctgctgctgaagctcgtcttcaacttcaggctgagaagatcaatagtttcgatgcctatattgaatacctcgcagagaaggatccagtgtttgcaggcatgtaccgaagaccatctgaaccagcaaatgcagacgccacaagaccagctgaggcaaccagaccggaggtatcagaccttcaccgatcagaccggaactgagacggagacaagaactggtaccataccaggctcctctacttcacaagctttttaatttcgctctgttttaagacttggtatatagttgctaatatcaactcttgttttaagacttgggtttgctaatctcaacttttgtaatctcaacacttatgtttttgaatcatttagcagttaatatttttgaatgtctactgatttcatatatgtttttatatgtttactgaaaatcaaattaaaatcaccataaaaataaatcagcataaaatttgtaaatgaaaaaacaaaaaagactcgcagcagacttgcaaatccctagcaaatgttgcgagggaagtgctacacttatgttttgcgagagattgtggtccccgcaaagtttgcaacgaaataggtatctcgcaaaatttgcgagggaattgcaagatattaaatttgcgagccgcgatttgcaaggaatgac

SEQ ID NO: 15597 - DNA, 876 bp, Arabidopsis thaliana landsberg
ttaacgtaaatgatattacaaaaacagtaaatacgtcttgaaccctcccccaaacttaaattacactgtcccttgtgtaatcaaaatttgtgaaagaattcaagataaacacagaaaaacaaaaacaaaagcggtatttacaaagggttttggtgtgttacctcagtaggcatgaccggttcttggtgtggctccgccatctcctcgtcattgtgctcgatcgcaaccccagcaggttgtgcagcacgtcgctcatatgttctctgacccgacattatccaacccttgcttgatgatcggaccatcctagcgctcttccgcctcttgtgctccattggctcatgagactcgtgccttacgggaacttgcagaacggtgtggtccctctgttgataggtggattgcctttgtagggcaatattatggcagctggatggcatgtcttcaggcgggttatcattgaagtcctgtcgggcgttttcacttctccttgcgattgagtggtttgggcaattccactagaagaccactcaatcacaccacttccatgttgcgatcgagtagattgacattgtcgttgagaaagatgttgtcccaaaaccactagatcgcactctcgagcttttactctcatcttacgatcgagtgattcatcaaaaaaaaaattgattttttttatttgaacactcggttgcatccctgatgttgctccagctgttattcatttcctgagaatcaaaaccaaaaccaaaacaaatcaaaagtaactaaataaaataaaaactatatacagggataagcatgggacttcctcccaagtgagcttgatttaagtctctagcttgactcctcacactcattaagctcaaggaggat

SEQ ID NO: 15598 - DNA, 1741 bp, Arabidopsis thaliana landsberg
tggaaaacccattggggcaaaaccttataagggaaaaagagtacccaagtaacacctagccaattaccaattgtcttgagctgctattgagttccaaacgcttagtatgactttgtttggatgcttgcccaagtggttaagaagtccggtaacagcttggttgagaagtctagtcttcgaacgagtcataggactggttggttccgtacaaagcttcctccgctgcaagctgctcctcagctacaagctgctcctcggctacaagctgctccattggttcaagttccaagtcttgtctcacaatagcatatcatgccctcaggtggctaacaggcgaaaggcaaataccctagatgatagattcaaaaccgggtcaatccactctcgtgacaaagacacagataactttaccacttcctaatctcaactctcgttgatgaatagcagagcaggctttaagcaacaatctaccaaagtcaagcagtctaaacatccaatttcttgggctagaatctacaaatctcttgaattcctagatcagacatccatttgaacgtcttttggaagctggatacctgtggtcgaattcccacattagccagcgaaaaccgcataggggccaacgaatccagaagggatcttacctaatcttaaccacctgactaacctagtgattaccctaatctaatccatcctcaagaaccctaatcactactcaagcaacataactaagaacacaaacccagaaattactctaaatatagcaaaatgtagatctaaacaagataaacaactttgctcagagaactaaatgcaaaatagaaatagattaaaagtaattaagttttgaagattcaagaacaaaaagaaaaactaagagataaaagctagatccttcggacaaatcccaaagtgatctatttatactaaaatgttgaaaaccctagattcactagaagacaagagacttgaggcggtttggacgattgctcgatcttggggatcgagtaaacagggtgctgcaaagtctgcgcctttgcctttatgctctgagtgatcaattggtcgagtagatgcttcttcctctcctatctgtatgcttagatgtcttgttgattggggaatgaggaggatccaaagaggcaatgatagatcaacaaatcttgtagagtaggtcgcctttggtcgagtaaatgggtcgagtagaggatagagtaagaggggcgagtaaactgatctgctgcttcctctgtggctgcctggatcgagtaaactgctcgagtgaattactgcctcctctgtagctgcctggatcgagtaaactggtcgagtagattgctatgttgcttccctcttggttggatagagtagagggtcgagtagaatccttgtaagctctttctgcacctgaaaacacaccaaaacatgcaatatgtatgcaagatgatcctaaatgcttaagtgtgcaaaataagctaaatgtgatgcaaaatgatatgatacaatgagtgatcactaagctaaatgatgataaatacatgcctaaaatgagtaaaattacagtgttatcacttgccctcaaagaaaacataaaagccgaacccgtggaagaggttttgaaaaacaaaggaactcccaacattctttagtcttttgccatgattattgtaaccaaatccatatgcctagcaagtctaatcaaattctaaccaacatgtacttctccgcaagcttacacaag

SEQ ID NO: 15599 - DNA, 1353 bp, Arabidopsis thaliana landsberg
agttcgcacatctgttgtctgattattgatttttcgcgaaaccatttgatcatatgacaagatgtgtatccaccttaacttaatgatttttaccaaaatcattaggggattcatcagagtatagcaccggtaggatcaatccaccagtagaatttgacggccaagacagctgttgctaagccgattgaattagtgacgacgtcaaagaggtgatcttgagcataggccctaacgatttcgttctgaaatcctctgcaataaagcattagaagaaacttcacgatggtgacagagaccatgataccaatcatccatttctcctctgtgctattcatatgaataccactctgtaacaaaaaacagaattggttaaatacattaattaaccgatgaaagcagttacctgaaaatatgtaaagtaccttggcaactagttgccttcctgactctagcaaaacttgcagtccaagagttgccatcacggaagcaaacacaatgataccctgtaaatttacattatcagttctattttcttgtgagacaagtaagttccaaacaaaggggttaagagatcaaaacagaagaagcataccacaggttgcatccggcgctttccgataggatagtgaaactggtttggttttctcatggcattagctgtaaaccagaggataaaaccagacaagagatccaaaagagagtccaaagttgaagcaatcacagccatggatctactctccatagaggcataaacttttgctacaaaaagcaccaaatttgttgcgttcgatatgtgaaccgcaagtctctcactctttgcaagcttcttcatttcttcctgttcaaaccaaacaagcttgaggattcatctaatatctataccataagaaaaaaaaactaaagaaagaacagtagaggccagacctcagttggaacaccagatgcaaaaccattttcgtggatagtctccatctcattgaaaccctcgaggagcctctcttgcttcttgtagtattcagagactctacgttcctttcctgcattgagacaacagagaaaagggttcaaagttaaagtccattttcaagatttaacaatttgatagtcgacctttgatgggtataacagtttctcaaatcactctaaaacgccttataacctctgtagagattaatctgattcagcatccacataactttaaaacaaagaatatgggtatatacaaactccaaaagagaagctaaagatcccatcaaaaacattgaatcaacaaaaagaaaaagttttatactgaatcaaatcaatagcaaggggtttcaaacagtcataatcattcactttattttttttcct

SEQ ID NO: 15600 - DNA, 812 bp, Arabidopsis thaliana landsberg
ctaacgaagttactgttttgataagtcttcagtccatagtttcatatttttactataaattacagagttcaaacacagtttttttgagctttcttcgatgattatctcttgtaatcattacttttcttggtttgatatcctatatttgtcttattagtattttaaaacaatttttctgtaaattatcttctattaccgcctttctttttactcctcataattttactctcttcagtccttctcttctatatatatttctattacttctccttagagtcacctttgtacacttctttctcttcttttcgtttccttctttgctttactctctcttcttacgtgatggctgatgaaatttggcaagacatacagtatatggtgttaggccgtgatgatctagaactctttgtcccgcaggcagctgatgcttgtatcgttgcgggtaaccgtcttagtatcatcgccagaccactcaactctcatgcacaacatctccgacgtgttctaagagctttgcctcgcagttggggtatggcctcaagagtccatggacgtatcattgttgataggtgtatccaatttagatttcgctctggtcttgacttggcttcagtcatgttgcgaggtccgtggttgtctaatcagtggtttgttgctttacaaagatgggaagattttcctcgtactaactctctcatctatattgatctatgggttccagttaggggaatccagttctcgatgtctcatctatgactgtcaggtgtatcactagtactttgggaccaatcacgggacttgactttgatggg

SEQ ID NO: 15601 - DNA, 1402 bp, Arabidopsis thaliana landsberg
ttttaatcctacgattccttttatttctgtatcaaattgatattttctgtaaaaagtggaattaaattatatttaacttattagtagatattatatttattttaatcttacgattccttttatttctgtatcaaattgatatttttagtaaaaagtggaataaccgaaaaaaatctgaaccaaaccgaaatcgaaccgaatcgatatgcatatggttttatatggtttcaattttaataaaaccaaaaaccgtaacacgtcaaaaactgaactgtaaccaaaccaaattatatacgatttttacctggtttgaatttaattaaaaccgaaaacccgaaaaaaactaaaccgaaaaactgtatgcccaactgtgtatccttatctattggtttgacttatcgggacctcagtttttctctccacttggatatataaatatatgtctctacgaaccaaaagaaaaagagcaaagtaagaaatataagagaaagagcgagacatatattggaagatgggaataaagtgttattcaaaattacgttatgtggtcgatctggctttgctgcgcccctcttcccttgcagccttagccaatcggctccttcctcagttaccggctagtgtttcaacccactatgtcatataaatacatacgtttttttgttcaaacaatattgtataaatgaattaaaaggatctgtttatcacacagaacatacaaacgaaaactgatcgcctgaacgaattaattatcaactggccaaacgaaacggaaaaattcaagagaactgaagaatgtatatatttatagtatgcatgtaattcattaatatttggtgtttagatttacatttttatattataacagtatgttttcgttaaccacgctatttattattttaatcaaacattttgtggatttttcatgtttgtgtttataatagaaatatatttgataaaaactaaaaatattatattccaaccaaatggaaaaatatagtttgacgtataaatttaattacatattcaatagattgacttttgaaaaccaaaaatcatatgtacgtgctacttttttcttttacgttataacactatatacagtagatataatgagtatattttactctatagtataaaatgtaatagagtatatatacagcacattgtacacattaacaacttaacgagaatagacgattattttgtttctgttgtcttcttcttcttccttcactctctctctctctagagtttgaagattcctgatatggtatcagagcatctccgatcaaatctccgatcatgagttgttcttccgtcgatcttattctcatagatcttattcatttcatctctgatagtagacaaagttaatcaaactggtataagcagaagttca

SEQ ID NO: 15602 - DNA, 3508 bp, Arabidopsis thaliana landsberg
  unsure (1)..(3508): unsure at all n locations
tgcaaatcttccttgcctttctagtttcttcagtattttcaaaagtcaagacatcaacaggtactaagaacatcgtgcttcttgaatttaatcaagaacatgctactggggtttaaaggaactaatgagcttttatcaatatgtcttaatcatagttgcttcttacatatacgtgtttggatctggacttttgggtttgtttctactcaactttctgattgaagattcatcattccctagtaagttattatgattaattaacttcaagaaagatatttaatacactctgttatgtgttttcacaactgaccacgattgcaaatgaattataattttccaggaggctggattattgtcatggagttatatcctggcttctccttataccgtggcctgtatgagttggcgcaatttgctttccggggaaacttgagaggggaagatgggatgaagtggaaagattttggtgatagtgcaatggatgatgttttttacatcattgtcgttgaatggtttcttgcactcattgcagcatactatatcgataagatatcttcatccggaagaaacccgatgttcttcttgcaaaaccctttcaagaaatctccttctttgagaaggcctagtttgcagaggcaaggctccaaagtctcagttgatatggaaaaaccagatgttactcacgaggtatgtccaaaggctttacaatatattctatgtttttgataatatatactggttctgataacaaaaaatgttccaatcagagtaaaaaagtcgagcggttgatgcttgagtcgagtacaagccatgcgattgtttgtgacaacctgaagaaggtgtatcctggtagagatgggaacccgcctaaattggctgttcgggggttatctcttgcagtgccttcaggagaatgcttcggcatgttaggtcccaatggtgctggaaagacttccttcatcaatatggtcagtcaaacggacaaatcgacccctaaaaaataaatagttgtgcttagcttatgactgaaaaactcccattggataataaaagttgcatcgttttttttctgtatagatgactgggcttgtgaaaccaacttctggagcagcttttgttcaaggtttggatatatgcaaggatatggacagagtatacactagcatgggtgtatgcccgcaacacgagtaatcaagttcttagaaacattttatttttgttcaactgtacaaatgattattagttgtttatcagtctcattgtctattatgtaccaccagcttgctatgggaaacactgacagggagagaacatctactgttttacgggagacttaagaatctcaaaggcgctgatctcaaccaagtatattatcaatctcacttcccttctatattacttcaaaagttatcaaaacgctcaatctatctctcacctttacttacctcgcattaggctgtggaagagtctcttaggagtgtcaaccttttccacggaggagttgccgataaacctgccgggaaatacagcggaggtatgaaaaggcggctgagcgtagccatttcacttatcggtaatcctaaggtacaccattgtctaagaatatcttgttgctattaacaaccatgacctttataaacagtacatctagagagataaggctctttcaagtttaacaaactcgtcctcatttatttcttaccttgaaggtcgtttatatggatgagccaagcacagggcttgatccagcctcgagaaagaacctatggacagtcatcaagaacgcaaaaagacacagtgcgataatcctcactactcattcaatggaagaagcagagtttctctgcgaccgactagggatttttgttgatggaagattacaatgcatagggaacccaaaagaactaaagggaaggtatggtggatcttatgtgttaacaatgacaacatcatcagaacatgagaaagatgtggagatgttggttcaagaggtttccccaaatgtcaagaagatataccacatcgcaggaacacagaaatttgagatcccaaaagacgaagttcggatctcggaagtgtttcaggtggtagaaaaggcaaagagcaatttcaaggtgtttgcttggggacttgctgacacaactctcgaagatgtttttattaaggttgctagaactgctcaagcctttaatgtcttctcttgaatcttcttaacgttgtcattttcttttctgttgaacgtcaatattcttttggtcaggtttgataaaattggccatgcatatatttgattaaatgtacattattagaataaatcggctgaaagttgtgatttctctgaggctattatatataagttgcttgtttatggatgattcatgttaaacaattttgtcttgttttgtaaactgtggctctataaattttagctgacatgatgatgttgatacaagagttgacgtgaatgcatacgagagaggaatttttggnnnnnnnnnnnnnnnnnnnnnnnnnggacttgtctgtttgggtaaaaaaacaggacttctctgtttggtgagaagagagagatttcacagtttttaagatacaatgtgatcctcaaattacgagcacaaactcttttgttaagttaagatacaaaatttacatccaagactatattcttacattcaacatattcagactatttaaatgcaattgattttggataaaaacgcaacatccgaattgatatatcaaatggacaaaatcgcaaaaataataatattggtcgtgatgtcatactacaatagcagctgagtattacatttcacgaaaattacatctcagttcccaaagcatttgttaactttggacacttaaacgttgatagagatggacgtccttaaaacccatcaatatcaaaaatatttagtgatacctgacaataccatatttattggtcttgttatgatcactccttttcctaagcaacttgccaataaacccccaaaaaaatatttgcaactacagtaattggctctttatcaacacaaataatttcgagttggttgagacttgagaggctcgtgcactagggactttggggtagaaaaaaaaattcttattccagcagttgacagggtgataatcttgattttttttatggtctttcatgcccaaatgcaagtgccccacgaaacttcgcatacatatggtttacctcgttatcttcgttaaaaattactatctctgttattttttgtttgattttctagaaaaaatatttgtttcaaaaagattttttttttttaattttctatgcaatatttattagttattgttaatgaattgtaaattttaataaaaataattgaatatcattggtttaaagttatagaaaattgtaaaatacaaaaaataatacattataaaatcaactttaatatatattttaatataaacttttcctaaaaaataaaaaaataaaaaacatagggagtattaagtaacatccatgcatcct

SEQ ID NO: 15603 - DNA, 1186 bp, Arabidopsis thaliana landsberg
ataataaagtctcgctgatcagcagagaagataaggatacttgttcaaaaaagcttccaaggtaaggtctataagctaatatcagaaacacggtagttcttagacttgatagtaccaatgcttagagataactacaatactcataagatgtttagtgtccataagatgttaattacctgattctctaattgatgtttttcatatctccatttcaattgttagcaacactttattattcgaaagagttggattagaaaattttaattatattcttggagtatctcgtgaacatagttagatagccacaatattccataaagaaggttctgttatttttgttggtctagttagttttataatctctgtggttgttgcagactttattgatcaggtacttcacgttcaaaaaaaaaatctttaagctgcaaagaccaaaagtttcagcatacaagggttgaggtaagtatctctctctcttaccacaaactggccacagactagtcctctggcctgtggcttgttcatcatgtatggcaaaaaatagatcaaagatggcaaaaacacaaattcacgctcaatcacaacaaaattctaaaacacaaattcacgctcaaacgaaatttaaacacacaaaaacataacacaaacacacttccaaacgcatgcatattcaaaagaataaaaaagaaaacacaattcacgctcaatcacagaaaaattctaactcaaacagtaaaactccacaataggaacaaaaaacttcacattccacgaattaatgtgtaacttgcagggaagagtcctcttctgattcccaggtacttgtttattctggttatctccataatgtttaagactttttaaatttgatgacctttgaatcggttttgattattaaatggttatagtttatggaggaaccatggacggtagattggatgacatggtcttgtgatgctcgaaactcgattgttctcgaactagtcagtaatattaaacattgacatttgatgggttctttctcgtttgttctcagctcttcggttccctttgttttgattattgattacatattaactctgcccttatgtgtataatgcatcttccatggtagatcattctaccgagcttttcttcacacaagtcaaataagaccaattctgcaaaaagcttaacctctgtcaag

SEQ ID NO: 15604 - DNA, 845 bp, Arabidopsis thaliana landsberg
gaagagcacgcaagtggaaagcaatatttgtgtactgactcaccgcgatccactggtttgatttatccatcttctccaacgatgtaagctgtgttacgagtggggttaagtatactctcgcctttatcaaaaagcaccacgagtttgttctcttcgtcaacgaagaaagtaccagatgcagcctcgagtggtcttatcctacccattggaaaaatagcttgctccacgacactgcattaggctcaatcttattactaatccatatccccgtccacgttatatcccatcgctgatataacaccgcaagtttctcttctctaacactagatagagttatggtatcatcaacacaaggccgaaatggcagaggcagacgcgatccaaatttctctattgtaaaatcaaaacatagtaagaaactagggatctctacgtttatctctgcttcacctagtgggatatcttctatcactctttcacgtgggggtggtgggatcttctctcgagcaaaccaataagtatttcccttgagagtcacgccacggtgaagaaaacataaatcccagtcggtagtgacctcgatgaccttccaagagttagtgtcaagactgtagatttcaaactcgcaaactctagttcgaggctctacactcatatcgcccatgtcctcgtaagcatccaaatatctcaaaattttgtagcttcgtttggcgttgttcttactctcgtatcctagagcgtagatgtcccattcgcggtaagaagttctaggttcgatccacctagtttgcccactataagggttccaaactacaagcctagagtttattttattggtgatgcat

SEQ ID NO: 15605 - DNA, 571 bp, Arabidopsis thaliana landsberg
ctttatcttgaagatccactcgcaaggaacaatctttcttcctggtggtcgtttgaccaaatcccatgtctgatttttattgtgagattccatctcatctcccattgcagcaaaccatttctcagcctcaatccctaaaacatcttctcgataagtggctggctcatgagtatccacttcttctgcaacctgtaaagcataccctgccatatcctcaagacagaatcctgccatatcctcataaccgtatctttgtggtggtccaactccaatcctccttgttcggatttgagcgatactgtaaggttttgattctggcttgatagtgtcagctgacctatctgctgcctgtagctccttactgtcttctggtttctgtaaatcagctttctgattagctgtcagctccacctgtttatcaaaactactgttctcttctgtagttgtagacttttctgaacgtctgagcatagaaacttcgtcaaagacaacattcctgctcaaaatcactttgttctctgatggagaccaaaccctgaatcccttgactccatatccatagcctacaaat

SEQ ID NO: 15606 - DNA, 542 bp, Arabidopsis thaliana landsberg
gttacttcttgaatctccctggaaatggtagtggaggcttatagggtggaggaacaaagactttatttttggttttagcagcggcaagctttttaacagaagaaagtactgcttgagcttgggatctagtactgcgatcgagtatgggctcttctattgctatttcagctggaatgacgaacaaaatcctccccttcttgaacttcactgtccctagtgatagaggaagaggcatgtcaagttggcagctctcgatcatggcagatagtgatggcatgagcagtggcgtactccttagggttctggattgttttccctggaagctggcatgggttgttgttaacagatggtgaagcgaggatgccttccacatatctcatcctagtgctcaatgattcgaacttgctgttaagttcgacgccttgtcggtcgactttgttgtttaattcaaccagcttcttaacgatttccattgctcctgtggcttgttcttgaatgagctgctggagcatagttattatgtctaaattctgaggcgcagg

SEQ ID NO: 15607 - DNA, 2513 bp, Arabidopsis thaliana landsberg
atctagaagatacccactgctcttttcattgtctagtagttctgatggttttgttaacgacttaacagatccacaacccctaaacgcgtgactgctaataagaatgccagtgtcaacctctgtaatccaaaaatggccaagctataaaatcattaatgtgtgatcaaatggtatgatatagggaatcaggcatacctcatgaaagatgtagttgggtttcagcactgactcggcaatacccctagctgttaagcagttatcgtttcgtagttgcacgtatctttacatccgaagctagcgttctaattgatcggtagcgccaatttaggacagcaaggtgcaaaggtgtattaccatccacatcttgaccaacacccaaatgttttgcatcatcacttcgcatcaacgattttacaagattatgtaccccattcttggctgcaatgtgaagaatgttctgaccttgtttgttaagcagctcttttgaatctggacaacgttttataatttcttttacaacatccacataacctttctcgactgccatatggattggaaaggaaccatcatcgttgcattcaaagacgcctgacgttgatcggtctaacaggttgcatactcctttataaaaccctatggatgctccaattgaaagacacgtccttccttcttcatctcgctcgtccccaagagttggatcttcattaagaataacatctaggatatctgctttaaataagtgggaacttcaatatatagcttcttgagcagaggaacatgaacagagataaaatggaaaagcaaacctggattctttgtctctagtgctttgtgtacaagcgattttctcccttctaactgtgaagataagttagaaccttggtctggggagttataaccaagaccattcaacatctctttcactagggctagacctccagcttctacagccatgtacaagggagatattccatcgttattctcaagaaacgatgcatgcttgctcgcattcacgaggcagagagcggcctccagatgacatccttttattgctgcgtgcagaggaatatctccatctatgtcttttagaacataaatattaaatctctccctctcttcttcaggcaatattctagctgaaagatatgttatcgacctaataagagtctcaacaacagctaaacggccagcacgagcagcagcatggattggaatctgatccttccaatttggctcgaaaagaagagatgggcattcagatattatgctctccactagttcaagatgacccaaagcagcagcaacgtgtagaatggaatctcccttatcgttcttgagacatgccattggtgttccatagcttctcatcttctccagaaagtctctgttccccgctctcattgcactaaagatctctggattcattggcacagattcaccagggagattgtaaatatccgataacctgatattagttagaaaatctgagacatattccatgtgcggtgtgcagcagtctatgatcagcgtcacagggaagcatttttgtcttcgttgctctacaatcacactcattgatgctctatgtgcttcaattctcaccaacagtaagtaagcccaaactgctgtaataacttttaaaaaaaaaaaattcaatttcatgctttctaaagcagctctgtctcatattttatcaagaagaaggtagatagaaagagacttacaactgcttgacccggacagcaatctcacatcgattggaaaaccgcgtgaaagaaggagaaaatattaaataccaaagaccaaaaggaatggaaaatagtaaacttggcatcatattcaagcttgtcaatctggcctactggtctttaatgattcaagtggtggcatgaaaccagcccaggaatgagtgcatgacttttagccaacaacgtgtcacatactaatgaagtcccacaccaatcagagactttaagcaaagtgcttccagtgatatctacatccagaaaaggaatatgaatcagttttacataccacagatcatgtcctcaattcctaagcgacatctaaggaacaaatcaataataattcatcgtatctctaagcttcagtgcaaaataacattagcctaaacataagtcttcaaaaatggaggaagctatgttattctaatagcaatcaaaaccaagacttttctttcctctcaactattttgagaagacgagataagcgtgatacccactatacctaagccgtcccaaatcctccgcatctgcgtttgcgcctccattttctgattcagaatcgttgccttcacgtgattgcaggaagagatcagttccataagctaagtagctaaccgaatttccaagtccaggaagagagctacacggttgtactcggctgtcgcagaaataatcagatcagccatctccgccgtgttttgtcgcaatcgcaccgcagaaaataaaatttattgggcccacacaaatggcccaattggttgtttggct

SEQ ID NO: 15608 - DNA, 1447 bp, Arabidopsis thaliana landsberg
atgtctagatccacccacatccccactaccacaagaatcaccatgctgctacttgcgagccagcttgcatatgttaggcaaagagtgacaaacatgccaccttttccgcctagtatccaagtgatcatgaatccgactttaaattcccaagaacaataacactctcatagtaggaaataccgactcggtaagaacaacataagctcttgattagctatgtggctctagattctttattaacatcaacataaaacctgcaataacaacacaaggatacaatcacaaacatactttaccaaagctgagaaactagaaaaaaaaataaggaagaaaataagacacattcatgatatttatgcattatccaagagcaagattgaaatagaagaatataggaaagactagttcaatcaaactccagacacagatggctaatcatgactcctaaaaaatattagattttaatttattttctattacgcaaatcatgttgctagatgtaaagggttgtgttctcaactactagttgcgatttcacatcttaaaagcatcaatcaatcaaacaaacaatagtaaaaaaagttagtaaatgtgcattttcttagagcatcattattggtagtatcttagattagtcttagcatagttcttaggaatatataaaattaattttgaaagttttgatgttaagagtttggttaagagattaaatttttggtaatatgcaatagtggattcttaacttgtagttcttaagaaaaaagtatttaaaaataaaaatatttttatatttttaaaagtaataattattacaacttataaaatttgaaacatacatgacataaaagtttaagcaaacatgacgtaaacataaataattcactgttggagtcaatagtttaactaattgtttttgtttatgtttacatcatgtttgtttaaacttttatgtcatatatgttttaaattttataagttgtaatagttattaactttttaacaactaaattttttattattttcaaataacttttttttcttaagaacttcaagttataaacctatcattgcatattgccaaaattttaatctcttaactaaatttttaacatcaatatttttaaaatcaattatacatatattcctaaaaactatgtaagactaatttaggagactatcaataataatgctctaatatacaaacactctttgccagactgtttattcttcgtagtaattaaatgatcacatttattaatcctgcaacaatccacgtaatgtagttgatagtacacgtacttaacttatgaaaaatattaaaactactaatttgtttataagtcaaactaattcttacttctttatttgaggtcaaagctcaatgtctgcttcctcttcttttcttttttttgttagtgcatcataacttgcattgttgcgattcggt

SEQ ID NO: 15609 - DNA, 483 bp, Arabidopsis thaliana landsberg
cgttatccaacaccggcttctcagttaacttgacggcgttatctaagactggcttttcgacgacggtggtgaagttgacggaggtggagtttacggcgatgcgtgagatgcagaaacggagttcggaagcggagatggagaaagaagaaggtagaaaagggaggagagtagctaaagtgcagagaacgagtaacgccattagagctagcttaagctcggcggagaagttccataagaaacagatgaggaggtttttgtctttagtgttttggtctctctctttagccatcttttgagttcttcttcactgattgaagaagacgaatcgaagaatcgtatgaactatgaagcagagggaaagtgaagcgacagagggaagagagagagaagaaaaaatttggagaatttaacagtaatgaagaatgaagagtctcatttataatttttattttatgatacgtaattaaaaaccttttgtgttac

SEQ ID NO: 15610 - DNA, 1514 bp, Arabidopsis thaliana landsberg
tcgcaggaaaatgggtaagagaattgccttatgttgtttggagcttgagaacccaacctagccggaccctacatggaaacactcctttcttcatggtctatgggtcggaggcagtgctacctgctgatctcaagtttggggcgccaagattgatcttcgaaagcatagcagaagccgaagccaccaggctggaggatattgatgtacttgaggaagaacgactgaatgcagtaatccaatcagcacgataccagcagactctaaggcgctatcacgataaggctgtgcggcaaaggttcttttcagtaggggacctcgtcctccgccgaattctaacgggggagggacggcacaaattatcactcttatgggaagggccattcatagtagcagaggtcactcggcccggatcgtatcgcctcacccagatggatggcacagaagttgggaactcttggaacatagagcacctccgaaagttttacccctagctgtatttcaaaacaagccggggcaccatgtactctgtaataatggaaatatgtcatcaataaagagagatttcaaagatacttggctcatttatgattgactcgcattcttacttaactcggggtgacctctatgccctacaaacggagcaatcgacttaagtcggcaacgacctaaggcggtgcaacatgctcacgcttacttaactcggggtgaccactatgccctacaaacggagcaatcgacttaagtcggcaacgacttaaggcggtgcaacatgctcacgcttacttaactcggggtgaccactatgccctacaaacggagcaatcgacttaagtcggcaacgacttaaggcggtgcaacatgctcacgcttacttaactcggggtgacactatgccctacaaacggagcaatcgacttaagtcggcaatgacttaaggaggtgcaacatgctcacgcttacttaactcggggtgaccactatgccctacaaacggagcaatcgacttaagtcggcaacgacttaaggcggtgcaacatgctcacgcttacttaactcggggtgaccactatgccctacaaacggagcaatcgacttaagtcggcaacgacttaaggcggtgcaacatgctcatgcttacttaacttggggtgaccactatgccctacaaacggagcaatcgacttaagtcggcaacgacttaaggcaatgcaacatgctcacgcttactttacctagggtgaccactataccctactaacggagttatcggctaaaagtcattgacggcttaagccagtatagcatactcgcgcttatgcaattcaagggatgatttccatatcccacaaacaaacttcataatcatcgtgcagcgttaccacaaattcgcaactccgatacaataagaaagtgatgatgtcattcgaatgacaagccgataacctctaacaagtacttgatcatgctaactgcgcgctcagagcacgcgaactgtttctttatttccaatgtct

SEQ ID NO: 15611 - DNA, 524 bp, Arabidopsis thaliana landsberg
gggtccactttgtcttttacccaaatatccccactctcttcttttacttgcgcgtgaactttcaaaacggggcgggggtaaatttccgaaactacccttcactctgtttttttggtttcttcgttctcttaagattagttttctcatcacaaataataataaactcttttcttttgtttcatctctttcttcttctctgcgtctttgaggcaagaaaaaaagagaagatgaaagcacccaacatggagacgataacggagtctctagagaaatcgatgatgaattgttctctgaatgatcggagaagaagggtcgtcggagatgggtttgggagatcgtcgagcaacgaacacatgactccgatctcagatagaacattggagctcaattctcacttatctcttccttgtcactgggaacagtgtcttgatcttaaggtaaccttccacccgatgagattcgtccttcaagtccaattattcgttgttttctgctttctaggttaaactaatcactacagaaac

SEQ ID NO: 15612 - DNA, 502 bp, Arabidopsis thaliana landsberg
  unsure (1)..(502): unsure at all n locations
tcgggacctgactagatgtgtggagtattggtgtaatcagttacattcttctctgcgggagacgaccattctgggataagactgaagacggtatcttcaaggaggtttgtgtagtttccctgaagtaaaaattcatcagtaatcgtaaatctctaatcatgaagatgtgtttataaacataggttttgaagaacaaacctgatttcagaagaaaaccgtgttcttccattagcaacagcgccaaagattntgtcaagaagttgttagtaaaagacccgagagcgcgattaacagctgcacaagcactatgtaagcgttntgacaccattntaaatcattttggtcttaatctttctgatctttctgtaaggatagtgggatttcttggttgcagcacatccatgggttagagaaggaggagatgcatctgagattcccatagacatatctgttctgaacaacatgcgtcagtttgtgaaatttagccgccttaagcaattcg

SEQ ID NO: 15613 - DNA, 565 bp, Arabidopsis thaliana landsberg
tctagaacatattgaagcagcctcattgtataactgcttaccagaacttgacccttcctccaatatttgtcgaaactgttcaatttttccttgtttgaagtactccctcttcaccatagatgaaaccaaaatcagaattggaaaaaaaaacaatctttaagcaaatcagccacaaaagcaactaacttttgaagtgttaatcaaaacccatcagccattaactaagaaaaactcaacaaaactcgattccagatagaacctaattagagtggaaaagaacgaaccgcgatgatgagccagagatcgagaggagcttgttcggctttaagaatatcaagtatatcagaagcgtcacgagggagctgatcaagaacaaccctaacttcttcttctgaattctgaaccggtatgtacacactcgccattgcccggctaagtgaggattaccagaaaccctagaagaaattgcagtggcgaatttttcgaatagagagtatgtgtgtgtgaaaacgatgaagtgaatcgaacaatcgattacaaatctgtttcttttttgtttgtgacc

SEQ ID NO: 15614 - DNA, 154 bp, Arabidopsis thaliana landsberg
  unsure (1)..(154): unsure at all n locations
tttttttctcagttcttttaattacaggataacaccttctcttcttttttggttataacagaaccacgcgtctccatcaatcttttagctggcaaggagattttttcttaagctnctttcttctctggtttttttttttggaagaaaaaaaaaa

SEQ ID NO: 15615 - DNA, 2241 bp, Arabidopsis thaliana landsberg
aaaaagtattctataacaaaatatgaaagacttatctacaatagatcatattatcgaaaattgagtaaaaagtactaatgaataacaaatttatggtggtttagtagttgaaaatttcactagagttggagaacatgatatgtattgtctcattatgatttcaatctaggttgattactagaaatttaaagattgatatgagttttggttcgacattttcttgtatataattcaaaaaatactaaaacgtttacatttttatttattctttttcatgatgtattacaacactatgtacatggtacgtggtctaagagctggaccatgaagtcttctttccattgatatcttgcgttctgagaatctaaaacaaacaataaagctttatttttgaccctccaaaaatacttattgacgcattacatatgtttaatttagacttggtcaatttggtccctggattgttagattacatcattagaacactgattttaaaatagttgacctagcaaacaatcgacttgaattttcccaaatgattgttctaagtttctaataccattttttttatagtatcatattgccactaaatcacaatttttttttatcatttgtacattaaacaacaacaagaaaaagatattcgaggacgtgaagttcatgcaaatgtgtgtgtgtagtagtagatatgttcccatgattttcaatatataatttatcagtacatgcatgtagacacattaatatagatatcggaaattcaatttatactaaatttgagtaaataaatatcaaaacaaaggggatagatgatatattaattaattaatataaaggtgaggggatacaaagtttcaaaacttattatgatgaagaaaaaagtgaaaaaagatgtgtgcataagattcagagaaggtttctcccaagtctccgtctccatctaagtctggtctcagctttgacttcaaattctttcatataatttgaataatactgagggaaagatgtcactaatttattttgaacaagttaatagcaaaactgaagcgcaccatgcatagctattgaattagctcaatactacaaatcaacgagatcacgctattgaaagaattcggtagaagttattctttggtcaaatataggcagccatgaggcattgaatagtttttgctttacaattttactgtcgttttcagtttatcatttcctctctcacttttcgtcaatcaattttctttattacaaatccctagtaagattctaagaaagtacgtgcgcgttagtagaatccaggaatcattcctttccttcatttctccaaaaaaaaactttttttggcattctcatattttataatattctctctcttcctaaaaatttgatgttttaatttttttctgttccacaaaaattgatgatttttatttatattgttgaccaataaaaaaaagagatataattaatattattaaactaacaaaataataatattaaaatgtaatagttgtttttcttaatttgtgtaaaaatctcacaacatcaaatttgctggaacagagggagtaacagaaacccaaaaatatttatcgtttttttttttagtgttaaaactaaaagttgtatttttttttaatattgtgttttgctagtatttacgattatattttttctttgaatactattaattttagaatttaacatgtggtatattgttttgtattaatattggttaaattcatttcaccaagattctgttccataaaataaaacatcatttttcattttttccctttaataatatttcatcaatttaaaagtttctttttaatggttttcataatatatacattttcaagtattatagcctaaacccaaaaagttgtcctttttatattcataggttctctaaatgaaataagatattcaatattcaaagaccattcttaaattttttatattcatagattctcttattgaaataaaatattcaatattcaaagaacattacaatccttaatttgttgcatttattaccataactacgttttgcatttaataattaccaaaaatcataaaacattacaaataagtcaactcattcatgtagtcaacaatatggttattcaaatagctatagactatagttacgtctctcaaaggattctcaaaatggcttctctaatttttgcaactctcttgtcccttttgttactctcaaacgtgaacgcctatccgaaa

SEQ ID NO: 15616 - DNA, 610 bp, Arabidopsis thaliana landsberg
cgtcacgcagtagaccaaaatttggctagtaagttcttaagccccatgagaatcctttgcgcgaaattttgtttagctaagaactcgttatataggcgaggtttcagtgacctttaccttctttgcattttcggatccgaagtcgaaatcatcatgagcgaagttcacgaggggctatgtggaagtcattcgtcgggaagagctgtggatttcaagataaaaagattaggatattattggctaccatgattacagattgtgtgaagtttgcccaaaggtgtaagcgctgtcaacttcaggcacctttaatccatcaaccttcggaattgttttcttccatctccgccctgttcccgtttatgaggtggtcgatggatatcattggaacattgcatagatcataacgaggtgtgcagtaccttttcgttctgacggattacttctcaaagtagattgaagctgaagcatatgttaatatcaaggatttggcggtgaaaactttcatttggaagaatattatatgtcgtcatggcgtcccatacgagatagttattgacaatggaccacaattcatttcgcacaagtttgaagctttttgctcggagtgggg

SEQ ID NO: 15617 - DNA, 464 bp, Arabidopsis thaliana landsberg
ggggaccaaaagatgattgaaaatggccgggaaggaccagattttagttccggacctgacaaggagggaaaggggaaaagaacctaccatgattggtcctgattaaaagaaccccatggaattacctgaaaccaaaaaatccaaaaaggttttacggatggaaaggaaggaaaaaaaccaacaaaaagccaaccaaaaaaagaagctgcaccgcgaattactcaaaatttatcctcctcgacaaaacgatggattatcttcaaaaagtggtcaaattatcaacagcctgtgtgtctctgactttgaaaggaacaggacagagtatgcacctcaaccaaaacgacgaaaaaaaggacaggtcaaaatcctcgttgcttccattttttacttttgttcacttaaatgttattgctctataaccacgttgcttgctttcatagtttcatgtgtttacatccggatcg

SEQ ID NO: 15618 - DNA, 712 bp, Arabidopsis thaliana landsberg
  unsure (1)..(712): unsure at all n locations
cacagagtaaaaacacaaaaaccctaattacatgacgattcttatgtgatatattcgtgaaggaaggaaccttaaaaacgttagtggattttctatatacattattcacatatatccatcgtttatataaataaataaataggttaattgtttagtacaaaatcacgagagagagaaataaaaaaggcgtgagtctcctaactagctcctaataatgcgataaaccaaaaacatgccactttgcaataatttctccggcaatctcgtcgtcgccgttgctctcttctttgccggcgccctatatatatatattttttttttttttttgaaagaatgtaaaaatatattcacccaaaaaaacgattgttacaatgaatgcgacatgattttaaagaatctaaaagagttaagaacaattagaatgatttctagctatggatttgaaaccaaaactgcagcccgccttggagtcgtgtattcccagactttatagccgtgctgaatctgtttcgaatattcttgtcgatgatctttgcaagttgcgttaccgggatagcaagccccccatgtcgcctactattacgctctcgccataaactgtggnatcgttgcttggaaagtataacgaagagtgaagagatgtagatacggacgggatgtatccagcagatgtnggagtgataaggctccaactcggaatgcgtcgaccatg

SEQ ID NO: 15619 - DNA, 942 bp, Arabidopsis thaliana landsberg
cccggcctactcaccagctgcaccagcattaggttgcaacgagaaagagtcaaacccagtgatcgtacacaagaggtttcccaaattttcgaacatttcctacatacatgtggacaagatatcagttcattgttcaactttctaaatcaaacctcagatgaatcaagaaagtcactaacctgataaccttgtgcttgttcaacaggagcaaaagggtgaatgtcagtgaaacttggccatgtgactggcatcatttcagttgttgcatttagtttcatcgtacaagatcccaacggaatcatgctgtggcacagtgatagatcctttgactgtaacttgtggatgtacctaagcaactcatgctctgtgtggtacctaatcatattatcaaaatggaaaacaaaaatgagatactgccaatccacaagtaataagccactcaagattcaaagaacagaataatacatgttgaagattgggtgggtaagataaggactctctcttgttaggctagaaggaatggaattctgaacctcgggtgctagagattcagccgtaaatggaacctgaagcgaattgagatagtcaaatttcatgcaaggatcctagaaatgatatatcaataacaaaaagaggtatgaacaacacttacaggcttgccagaagcaaaaactttgaaaagtttatcgacatcatccaaggtggttgtttcgtcaaaggaagcagtaatctgaattaagtaatcatatccaaatattcaaatctgtatgatgctatgagagtaaaaaccttgaaaggccaaagcaaaggagactcacagtggttgagtccacaacacgcagattaatttcacttttggaagctgcatcagcaattgcatgtgcatccgaacacttaattttaacagtgtcaaagaaaggaagttctggacttcgcaacgca

SEQ ID NO: 15620 - DNA, 687 bp, Arabidopsis thaliana landsberg
  unsure (1)..(687): unsure at all n locations
tcttttgtcatcgcatgtacgactcatatctgtaactctttaacctcgaatctggtcacacagttgtaactggtttggtcacaatctggttacatgttttggctaatcataaacctaattaattacctgatttaaaattttagtaatcaagctccaaaaacaaaaattcaaacccaaaataacttagcattatcatcctaaatagacaaaaaattatcatcttaaatagacaaaagattatcatcctaaatagacaagattatcatcctacaataagtttataacataacaatatatgaaaaagttcatgagtttcagaaagcatttgacaaaggggatgaatttaaatcggtgcctgctggtatggtggctgaaggtgtggtgcttgctggtgtggctgcaggtgtggtgcttgttggtatggtgttggtggctgcaggtgtggtcacatgtggtgtagaagaggccagaaaagctgataattctggatctttatctttcatgtattgaacaagcttctccaagcctgagatccgcatctgagattgtcgatgctccatcgcccgtcttgcattctcagtgtcgagctcagatatcttgcggcgtaattgttcttaaagttccacaattgttgatgaagaagagcttgcanatctttctttcctttttcctttgccatgtgtctgc

SEQ ID NO: 15621 - DNA, 592 bp, Arabidopsis thaliana landsberg
atacactccttatcaagctgagatctctcaaggtcgtctcgaatcgctcctcaatttccagaccgtgatcacagatctcacgggtcttcctatgtccaatgcgtcgcttctggatgaaggcactgctgctgcggaggcaatggccatgtgtaacaacattcttaagggtaaaaagaagacctttgtcattgctagtaactgtcaccctcagactattgatgtttgtaagactagagctgatgggtttgatttgaaagttgtcacctctgatcttaaggatatagattacagctctggtgatgtttgtggggttcttgttcagtatcctggtactgaaggtgaagtcttggattatgctgagtttgttaagaatgctcatgctaatggtgttaaggttgtgatggctacggatttgctggctttgactgtgttgaaacctcctggagaatttggggcggatattgttgttggctctgctcaaaggtttaggtgctccgatgggttatggtggtcctcatgctgcgttcttggctacttcacaagagtataagagaatgatgcctgggaggaatattggcattagtgttgattc

SEQ ID NO: 15622 - DNA, 695 bp, Arabidopsis thaliana landsberg
aggttgacaagtcgtatcgcagccttaaatcgcttcatcgcccgctcgatggatatatgtcttcccttctacaaacttctacgtggcaacaaggattttcatttggacgataagtgtgaatccgctttccaagagctcaaatcctacctcatgagtggggcgatcttagccaaacccgaagtcggagaaaccctatatctctaagtctcgctgtcaagtttggcggtgagtggggtattggtgagatatgaccgtgggaatgagaaacctatcttttacaccagtaaggccctgaatgacgccgagactagatatccgaccttggaaaagctaacattggtagtaataacggccgctcgaaagctttggccttaacttcaagtggcatccaaaagtgggtttcaaccgatcaaccacttcgaacagtacttcacagtccgaatcaatccaggcgaatcacgatatgggccatcgagctaagcgagtacgccgtggagtaccgatatcgctctaagcttaagtcgcagggtcttaagagataatatgaccgagctatatccggatgtgatcgacgaggtcctagacgagaattggatactttacgcagatggctaatcatcattacaaggtttcgatctcggaattttactccaatcacccaaccggggagatcctagaacagtcacttcgagtca

SEQ ID NO: 15623 - DNA, 996 bp, Arabidopsis thaliana landsberg
agtaccttttacaccagacatgaatgttctaggttccaagtgggtttttagaatcaaactcctagcagacggatctctagacaagtataaggcaagactagtagctcaaggcttcaaccaagaagagggaattgattaccttgagacttacagccctgtggtcagatcagtccgagcagtcttgcatcttgcaacaatcatgaattgggaactgaagcaaatggacgtaaagaacgcctttcttcatggagatcttaccgaaactgtgtatatgaaacaaccagctggttttatcaacaaggccttaccaaatcatgtgtgcttgctacacaagtctctctacggactaaaacagtctccacgagcttagtttgatgaattcagtaacttcttactctcttttggttttgtgtgcaatttctcatatccatctctctttgtctgcgtaaagaactcggatgttatcatgttgcttctctacgttgatgatatggtcatcactggagacagctcaaagctactgtcaaatctcctcaacgaactcaacaaacaattcaagatgaaagatctaggcaaactcaactattttttgggaattcaggctcaatttcatcaaaagggtctcttcttatctgaaccaaaatatgctgaagatctcctcatcacagctggcatgaaagactgtgctccagtggcaacaccattaccaattcagccagacaatgctcctcatcagtcagaactctttgataatccaacatatttttgcagtctcgcgggaaaattgcagtatctgacactcataaggccagacattcaattctctgtgaaatatgtctgtcagaagatgcacgctcctacgctatcagatttccacctgctgaaacgcattttaaaatatatcaaaggtaccactacaatgggaatttctttcaacaaaaacacagactgtaaattgagggcttacagtgatagtgatcatgctggatgtcatgc

SEQ ID NO: 15624 - DNA, 365 bp, Arabidopsis thaliana landsberg
taccattaattctaaaaacaattgttaggatttttaattaaaatctctatatactaatcatttctaagagattgtcaccactaattgtatagtagtgaaagttttcatctttagaagtggtgttatttcctagttgtaaaagtacaaaaagacacactagacttcttcaaagtcaaaaggtgtgaacagatcaaatcaaataaaattcccttttaactaaaaaaaatattatcaataaacaataagcaagtgctatgatccacagttacgcaatgactcttacacctccgtggatttcacaaaccagacgttgactctctctatcgaccttatatttttcacaccaaaacccttttcttctccac

SEQ ID NO: 15625 - DNA, 259 bp, Arabidopsis thaliana landsberg
atattgatttgatatgttaaccaaattaatttgatataaaatttaacattatccattagaataacatgttcataatcaaaatcgggattattatgatgaaataggtagtcaattgtatagccaaatataatgtgtaagattaaaattttatttttagcaactttacaatgcttttaaaaaactttacaaggttttttaagagattttaaaggcttcttaaaaaatcatttaagaatatgcggtgaaaaaattaattata

SEQ ID NO: 15626 - DNA, 1231 bp, Arabidopsis thaliana landsberg
  unsure (1)..(1231): unsure at all n locations
caatattataaaaataaaagataagaaagcaagaaaaattggttttagattcagatgattaagacggtttagggaaattctcaggaaatatttgaatagtagatctagcagtaaattaggattattatcgaatagaactcaaatgactaatatagagtaaccggtgatgtgtcgtgctactcattatgcttaatagtattaatcccaactctcttgtaactatctagaactaagcaagcattataatcgggtttgataagttcacctaagtatctaaatcgacgctagtccgcatctaaatactaggctcatctaagatagttcaagtaatagatacctatagtgggtatacctattatcctaaaatcaagttctagttaattactctagaactagcattaagaataatcaaagatgaataattctaaatatattatcctaacatgattttcgatctacgaattcatctaaatacctaattaagaatccctaaacccaacaagagaattactcagacatgattatcaaagaacaaaacatgattaaagtagaaatcaatgatgaaattaagaagagattagagttagaaagaacttctctagaaggatctccacatggatttgctcccaagtatagaatagataataaaactatgtctaaacaatgacctttaaaactatatatatatatatatatatatatatatcctaaaacgtgcaagaacttcttcgaaaataaggaaaacttctaggccgaatatgcaaatcttcataacttcaataagttgcgtttttgaattggtgacaatcgacacctacgcggattttggttagcgaactgcttctgaagcttaagctgtctgtttgctccagaatgctccataatctccaaatgcatcccaaacatgtaaagaccggaaaaagattataaagactctacgaataacaaaaagactcttaaaactatacctagataatagctaaaaacagtgaaaatcgaggtatatcaactctcctagacttagcttttgcttgccctcaagcaaaacacaaaagnnnnnnnnnnnnnnnnnntttgaaaacgcaggaactcccaacattctctagtctattgccgtggttattctaaccaaatccatatgcctaggaagtgtaatcaaatcctaaacaacatgtacatctccgcaagcttacacaacattcttgattccataccttagttccttaactat

SEQ ID NO: 15627 - DNA, 858 bp, Arabidopsis thaliana landsberg
ctgaggcggcacatcgcctgccagtggagtgacagggctcattaaatgctgaggcagcacatcacctaccagtttggtaggcggcgcgccttatccgcaataaatgtagaggacgcgtgacccagaggccttacgtcaggctccgcccgctggcttacgtcatgggcagtgggccacgtggtagcatcgggtctccgcctgagcgagagcagaagcgtacgtggtatggtccggacacgtgtgagctccgaaccctcgcctggtcttgatcaaggtccgggtactctttatcccagaatcctgggaccctgttgtgagtggtccagaccccacacagaggggtccgggacccatcccaggggcctggttcgtgcctgtggaggtcctggaccttacccggaggtccggtccgtagataaaggggtccgacactttcccatgggggtccggacccactgttgatatcctggagtataccgtcttctctggccacgtggcgacccgagagccgtccacgtggtggggtcaggtgttgttcatcacgcgactagagatagccgcgtgggcaccgtgtcttcatgttgtagtaaggggtacccctgtttcaaggtaccgacagaacgatgtctcaacatacacaaagtttatcacctctgcacacttgagaatggttggttgggagagtatatatagagccccaaccttgaaagattcattgaaaggaagtagacttttctatgtcacaccgaactgcctcggtgcaccatctatgtacaccagaccgggttcgacgtccttctacattagctagtcgttattgttctggtatctttctctgctacacaccaaagtctgatg

SEQ ID NO: 15628 - DNA, 2293 bp, Arabidopsis thaliana landsberg
aatgtgatgaccgcatcaagacctctggagttacttcatatggacctcttcggacccgtcgcctacctaagcttaggaggaagtaagtatggtcttattatagttgatgatttttcccgcttcacttgggtattctttttgcaggataaatctgaaacccaagggaccctcaagcgcttcctaagaagagctcaaaatgagtttgagctcaaggtgaagaagataaaaaacgacaatgggtccgagttcaagaaccttcaagtggaggagtaccttgaggaggaaggaatcaagcacgcgttctccgctccctacacaccacaacaaaatggtatggtagagaggaagaacaggacgctcatagacatggcgaggacaatgcttggagaattcaagacgcccgagcggttttggtcggaagccgtgaacacgcgttgccacgccataaaccgagtgtaccttcatcgcctcctcaagaagacttcatatgagctcctaaccggtaacaaactcaatgtatcttactttcgtgtattagggagcaaatgttacatcttggtgaagaaaggtagacattctaaatttgctcccaaggtagtagaagggtttttactagggtatgactcaaatacaaaggcgtatagagtcttcaacaaactcatcgggtttggttgaagctctctagcaatgttgtatttgatgagactacatggctctccaatagagcaagttgatcttgatgacatagatgaagatgatgttccaacgactgcagtgcacacgatggtgattggtgatgtgcgaccacaggaacaacaggagcaagatcagccatcttcctccacaatggtgcatctccaacgcaagacggtgaacaggtacgtcaagaagagggacatgatcaaggggagcacaagaagaacacgttatggaggaagaagcaccactggcccctccaactcaagtccgggcgacaatccaaagaaatcaccccgttgatcagatactgggtgacataagccagggagtaactactcgctcaagattagctaacttttgtgagcattactcgttgtcttttctattgagcctttcagggtagaagaggccttgcaggatccggattgggtgttggctatgtaggaagagctcaacaatttcaagcgaaatgaagtttggaccctggtgccacgtccaaagcaaaatgctgtgggaaccaagtgggtgttctgcaacaaacaagacgagcacagggtggtgacaaggaataaggctcgacttatggcaaaaggttatgcccaagtcgcaggtttggatttcgaggagacttttgctcctgtggctaggctagagtctattagaatattattagcctatgccgctcaccactctttcaggttgtttcaaatggatgtgaagagcgctttcctcaacgggccaatcaaggaggaggtttacgtggaacaaccccctggctttgaggatgacaggtaccccgaccacatttttaagctctctaaggcgctctatggacttaagcaagccccaagagcatggtatgaatgccttagagatttcttaattgctaatgctttcaaggttgggaaagccgatcccactcttttcactaagacttgtaatggtgacctttttgtgtgccaaatttatgtcgatgacataatatttggttctactattcaaaagtcttgtgaggagtttagcagggtgatgactcaaaaatttgaaatgtcaatgatgggcgagttgaactacttccttgggttacaagtgaagcaactcaaggacggcaccttcatcttccaaacgaagtacacacaagatcttgctcaagcggttcgggatgaaggacgccaagcctgcaaagacaccaatgggaactgacggacatgtcgacctcaacaaaggaggtaagtccgttgatcaaaaggcataccggtctatgataggttctttgctttatttatgtgctagtagaccggatattatgcttagcgtatgcatgtgtgctagatatcaatccgacccaagggagtgtcacgttgtggccgttaagcggattcttagatatttagtacgtacgccttgcttcgggatctagtatccaaaggggtctacctttgacttaattggatattcagactccgattatgccgggtgcaaggttgataggaagagtacatcaaggacgtgccaattcctaggaaggtccctggtgtcttggagttcaaagaaacaaacttctgttgccctatccaccgctgaggccgagtat

SEQ ID NO: 15629 - DNA, 1205 bp, Arabidopsis thaliana landsberg
  unsure (1)..(1205): unsure at all n locations
catatgcattctttcctaaatgaaccactctagactcgatcctaaatgtaatgcaactatatgaacactctttttttgtgaaatcattttctgaaatttttcaattttttttttcttttggtttttctatgccttagatgaatgcagactcaaaaatatacacaatgcaacacacacttcctgagccctcccccaaacttaaatcacacagtccactgtgtgaataaacttggaagagagtactcaggacaaatctaatcacagaaacaaaataaagaacaaatcacaacaaatgatataatacaatggtgaagtgaggcgcttacctcagccgaagaatgaacggagttggtcgtcaatggctgcctgtgattgatcccaggccatagatgagccgccctgttctgtatcagctccagcaggtgggtactcgacctcatcagctctatggcggccagcanccgcctgagtatactagacctcccttcttctgctgcggccacgcccgcggtcgagtgacctcctggcgtggataagctaaaacatggtctagtatttttcattgctctgtggtcgagtatacttctgtactctcagagccagaatctacttcactcagctctttatacttttctcctgaagacactaaccaaatgcatcaaaaacaacaaggaaaaataaagatatgtacaaagatagacatgggatttcctcccaagtgagcctcttttatgtctctaagcttgacttcccatactcattaggctcagggtggattgcagagaggaaatgaggtctcctctccttcttgagtagagtgatcatcatactcattaggatttcttgacaagtctgcaattgggtactcagtggccatgtcctcacagtaagcttctttttttatcaagatagtcttctcctctataccattctgatgtgaattcacatccttctttgctgaccagaatagtggctccattgttaggggcgtccttgatgttgagtggtacttggttgacttttccattgagctccttgattttatccttcagctctttcacaatatgtgttggctcttgtatggctttgcctaccatttagatctcccttgagttctaacaatcatctgacgtctgagtgtttgcttgagttattggtcgagcagagcttcaggacaagttggaggctctttgagttgttggtgg

SEQ ID NO: 15630 - DNA, 1221 bp, Arabidopsis thaliana landsberg
tttttattcagatcatatagataaaaaaatggccgggtttttgttcctaagaggaggtctcctattcctaaaagtcactttaggcaccggatttcaaagtgtgaaatccacatttgtctttggaaagaaaaggtaagaataatcagagtagagcggaaatagacgagaaaagattaagatatgtttagaaaagaatcagagtagcagaggtaagtaagtattggttgtccaattctatctaggtttcgtcctacagtcaacattcctctgataccacttctgtaacacccgggttttaggggtccaaagcccgggcgtaaacataatcaccaggtgtgctgggaccaagtctcacacatatgatgaatcatggcacatgatcgaatgtcacatctttactatataataggagttctgtacaaaataaataaataattacattatacggagacaacggtccagcaaaccaaagttgactgggaaacgacgacctagacctctcacgaacacatcgcagcatcctccacgcgcctcatcctgtggtacctgctcttgacctggggggtgtgagacagcaagagtgagctcacatacgttcatcgctcaacaagttgtggggaataatgtgcatgaactcgccaaaggtgggagctcacgtgaagtgtaaggcttaccaaagaggatggttagagctgagcattgcttttaaagttagtcaaaattttattagcaattactaagtataagtaaataccaacccaattaagtagtagaacaaaagtaataaataatcccatgcaaatgcatatgacaaattgaatttaggttccataaattaatcatgtgagggtccgagctgctcatgaccgtgagcacgactagtataccagttttacactctgcagatgttgcacatctttacccacaagtcatgttacccatctaccaaggggtcataaatcccatacacctctatcgaggaggcgaggcagggtaacactacgaggcctttacaaagttccactagcttcagaaaacccgctacagtttataggaagctccagtgcaggaatccctcgcctgaccaccatcgcagcaaaatcaacccaaggacctccctacactgaccactcccctactgcccttgctcctttcgggtaaggtagtcatccactagctttcctagttaatcagcgaagggcatcccattaaacccttgtg

SEQ ID NO: 15631 - DNA, 654 bp, Arabidopsis thaliana landsberg
ctttaatataaaataaagttgttgtaactacttctgcatactcgtacctccgatgtgttgtaatatctgtgtgacggttgaaacgctcttgggcaaggtaaagaattcagatatcgaacttgtcaagtgatcaggtggacctgcagggttgtctgaggtccgatggacaaggacaactgtaggtgggcctaatgacttgggaggttctgtcacagctggtatcggagcgacccatctctgcagattttatgaggtatcttcaaaagaattttctaagacttatctagaaaatttcttcccttattacctaagtatctctgaagcatgtattttagggaccagataggaagagtgcaatgtatagaagattgaatcaactaaggttgattttgtaattacgcatgcatcatgctaaaaactatgctaataagtttttccccttaagaaatgccgccgcgcacatgaaagaccgcgcgcaagtcaaccgggccaatcggtgtgcccgtcatcatcttgccccacgtcatgaagatagcagcagcgggacgaatgatccaattggagatttggaagctcaagtggatcggcttcgaacagaactccgatgcaggaacaatctatgggttgcggatggtgaaaggataaatgaactaa

SEQ ID NO: 15632 - DNA, 1288 bp, Arabidopsis thaliana landsberg
tataggtggatatatccttttgagaggtttttcaaaaagttgaaaggaaaagctaaatttaaaagatatgcggtcggatcattggttgagtcatatatcaatgacgagatttcctatttctcagagcattactttgccgataatatacaaacaaaatcaaggtaactaatagtaattaattaaacatctgcaccaagtgatatgtctataatttgcatgttttcagtgatcattcatcatcattttgagtctagtttcatatcattcatcactgttttatatcatttctcatcattcttgcacactttgcatgattaggatagctttgtatacatattgcattcctgagttgttttcaggtgatttggagttgttggcgagcaaagtggaagaagcgagccggaatcagaggacatactcgacttccaggccatgtacatcgagcaccatactcgaccccctggtcgagtaactttggagccattcttcccatctactcgaccccgtggtcgagtaacctcagctcaggccactcgatgacgccactcgacccccaggtcgagtatcacttcgccatccacctgaccacactcgaccgtccactctaccatattactcgacccccaggtcgagtatcatcactcaccaccagtaccatcactcgaccaagcactcgatcacatctttggagtctactcaaatccacactcaaccagacaagctgagcacaaggaagagaagagaagaagaagaagtgtttggaagcagcctggagctccatcggatcacgacgcccatctcggcccattctcactttatgggccgggcgattaggttattggcccgtctactatcattttatttcgttttgtataaatagatgttttagggttttgtcctgagacatcgagtcgaaattgagtctttgcttcagtttaattttcttttttactctagctgcgccgctttttcttctacaacctgtagttcgagatttttccaagttattcagagtccgcatttgatttcacctttcatctactttttatctctttacttatgcaatattatcatttacctgcatttatgtctttgaggcatgttgtctgagtagtgacttagaattcttaaggatgggatagagtagttgtggaatccgtagtctatagaatggttaagttttagaattgattgaatcccttcaggactagttatgtttactacttatttctttcttaccaactggaattcgatccaaaccattcctgcacccaaaaggtgttcgatg

SEQ ID NO: 15633 - DNA, 1012 bp, Arabidopsis thaliana landsberg
gagtgcgtgtgtagcacggtgcaggctttcgaggaggccgaggctgtgtcacagagcgtgcgggacttgctgttacaggtgcaactgtgtgcctccgggtacgtacggaaactacgacaagtgccagtgctacgctagcctcaccacccacggtggacgccgcaagtgcccataagaagaaacaaagctcttaattgctgcggataatgggacgatgtcgttttgttagtatttactttggcgtatatatgtggatcgaataataaacgagaacgtacgttgtcgttgtgagtgtgagtactgtattattaatggttctatttgttgtaacttgcaagttttcttgttttgaatttgtttttttcatatttgtatatcgattcgtgcattattgtattatttcaatttgtaataagattatgttacctttgagtggttgtttatcatacttttgtttttttctatggtaagaggttttggaaaagtatcgagaatgatatataaagtaattttgatatcgacgcaagatgataactactagactagctgagtataagaatattgatgtatatatttgcggacaattttgaatttattataccattatttaatcacgaccatataaaaaataattcttgtttgcgttataatttgtgttaatacgatagagtagacaaatgaagaccgagaacataaataatcatgatcattacggatagaattttggtataagatatttgttaacatcgatatttatttgacagccatatacctcattccaaaatttggtccacacatcgaacctattacctatgaatagcatatagcttatataggttcgtgtctaaatgaaaataaaacaaaaaaatgacttagcgtatatgaattgatgatagtaaagtttccttaaatctagcaagaggaagtaaactgatttggtaaatcccttgtgaaaactgaaaaattcgttttgttaaaatcatcgttgattcattttggtatttgtcaaaaa

SEQ ID NO: 15634 - DNA, 538 bp, Arabidopsis thaliana landsberg
tgaagatttgtattggagattaaagagcagaaacaattggaagaattttggagacagaattacaaaatatttctattctgcaacaaaatcgaggttagccagaaacagaattctatccactgaagatgatgcagggcttttccatcatggtgactctaagattggaaagatagcagaggagtatttcaacaatctgtttacgtcaacaagagagaatcatatcaattaccagtcaatttttgagggttttcagaggcgcgtctcagatagcacaaacaatgaactggtaagagagattacagatgaagagattacaatagcagcttttgacataggagaggataaggcaccaggacctgacggactcacaagagctttttatcaacaattttggccacatattaaggaagcagtcttcaaagaagttcgtgcttttttcagcacaggggaactagaagcaggaacaaatcacactaacatttgtctcattcaaaaccggcggtccgcgactatgagtgattttcccccatcgcgttat

SEQ ID NO: 15635 - DNA, 522 bp, Arabidopsis thaliana landsberg
gagccaacgccggggctcctgctcgtgctggtgatctgtcggccgcggtgaccgcggctcgaaacactctacctgtttccagcgcatctgcctcagcatctcatccctcgcttcctgaggtcaacgtcgggacctcagctacagcatgtcaaccggataacaatcaggtcgctcaggtatctgggctatctgcagttcttcgttctgatggtgcaccgtcctctccgaagagggctcggacccagtcggaggtgaatccgacggctgagttggtcgtgagagaccagagggtcgcctctcgtagagaggagaggatggaacctgcggctgctactccggaggcagctgcgtctgcggataggtgatcctcgggcaggtcgcatggcggaggacgaggctccagaggtgggggccagtctttaaactggtctcaggaagtgaggcagacgtccaactccggtggaggatccgcgggaagcaggcctttccactggtcttacactcacgaccgtgatcacacga

SEQ ID NO: 15636 - DNA, 814 bp, Arabidopsis thaliana landsberg
tgttgaacaggtacttagtggaaagctgacagggttcaacacaagtgaacaaatgtgatggtccaagaactggattatggatacatgatggacatcacaagtaagatggacattgcaaaagtgatactcgggtgagtagctcggagacaactgatcaagccaaggactgaggcaagaagagcttcgaggtaccaagtgcacgggagaaggtcaaggagactgaggaacccaaagccaagggtgaagaagaaggcttgcaaagtcaagggtgatcgagttgagaacagctacgacacatcaaggatcactacataaggacgtgacttacaaccaatgaggtaacatctacaattatgtggtgtaagtcataaggctcaagatcaagctctaagaaggagatcaaggtcactagaaggagaacaagtgtcaaaatcagaactggaagcagcccaaaagagctaagtgcaccttgacctttagtttgggttgttcctatgtttggagatattctatgtgacctttgcaggatgttggatctcagaaatgtcaatctagatcaagttatgctgacttgaggatttatgagtccaacatcaatctcaagcatgccaaatgctaaagaagtgaaaatcaaagagaatgtatgtttctagacttagtacattggtttttctgtactaatatatttgtctaagtgttagaaacagagaagagaagaaaacgaaaacgaaacagcaaaacgacttggcaagatgtacgaacacatcgactactgactacacgggggatcctctcagagtcgacctgcaacatg

SEQ ID NO: 15637 - DNA, 764 bp, Arabidopsis thaliana landsberg
taagcaagaagatttatattgccaagattattcagttatctttctgcgattatgtgtatctggttcattgagttcttcttgatggcattgactcaaattagagtctgagccgagaattttactagcgaacctcttatttggatcagggactacgttggtactcgatgcggcttaagattgatgaagacggagatgttgcagatgagttcttagaagaccaaaactgcaagactttaccaagaaagtgcaaaacaaaagctgcaaaagtgagaggtttagtgatatcttctgatgggaaacttcagccattaatgcattgaacaatgaaaaccaaggagaaagatttgctgaatagtgtgtgattgaatcagagaaaggttagaacttgtgtttcattaatttcgatatcaatccattagattcttgagaacttataatgttatttaactgtgaatttagtttctgaaaatagacagtgattctctttgggattatctaaacacatttgtgcaattgttggaattgtgtatttctactactactaccaagttctctgttttgcacacatatgaatccttttcttatacaagacctccaattttcgctcgatatgatgtttttagattcttgttataaattgaatagcaaggaatgattattaatatatgattcatattgcatctgaatctaagcagtttaaagaagtaaataatatttgaaaatcgtaactggttatgaaacttataaagattttggctatattg

SEQ ID NO: 15638 - DNA, 469 bp, Arabidopsis thaliana landsberg
gtaaatctaagtttgatgagatagcaagatttttaacatatatttatctttcttaccggagatgccctatagttactcacaaccttccacaaccgaagctagttaggagagtgaaggagcgaatgctgatgcgaattgggagatcccgtgaaatgttactttggtaagcttgtaacacttgaggtgtgccaaactggttacaatcaaggccaaaaagtgtacaaatgcccaatgaacgtaagtttttgtgttacaatttgtgcaacaacaaggtacaattgcctcgagacaattgtacaatttgtataatttccagccaacaataacaactaaaactttattgatacactcttaaaccataacattgtaattctgaatttgaaaccatttcacacaagaagttcaacatcaaaagtaaacacctacaatgttcaacatcaaaagcaaacacctaatctcaatacacaaa

SEQ ID NO: 15639 - DNA, 991 bp, Arabidopsis thaliana landsberg
  unsure (1)..(991): unsure at all n locations
tcggatttctgaacaacacgcgaggagtcgcaattgagttggaaactaccctagagcgggaaatcaaagaagcacagaagaatgatgagaagatcaatgagatccggcgattgattctagatggcagaggcaaagattttcgggaagatgcagaaggtgtgatatggttcaaagaccgcttatgcgttcccaatgtccagtctattcgggggttgatcctcaaggaagctcatgagacagcctattcgattcaccctggcagtgagaagatgtatcaggatctggagaagaaattctggtggtacggaatgaagagagaaatcgcagagcatgtggctatgtgtgatagttgtcgacggatcaaggcaaagcaccagagacctgctggattgttgcaaccgttgcaaattcctcagtggaaatgggatgaaatcggtatggatttcatagtcggattgcctcgcactcgagccggctacgattccatttgggtagtagtggaccgcttgaccaagtcagcccacttcatacctgtcaagaccaactacagcagtgcagtattggcagagttgtatatgtctcagatcgtttgtcttcatggtgtgccaaagaagatagtgtcagacagaggaatgcagttcacctctcatttctggcnnnnnnnnnnnnnnnnnnnnnnnnnnnnnnnnnnnnnnnnnnnnnnnnnnnnnccgcagacagatggtcagaccgaaagaaccaaccaaattcttgaagacatgttgagagcctgtgcgttgcaagatcagtccggatgggacaagagattgccttatacagagttttcctataacaacagtcatctggccagtttgaagatgtcacatttcaggcgctttatggaaggagttgtaggactccattgcaatgggatcagcttggataaaacaagtattcaggcagcattctgctggaactgaagagacatccagatggtcgagaaatttgagat

SEQ ID NO: 15640 - DNA, 646 bp, Arabidopsis thaliana landsberg
ttattttcaatagtgtaaatgctaacagcaccacagtggtcgtgtatcgatttgctccaaaacttcctgtatctataaagttgctcacaaaatcatacacctatgcatcaagaacgtaccacatggacgaaatgccataaattataaacttttgacgcttacattggaaacaagacagaaaacaatactattattcaactcacaaaaccttaaactagatgtctgaaagctaaaacatgttgcattgatcagtgacaagagactatttcatttagtaatgataaattgataaactatgcttattctttagtctttacaaccaagttgtctgacttttaaattgttaattaaccatcccaaacattatcgaaacccggaaagataaaaacattataaaaaaatgctctcatagtttcatgatactaaattcaactccctcgataatattttttcccgtcatattaataaacatatgatatatatttaaaaatcaacatcatcatcatctaagaatctgtgcatttccaagcatctggtgatgatcagaccgcataatgccacacccttttcctccatatcctccaccaacagtacccgcaagtgctcctccgccaccgccgtcattcctccgccgttaaccaccgca

SEQ ID NO: 15641 - DNA, 1470 bp, Arabidopsis thaliana landsberg
cattcattttaatccaacccgtaacagaaatcagtgtaaatcaaaactcattatgaaactctcaaaccaatagaataaaaaacaaagaacaattttaagaattgtagaaatcgagagagagacaaatgagagagattaacaacagtccaatcgaattgggctttttgtttctttctttattgttcgttgattgattttttagtgggctggcccctaagttattttaaattagggtcatttcatttcattgaattgaatggttgcacacgccacacacaatgtttggcacttacagacttacagtcacatctgtacctaggaaaacggcaaattcatacactaattatgctacatggttagtccggacaccagctatattgttgtgtacaatttacagtttataaacatatatccaataatcctaaattcacgcacaactaataattttggctaagactttgattgtagtggaatggtgttagtcaaactgttgtttgttactttttttttttaatgtaaaatgttaccttacctaccactaaaatatttgattaacacaatcgaattagattgaaccatgcatgacccaaacgcatatatggttccgctgtcgagacgatcttaaatcattggatttcgcttgtttaaaaatttaaaagaatttttttaatatacttgtaattaatattatgtatttctatattacactctaccaataaattattttaataactgtacttagtaaaaaggtaagctgcaattaagtaattcttatgatgtaagggagataatactaatctaaactcacaaatgagctagaacaatttcattttttttttttggtcagtttttccctaaagatgtaaatatttactcaaactggtaaaaaaaaacatagctagtgaaaatcgcaaactgaaagttatgaaatgtacaattaaatcaaacaaaacaaaaacaatgttcaaaagaaaaagtccttccagcctaaaaagtcttcaaagttcaacaacccaagaaccactaaagttagcaatgaccactttgagtcttgccactcccacttgccgacgacctgaccagagcctctgcagccaccgcaaccttaaccgttctccttccggcctgcgaagccacgtcatcacttctcccacaaaccgtcgaccctggacccatcacaatcattcccttccataaacttctcttgctcacctttttcatgaagccaccattataactcttgtcattatttgttttacttctagtagtagtattactgtcactaccatttctcttcttcaacaaaccatgatcatcaaaaccataatcatcattacgattatgattatgatgatcatcgccgttgtgcttcaaaacactacttaaactcgtggagaaactagaatcatcaatgttaagcctcttggagatgttcttggtttcgtaagtatcaagaagacgagagtaata

SEQ ID NO: 15642 - DNA, 2088 bp, Arabidopsis thaliana landsberg
  unsure (1)..(2088): unsure at all n locations
gagatttataagatatttcagttattattaaatcatatttatatgtgcaacattttaagtttatttattttcttacctctataatattaattaatattggtgaaaatagttttaaaacaaaactggacgcggaaaccctcttggcccaaaggttaatcaagagttaataaatcctttacaccaaagaagtctaaagttcgaatccaagattatgcgatttactaacaaatttgcagattaatagagtttgatattaaaaaaatatattcaaatattttgattaactgatgtacatctcaacgacaactcaactccgtgaagacatcgtcgctcaatgacattgcaccactttcagattgggatcgactccaagtgaaagcaggagctttaggtaaaggaatgatgatagtctcactgccaagccaaattattacagagctcatggttggtctctttgttggattctcttgaacacacaacaaaccaatctgaatcaactttatgatcaattttcttggattctcgtttaagtaaggatcgattatactctcaagctctccttctatccatctcttccatgccttatatcaaaagaaaacattctttataagtcaagtgatataaatttcgtgtaaacaattatttttttttctttagtatgtttaaaataataacaaattattatgcaaaataagcaactatatacccacttttttgcataatgaattatttacttgtaattttatgcaaaaatgcaaatcttgcgtttttgcgttttctaatacaattatgcaaactttcttgattgacaaatttcttacataatcgctttagaaaatgccattatgccattatgcgtattaccaatcaaagcataaaagtgagaagataaataaaatgtgatcaagattcaagaagcttacaaaagctggaagtccttctgtttcaaagttcttatttttttcaccacttatcatctccaaaagcataacaccgaagctataaacgtcagatttagctgagatttgtccatgattcaagtactcaggagccatatatccactgcatatatgcaaaccaatagcattaattcatggactctgttttcaaaacagagcatttgaaatgtgtcatcaaatttgattgatatatttcttaccgggttccagctattctttttgtttcagctcgagtctcgtcggagtcgaacaacctcgcagtcccgaaatccgcaactttagggttcatctcagcgtctaaaagtatgttgcttgccttcaagtctctgtgaataatcttcagctgagaatcttcatggagatagagaagacctcgagcaatgccttctataattctgaacctcacctcccatgtaagaagagaacgcttatcttcatctgcagagttcaaagaaacattttagtttgctaaaagttctacaactatccaatttagcagctgtctttcgaaggctcaccaaagataaagtgatcaagacttgagttggggacaaactcgtagacaagaatctcttcatctccctcattacagaacccaagaagcttaacaagattcttatgttggagtcttgtcaagagtgaaacctcattcttaaactccatatctccttgtcctgaaccttttgttagtctcttgaccgctacctcttgcccgtttgggaatgtcccctgaaacccattctcaagatatctatttactcataaaagaccaatgttgatcaagaactcatcattagggaaaaaatttattattaccttataaaccgtaccaaatccaccttggccaagcgtattttcagaggagaagtcatcagttgccattacgatcataccaagatcaaaccgtaacnnnnnnnnnnnnnnnnnnnnnnnnnnnnnnnnnntaccaactaaaaaaacaaaaaatccataagccttactctgtacatcataagcttgattgaagcaagctacacttaccattatttaattttcccctccgtgcatagactgtgataaagccaataaacaccaagagattaatgaaggtaaacaccacaactattgcgataattccgccatacccaat

SEQ ID NO: 15643 - DNA, 623 bp, Arabidopsis thaliana landsberg
aacaaacgaatacacaagcctacaactgcaattgcaataaactattgtatacggataggttgttttggtcgccactttgtcaaattataattaggctgattaaattagcaaacatattactggtttgtcgaaattcaaaactattcacaagagtttcattgattggaatttttctgtgaagatacatttgatgaaaaatataactgcaaccaaaacactcgattaatagacaaagataagtgaagactcgttgtgggttaggtcaaattgttatctctaggtcaaaattctattgattattgttcttattcttttcatcaccatttatacttgaccagatatttcaaaacatgtgatataatctttgaggagcctgtttccctaaacatgctgtaatatttaggttccaatctgcgagattgcgaatacaaaaactatctatatgtgagaaatttttcattattagaagtatattcatatattggattttcaaatatgtgatataatcttcacgaacaactgtgtcattgtttgtgttgacgaaattatgtagcggaataatatcaaaacaggggttcaaggatcaatggttcaagaactctggttgatgctctgaattcttt

SEQ ID NO: 15644 - DNA, 878 bp, Arabidopsis thaliana landsberg
aaattgtattcatatgctaatactcacaacacgaaagggaaagtaagaaaaaattgaaaacaacacttagtcttgctttaagtaggcttcctgatatttcttcctgcacgaatcacttcatccactaatagcacctgcgaagcactcaccggcctgcaatacaataccaaacaaccgttttaacaacctgaactcaaccggaactgaattaaaagactccattatacaaatttccatttggttctgcacataccctgaattgataagtaggcgtctcaccgactaattgtcgaaaatgccggctagctgagggtcgacgggttctccatcctgtaggtctagtcccacgatgtttcctttgacatgctcactctgtatatacatcgaaactcagtgagataaacacaaacataattttacttggagcataatcgatagtggcagaagaggaaaatacaagaataataccgttagagaaatgataacgtcttgagtgtcaagcccagcattttcagcaagcgtcttaggcactacgagaagggcattagcaaaagcttcaacaccgagttgagcgcgctgcaatttgcccacaatttacattagcaaccggaaaaaaacaagaattggtattggagcaaaggaatattgctttctactcaccccttgaacggctttcttgacttcattgattaagtgtcgtcttgctgcaacttcaaaagctccagctccctacagaaagaaacagatgtcaataaaccacatgcgcccataaccaaaacaatcacactgatatagcaatggattcgatctttgtggagaggaaggtacttactaatacgacacactaatcttttagggaattctaactgatcttaaac

SEQ ID NO: 15645 - DNA, 526 bp, Arabidopsis thaliana landsberg
  unsure (1)..(526): unsure at all n locations
gtgaatttgcatttaggtctgagcttcgtgcagtgaaattaagaagggatcggattgttgttgttcttgagcataagatttatgtttataactttatggatcttagacttcttcatcagattgaaactcaagctaatcctagaggattgtgttgcctttctcatcattctaatacgtctgtgttggcttgccctggtcttcatcgaggagagattcgtgttgaacatttcgggcttaacatggtacaaatcataaatgctcatgattcaagtattgcgtgtatgaccttgacattggatggtttgttgcttgcaactgctagtacaaagggaactctgattagaatcttcaacacaatggatggaactcgtttgcaagaggtaaatatcagatactggtttgctttgatcactgtattacattactaaccattcanaggtgtttctttataggtacgaagaggagtcgacagagcagatatatatagcattgcactttcaccaaatgtgcagtggctggcggtatc

SEQ ID NO: 15646 - DNA, 611 bp, Arabidopsis thaliana landsberg
cgcagccgataacgtcgagaaatgtagccgatcaagtcgtagttataagcaggtctacttatcattcctgcttatcgcagttagcttttcttagagtgatagctaacttattttatcaacatccaattatctgtcaccttctcttattaaaatctccatttctgcaagttttaatgtccgtatatatatatctcgaagagagagaaaatccctttttctctagatagagagagagagagagaagaagaagctttttaatttagttttgctttctttcaagtttccttttttcgatagagaaaaaaaaagttccaaaaaccaatcccatccccctcttttcgtcctctgtggtcttcttcttctttcttcatcgatctctctctctttatggtgagtaagcttcacgcttctttcttctacctttgttgcctctgttaatggaatctagctgtttcgagttttattgtatatatttttttatccttttgcccaaacttttttctgggttttgctttattttttcatccccctttctgataattaatttgcttttttcatgtagtaaaaaaaaattctttttttaagctattaaattcacatcttcccattcc

SEQ ID NO: 15647 - DNA, 1134 bp, Arabidopsis thaliana landsberg
tagccggcaaacaatgaaaagtagtatatatatgataccttcctcctaaaataattataaaaatattttcagcggataatcgagtctcatcaattattgttgataagttctatttgacaaaaatcaagaatcaattattgttataaaacaaacaattgatttgggtttcaaagaccacatacgacagatctttacattattggtttagctactttgatagacagccagtcgtattaatttggaaagccaaagtactcacaaacatacgaaactacgactacgacaaaagataaaaagaaaaaaggtaaaaggaactttacactctctttcgtttgttattttgttgggtcgcggaatcatttgataaatgtttaagataactaggataggagaaaaatccaactattatgattttgatcataacatcgtttcctactttgtgtaacgatactaacaaagaaaaaacgaattgagagaggggagtgtggggactaggctggacactttgtatatctttttactttacatgttgctttaagtgaatatattcatcacgacatcaaccataattaacataggtaccaaagtatcttgtaatatttattcatatgtatatagactagttaatgatcatattgtacgagtctttattttgaattcacttaacgtggctttcgatgcgtacaacaatgccgtcaatgtctcgcacgtatccaaccttctgcccccattttttattttccggcttgctcactgcctccgcaccgttctccaccgtgctctgcacaacgcatcatctcattcgccgcaagctcatgaaacgtatctaatttcaccgattccgcttgatctaccggtgatgaagacgtgataaaacttgatggggatcgtgacggatcgagagacgatgatgatatgagaaacgatgatgagaagagagttcatcatttgcagaagggagacgaagatgagaagcgtagagcttcggagcaaacaaggaggagagaaggcaacgaaggaaaaaaaaatttgtttgtatagtcttccaataagagaatgacacgtatacgaaccttaaaaaccaaaaaacacctaatgcaaggtgcgaaccttgcttaataccgggatcctcta

SEQ ID NO: 15648 - DNA, 1109 bp, Arabidopsis thaliana landsberg
taatgggcgtggcaggcgggcgggagcagcggtcacgtcgtcagccaggctcacatcccatccggggcagcaagagaaccccctctcacggcgtgaagacgacgcgcccgtgatccgttcctcgagcggctcgcgcacgccaacggccgcctcgccaaccactcgccccgttgcattaactctgcggcacgacaggcggcgcttctggcaggagaagcgggcgacgcttcgccttcgccgaaataaccgcgccaaaaaaggtacgcgcgtcgtttcgattccgtatccttttcgtttttcctctttctctctctcttgcaacagggaccgggaaaggggataccccgaaaaggatccttccccgtgaaggaaccaggctccgagcctccctactgatcagaggttcgaaggctggccccccgaagggttcgacaaccgcctcagatcgcgtgggccctacacccactactggtcagaggttcgaaggccggccccccgaaagggttcaacggccgcctcaggccacttgggctccgcgcccactactgatcaggggtttgtaggctagcccccgaagggttcgacagccgcctcagacgcagagcgagggatgaccctgggtacgttcgatacataaccaaggctcgggctacactcccgaggtaccctaggacatttccgagaccaacgagaacgattttgtaacggaatcccatcagagggaggcatcgagccctcggaccccgtcaaaaggggaccgggtccagcaaatcacccgcaggtacttttggagcgcgactgtaatacccaaatagtagagaatatattagtaggaataacaacaatatattagtaggaatacaacaatatattatattagtaggaatacaataataagtagagaatatgaattagccactagattgaaacttgggtttggaaagaaatattataaaatacaaaatgaattcataaataaatagattccaccctattacgttcaagatggataattaatttgagtgcaaattatgctacaaaatttgaattcaaatcctaaatgtgggaatgacaggagcacaacaaaatagggaaataaacagaaaagg

SEQ ID NO: 15649 - DNA, 533 bp, Arabidopsis thaliana landsberg
ataatcaacaacaaaaatcgaataaaccaattcgaaatcgaagatttaagctaacattataaaatcaaacctgggaaacgcaagagattcgacggctacacacagctctacttacgacgacgaagatgggttttcacggcgagtaaactcactatttccgacggcatgggattcaacggcattcacaatttccgatggaggaagaagagagagagtggagaaatgaattaggtctgtaggtagctcattaagggtaatttgaggagaaaagtattagaaatggtagaaatgaaaataggaaaaaagggtagagttgcaaaagggcattgagaaaaggggattagagtgaattattcaaaatacaaaacatgtcattcaattatttacttttattttttttggtaataaaaaagaaaatgttcatttttaatagagattattgaatgtgggtgggaccacacaaaaaaagcatcaataattctaaaataagaagaattactttttctttaaaattttaaaagattttaagaaat

SEQ ID NO: 15650 - DNA, 490 bp, Arabidopsis thaliana landsberg
  unsure (1)..(490): unsure at all n locations
gtgtgccaccaagtttattgcctatccttaggaacatctgacctgttcttccatggttctactaaattgcttnnnnnnnnnnnnnnnnnnnnnnngtagacagaggggtcaataccaaacctgagggaagaggatgaaacatcagactcaaagactaaaaagacacttatacaaacaaaacaaacatcatgtgattatttcaacttaccataaagctccattaagctttctagggtgcagatgtggctgtgattctctttcagaagcactaagcaatgcatcaagagttctttggctgtagttgtttgcatgtgaagatgcaggacttggagatcgtgtggctcctggtggtacagttccatttggtacagctccaggagtaacccttcgatggttcagctcttgcaaaaagaaagatcaaatgtgttactataaatatgtaacaaaaaaatgaataagacatgaaatggaaacccagacaagcttaaac

SEQ ID NO: 15651 - DNA, 596 bp, Arabidopsis thaliana landsberg
agcttccacaaagaatcatttaggtcaataccttgattcatttcttacagcaaacaccttaaataagatataaatcttaatttagatttgttgtttgcattagatttaatcagttttattgctaagaattagctaagaatttctaagaaccaacgttggaggtgctctaatgtcttgtgtttgtttttaaacataatcgttcatctatttacatttaagccacattatcaaatttattgttacacctacgaaggtgtagtgataaacagtagaagaagtaattacttatcttcctacttaacgtaaatgcacttctgatcacatcatttctcacccgcaacaaatacttttacaaaccaaataattactgctatacgtgtttaatcattagtgttgggactttaaaataattgaggcccaattgtgttatatgattgattggcccatatctgttgacattaattttgtttacttcaagaaactctaattctaggcgaacactatcatcacttcttatttactgcgttcgcatatgttattctctttcagacttcaggaaaccaaaagtcgtttgtatcaatggatcgttcaacttt

SEQ ID NO: 15652 - DNA, 4297 bp, Arabidopsis thaliana landsberg
tgcagttgtgcgagctcccaacatagttcgggaatagtctaaaaagaagaacggattaagaacatgtgtagttagttagtcaaagaagtgcctagttttttatagtttggaaacacgataattgaaacgttaaaattgagtacataacaaacctcagataagagtttttcttctttctgataaagggtagagatttcttcgactagatctgcatgttttctcctgcacagataataacatgatccccagtatacagaatgaaaacttaaagacttaatgatgattttatcaatgtctcgtcctttgatgttcgactagatctgcatgttcttatttacctcagagaatgtagatcaaaatgaatatgagcttccactgatgttacttgagatttgagtgtcaaaagaatagcttgttgcttagcattctccacctgggcttcaatccattgtctctcacttgttccgaagctgtgagtaaccaggaatatgccttggagagtgagaaaacttgtatgcgtgaaaagtccataattttctatgccctaaatatatactgaatgccctcaattctatatttctgagtacaatttttctcaactaaaagactttatccaaatccagaggaatggtcaaagtgaaagctgaaagttatatcaccggagtactacataatacatacatggaccgaagccgttggagttcagctacacgttgatgctgtgacttttccaaatctgctgcattgtaaatagacaagttatagatgcaaaatagcttcaaaacataggaattatattatacagagggaagttacataactgcacagggatatatctgctatacaaaattaaactgtagcaaagttacctcgcaacatgttagatgtatcatcaagactgacccatgagcatttcgattttccttcctctgcaactaaacggtatggcccctgatatgacagcagataattacattacaaagagtgcaagatgaataccagttgatactctccattctcagaaaagtggcaaactacaacatatctcacaaggtattaggaataagatctcaagttgctagacttttctatacgatgaagagaaattgaaattatcagcaatgtattccccactaatgtcattcacttactgtgtctagctgcttagcaaaccactgatttagctcctttgtgcaggctgaatctccagccaagtaggcatggaaatcggagtatgctaagtatattccatcctctgcacatatgaaacagccaataaagttagctaaaagatttgatgacaatttactatgatacatactccatgaaataatcagttagattttgctgacatagctgtgaaaaccactttttcgtctatcatccaaaagaaatgtctacagaagatacaacttatagaaaagttccataaaattgaaatccaaaagttgctaaaaatataacctcgatctaacttatcaatctttcaaataactaccagagctaaagttcctcccccaaatgctgctaatttgacggtatattgcattgaagcctattaaaaatttcagcttcaaaacagatttacaatagttcaccagatatgaaaaagttaaaccaaaagattgagaagggatacgaaggacaccttcgccagaatgataatgcgccagctcttgagaagtggaagccagtcttcctagaactccattcatctaaatcacagtaaaatacaaaaaggaaacatcacaaacttatcaaaaaccaaaataattgcattccactttacaattgtgtaggacatgtatcaaacctgcaaatttcgagcagataaactgtcttctatagctgttatctgtccagagacagcagaagttgcagcaactcgagcacgtctcccttgaataagagctgaagattggccagtgagtaaatcatattgagtttgtaaccgccttagctgcctctgcaactctaaggcttcagccttatgcgccaaagttgcatctctgtcaattaaaagaaactgtcagtgggtgccatgtaatgattggtatacacgactacatcagcaaaatctagtaatacaagaacatccaagtgatgtgaaacacagtccctggaaatttctcaaagggaataacaaaatacatttatagaaaacaccaaggtcaaagaaacctataagtacttaacttatgtaaacgcatgacctaacaaggtaattgacatgaaaccaaatttctcaacaaaattaaccaacttctcacgaggaaaaaaaaacatttatcagcgcaccatcggtcaataaacttctcacgaggaaaaaaaaacatttaacagtgcaccatcggtcaataaacttagtgcacacatgataatccacactaaaaaactggacagttatacttgtttcaagagccttataataggcatgaaacagaaagtacagattcgcatatgtgatatgaaggtctaaccttacttctttaatgctttcttctgctccaaaaacggcctcctggttatttctcctggaagaaaatgctgatatgctatcataggcctggtctagatcatcgccctgaaaaggacaaaatgcgccataagaaggcaatgaagtaacatcttaagacggatgcttctagatatgattaactctcaaagattttaagaaaaaaagcacaagcaggatggccaaaagaattacctctaagagtttcccatctagttgaaattgctcatatctggatccggaaataagagaacaatccattaaccactggttaatgaactaactatattgctaatatgtttccacaaaaccaaaatgagaaaataagctagctagcaacaacaatcgaaagtaaaaccacaaggattgctctaattgcaacaattcaagcttcatcaaactggaatatggaatacgaacctaattcaccaaaaccaagacaaattcaaccgaatccagaaacgaaacaacattgagaagtgagaaaattcgatgtgaatctgagaatgagagcggaaatgagaacatacagtgatagttcggcgagagagaggacattggaaggacgaagagaggaacagatccagtcgaggataggtcgagcatcgtcgtactgaaacggccattcgaagctatcgggatccaattttccggcgccttcgtaacctagctccgccacaagagagcacagtctcgcgctgctcatctccgatcgccggtgggaattatgcgattgcctcagaaatgaaatttgaaattcacacggtcgttattgcctctaattcaattttgaaagttatgtacaaacaataaacatttgttttcaatagataggttgtgaagagttttgatttttgatttttttttgttgatgttgtttccattttccatacgacgtctatatttcactatgtaaagtaagtatttctttatttattttgtttgaatgcaattatgcatatatggttgatgggcctaaatcatgattttgacgataaaaagagattattcaccttagaaaaatagtataagactatatgaccagaccatagctagtttacaaactgatgccataaatttggagaaggaaaaagaatcgatgctacaagagaacgtgaccctcaagaagcagaataatgtttgagggaagagatcaacttctttttggatcgaacgatagaaaattatgttattatgtcaaggtatacgcaattgaaaaatcactaaatcagattgacaacgctaattgaactttttctctttaatcaagtttagatcgtttatacaatgaggtcactcaccaattcctaatcttctcaaccccacaaccaaaacaatagatatgttaaacactctattcactcacaccaagaaccctaaatagtttctagcctataacttgtgattcatataaaagagcaaaacgaccaacttaagcctaatgcttagaccgccaatatacatgtaacaacaggtaaatagtttctagcctattaacagctgtaccatttttcacacgaattaataaagacatcttaatttttcttttacactttatttttaattaataagttgaaaacacatagataaaacagagatttgattttaaagactacatcacatagatttgatttaaaacataaaaaaataaagttaaactgatactttttgtgaaacgggtgaaatactttatattaagagctgtgaattaaagattatagtttctttaactatgatttctaagaaaatatgtttgatagaacattaactactagtactatg

SEQ ID NO: 15653 - DNA, 1159 bp, Arabidopsis thaliana landsberg
taatttaaacaatcaaatttcgcacgtaaacttacttgtacacttcgtattaataaaaactcaccataagttacctaatttagatatctatttgacaattttcttaattaacccttataaaatcacaatatcatttaataaaattgaagataaatagtattttcttgcaacaagatgaaacaattgtcacaaaataaaataaaataaataaataaactttcaataaagagaaaagacaaccagtataaaaggggtccctaggaactgagaaaacaagaaatcactgtcttaagcgttacaaacgccaacatcataagcgtggattcattgtaaacattttgctttgctttttaagattttgttcttcttcttaatttcacgttcgatttctcaattagataaacactcgatctagtgtaaagagctcaatcctatgttgcatatatgttcatcacatcaacgagcactagatctagttggtcttacatcacatgaacaagcactcgatttgttatatttatttagattatctgttgattcgtcttttatggtcaccttgtgttttttgtgccattaaatgtttgtgaatattgattattgtccaagtaaacttgctaacacgatttagttatttgcaatcaattagttagaatcaatgcattcagatgttttgttgttgttgttgtcgttgtttttacttatctatacatatatgaaggagttacaatgacgagagagagagtcatgtgggaacctgaactacacaaagtatttgtggatttatgcgttgagcaaaagatgttgggatttcgattacctggattgaaccgtatatgggaatcttttgtacaaaacactggcgctaggttcaccagagaccagcttaagaatcattgggataccatgttgagactgtggagggcgtggtgtagacttgttgaatgcagtgagatgaaatgggatccccagacaaagaagtttggtgcgagtactgaagtctggaccaactattttagggtacaaagaatggtttatgttgtgttaatattggttgtttgtttaaaggctatataattagtaaaacttgattggatttgtcacaggtgaatcctaaggctaaggatgtacggtttagatcgaaacctccaccgtttctcaa

SEQ ID NO: 15654 - DNA, 625 bp, Arabidopsis thaliana landsberg
tataaaggcttcaatcatcaccgctctcatcttcaagcttcaacactcttataatcaactaaccacttcaaacacaaaaaaaagttctccaacatcgccaaacagctgtgacagcactcctccgtggccaaggatgcgctaacaatctcaagatgctcctcgaaaaccacaagttaagctcagattcaacagagccgctcatctacaccatactcaattctttctcacttgctctctcttttgtggacccgcctagtcttctaccacacaatgagtcttctcttcaaaacatgacaagtcatgttcttcagagatcatcaaagaagtaagttaccaacaaaaagctaaacactcattgcatatgttatgaacaaagttcatgagtttctagctaactcaaaataaagtgaaatagcaattgttttttcatgttactttatgtctcgtataatttttgatatgcaattatgtcttctatattttaaagcatttctctaatacatcattttagaaaatattatggagcagaagatttagagtattacagagacgaatccccgactccacgccccgatgacggcttcacctggaggaaatatggacaaaaaactatcaaagcctcacc

SEQ ID NO: 15655 - DNA, 297 bp, Arabidopsis thaliana landsberg
gatgtgcaagtaataaaaaaaatcataatcaagaaactcaagagatagcttctccatgttgcgagacctggcgaaatcgatcaagatatcaatcttgtgttccctggtgcggatacagagatggaaactcatgattttgggagctgagtatctagctagggttttgtttatcgagttagtgtctgcactacggcaatcaatgtagagagaaggtgtttcggaccatacatgcctccatcgcttggacaagacagaggttctgattgcgaacttagtcggaataaaggagcagattag

SEQ ID NO: 15656 - DNA, 819 bp, Arabidopsis thaliana landsberg
accaaaaccattctcattacctggatgtaagggcaactcaaaaaccaaaaccaaaaagtaggattaccaaaaaccttcttctttttttcttgtcaagggcaactcaaaaagaaccttttttttgtgtggtcaaaatggcaaatctaatagaaaaataaataaaaaaacttacaagaaattcataggatatggatatacacatataaagtttctatcaaattaattctctattttgttttctaattaaaaagaaacaattttacttaatgtttctatcgtactagtttttttaaaagatttttggatgtcaatttttttttaatatactttaattatcattttatatttttttctttaagaattacaagataaggtattcgaggacatttataataaaaataaaaatcgtaaaaaatgtaagtttacacgttgatattagacttaataatagtgtgtttttttttatccttctccatgagtattttgtacctcttttcaaatttaatttaaaattttcttcatatttttttctgttaacttctaaggtttttcttaatataaacttacaaaattaaattttttgttatatgtaattttttatttaatagtttttttctgcaattagaactttatttaacttagggtctgactggtttaaatatagcgggtgcagttgcgattgcgggagtttgcagaaacgagcggttgcggtttcaagtgtatcaagcgttttgaacgactggttgaacgtttgataatggatgcgtttgcgagagttttatgactggtaaacagcgggtgcgatagtaactaaataaa

SEQ ID NO: 15657 - DNA, 759 bp, Arabidopsis thaliana landsberg
tcattcattataataaaaattaaataataacaatattgtttcaaacatacatgatagtgtttcaatacaaaccaaaaaaggagagattctaaagtatatatattttttttctttctttcctgtaaaatcattcaccaaactcataaatcttattaatgtgcagaaattttcatacaaatagaaaacaatgataacaattataaggaaatgggcttcaatacacaattaactcaaacatatacatcaaactaatgaaacttataataagccttataatatacatcaaattatagctttttaagttctccaatttttggtgggtttaagcaaatgccattctcccacaatgtgaaattactgacactagagaatagagatataataatatggagaagataacattgtttaaaaaaattagtgacactaaaaatatagtaatatggaaaagacacaattgcttcatgtgaattatcaacccttaaaaactaaactttatataataaaatgaatacaacaaagaacaaatatatgtttattgaattatgtcggtataaccaacatacgccaagaaaagaatacgtttccgttcccagtatatatatctccaccgatcaagaactacatcttcacaccaccaaaaatggcttcctcatcaacgagaaagtacgagacacgaaagcgagatccaaactctaaaatcgcagctcttctcgttatcgacatgcagaatcacttctcctccatggccaaacccatcct

SEQ ID NO: 15658 - DNA, 714 bp, Arabidopsis thaliana landsberg
  unsure (1)..(714): unsure at all n locations
gaaggtgaagctattgattgataacaagttcgcaatagctttggcaaaaaatccggtgttccatgggcgaagcaaacacatacacaagagatatcacttcattcgtgaatgtgtcgagaatgagaaagttgaagtactacatgtacccggggaagagcaaaaggccgacatcctaaccaaagcacttggtaggatcaagttcaaagagatgagagttatctaatatattttgtattgtgatttggagttatctaaagttctatatataaggagatgcaagggtgttgcattacttatgagttttgagattaagaactttgtaaggtttaggttttgagttagtttcctaaatcaataaagaaagagtctttatttacattgttcttgatctaaggaattgtacaaagggtcttattcaataaagtggtatcagagcataaacaaattgaattaagaaccctagacgtgtgttgtattgaattgacggtccgatcaaaagctgcaaaatannnnnnnnnnnnnnnnnnnnnatccgagagagatctcctcttcttcgtcttccattcaatgtctgatgctcaatagcacaaactatacagtttgggttattcgcatggaaaccactctgcaggtaaacaaggtttgggaaacgacagatccgggaatagaagacaacgacaaaaacagcatagcaagggctcttctttttcaatc

SEQ ID NO: 15659 - DNA, 1306 bp, Arabidopsis thaliana landsberg
ttgggatattgtgcttcggattgggctagatctttggatgacatacggggatcacttggaggatgctattttgttggaaacaacatggtgtcttggaagagcatgaagcagaacaatctgcctctatcaactgctgaagcagagctcagtactttggagagttcgagttctcaacttgtacgattaaaacagctcacagaggagtgtggtatgatctctgattttccagtactgtattgtcataatcacagtgctatacattgtttccaagaacctgctaggaagtctcgtacaatgcacatagatcataaacataacgatattcctgaattggttaaggagaaactaatagcaattgaacatgtgggtactcaactagctgatatgtttatcaaacctctgatgtctaacaaattctgtactctacgaatgttcattggaatgtttgaactatacttgggtttgagttgtgctgatctagaatgggacctgaagcaagaacaagtcatggaaatccaaagatgcatagaggatcagcacttagcaaagtcatgtggaaaatagttgcatgtcatgccggttcaattcagacataaaaagttgtcgtctaacaggaggtcaaagagctgagaagatcaacaaactgaatgaacttggtacacaaaaaaaaaaataaaaaatgtgtatcaagttcaccaggttcgaatatcaagcaattgagaagtcaagtgatattgctgatataacaaaataagggagtaattcaaaagaattcatatcatcacgcccctgtttagtcaaactatcttcaaaggacattccagctgcctgttacacgttgatctgattcatgagagctaaaggcatgacagtgtgaaagactagccactgaataatgagctgattcatcaacgatctgattggttatgacagtttcatgcggaagtcgtgaacacctgattggcacaaagcacattttcgagtactaggaagaggtaaactttgaaatcagtgttggaaagcttttaccctcatgtgtcaattagctgtttaggtcactaaactagttcaggctataaaatgttcaatgttgctctgaatgtgtttgaaatttaatcacgtgtttgattgaaaattctcttggcaaagaagcacttatgtgtttgttaagtgtttcagaatattaaaacagtttgggcccaagcctgtttcaagcccacagaatttcaaggaggagtgctcgagtatttgacgaaaaaagaggagttagggtttgaggagtcaaatcaatttcttatttggagtc

SEQ ID NO: 15660 - DNA, 439 bp, Arabidopsis thaliana landsberg
  unsure (1)..(439): unsure at all n locations
cctataaaaccattagtgcttccaactgggcacaaagttgactcaagtatgaagattttgatctttatttacgcgttggggaggatgagagccgtatggggagaagatgcatcanagtttaagccagagagatggctttcagagacaactagcttgagacatgagccttctttcaagttcttagcatttaatgcaggtccaagaagttgcataggtaagcaactagctatgactctaatgaagatagtggtcgtggaggtattacaaaactatgatattaaggttgtcaaagggcagaagaagattgaaccagctcctggtcctattcttcgcatgaaacatggtcttagagttacacttactaagaagtgttgatcgttaaattaagaataaaaatcatttgaaatcatatgtagcctaattaaaaatatgattctct

SEQ ID NO: 15661 - DNA, 895 bp, Arabidopsis thaliana landsberg
  unsure (1)..(895): unsure at all n locations
tgaagcgactctgaactcgccagcttcgggaattcgcaacggctctccgctataattcaccggacatgtccgtgtacaccgactgtccggtgtaactacggagcaacgactacttcggcgccaacggtcacctgccatcgcatttaatgcgcgccagagcggnacnacgtcaggtctgcgcgaacaggcgcaccggacactctacagtgcatgtccgatgcgccacagaacatccaggcggggccagcgtcagagctccaacggtcggaaccctaacgttcgggtgacgtggctggcgcaccggactgtccggtgaccatgcgacagacagcctccacccaaacgactagtttggtggttggggctataaataccccaaccacccccacattcattgcatccaagtttttctcttctcaaccacttacaagagctaggcattcaattctagacacaccaaagtgatcaaatcctctccaattccacaaaaggctttagtgattagcgagagagatttgccgtgttcttttgagctcttgcgcttggattgcttcttttctttctcacttgctcttgtgatcaacactcaattgtaatcaaggcaagaggcaccaattgtgtggtggccttgcggggaagttttattcccggctttgatttgagaagagaagctcactcggtccgagggaccgtttgagagagggaagggttaaaagagacccagcctttgtggcctcctcaacggggagtaggtttgagagaaccgaacctcggtaaaacaaatccgcgtgtctcacttcactattcgcttgcgatttgttttgtgcccgtcccttgcggacttgattatatttctaacgctaaccctggcttgtagttgtgattatttttgaga

SEQ ID NO: 15662 - DNA, 1045 bp, Arabidopsis thaliana landsberg
ctttacgtgtaaaggcgggcacttgaagcgcagtaagtattattactactgtgctacttgcaatttggaatttcacagaggttgtcacgtctttctgccggagatcagaagcgcttttcatccctctcaccccctcaccttcaccgccttagatcctgaatttaatgcttctatcatacaccaaaactggagggacagctccgcttcagaggaatcttccgaagaattgataaacgaagttgttgactatggtcatgaagacgatggtgatgatgacgattatggggatggaaatggcggtggcggtggcagtcgcagtggcagtggcgatgtttatgatgtcgcttataatgaggaaccctatatgttcttccatggaaatcacctgaaatgcaaatgttgtgcttctcctttagaaaagctatattatcattgttctatctgcaagttcaatcttaacttgacttgctcgatgagaccaccacctaccactatctcacacttgaaaagtcatgagcacatcctcacccttttccctatacgactccctctaccatgtggggtgtgcggcttgtctctaagtgacgccgaagatcttgtttatgcttgtctcccttgcagccttatggtccacagaacatgtatctatctacctcgtgtcattaagatcacccgacacccacatcgtctctctctcacttcctcccttcaacctggtgagttctcttgtggagtttgtcgccaaaccgtagatatcaactacgggcaatactcttgtgataagggatgccattatgctatccactcgaaatgtgcaacaaggaaagacgtgtgggatggaaaagatcttgatggagtgcctgaagaacctgatgagtatatcgaaccgccattcttgaagattgatgaggagactattcaacatttcagtcatcatgagcattatatgaagctccatgaaaaggaaaccattagcgagaaagacaagttttgtgaggcaagaaaccttccagtaatgatctctcagagatattatggatgtatg

SEQ ID NO: 15663 - DNA, 604 bp, Arabidopsis thaliana landsberg
  unsure (1)..(604): unsure at all n locations
atcatctctggggtgcgatgagcagaaactatctttacctgtaagcaaatgataccatatcggaccatttttgatgcacagaggttaaggccatgaattatctatgtgaccaaatattgggcaatgcataattgcaaagtatatgtttgagcttcttcacagttagttttaccaaattacaaacttcaggtttcttctgtctgtcttcagtggattataataattcatgtaagtcgtgccaaannnnnnnnnnnnnnnnnnnnnnnnnnnnnnnnnnnnnnntcacaccaaacaggtccagaattttggcagcatccttcataacaggaagatccgtgtctgaacccatgatgatagcaacacgaggtgtctctgccatgtgtaaataacaagcaacacaaattcagtcggatacttttaagattcatgaagggttcaacaatcattaaaacgaagagtgcactgttcacaaaaaggttatacaacagattttggtgagataagtttgaaggcattcanaaactaaaagccaatagaatatagataccaaacgatgctatggaaactgaccgtgtacttggtggctttgctcacttaatatgca

SEQ ID NO: 15664 - DNA, 721 bp, Arabidopsis thaliana landsberg
tttaaatcctgtggacactcgcacttaacactgtccttgtcctgaaggcattacaagttgagacagaagtatcttactaaactgtgagattatacacttaagcgcagaagacaccactaaccacacaagcagagaacgcatgtccatctcgctcttcatgccaacaacctccattgttgattgtgcatctccctggcccgcttgctgcaatgcaaacaccagttcagtatggaattttgacatcaaacgaaagcacagcaaagagacaacataaaattatcaatctctaatgggaaatgatggcatataagtgttcaaagttttagtgagcatgaaataacaattatatcttgaatttcaccaggaagatgtgcgctctcaaaaatctaagagggtaaaccgaaaattttctttacaatgtactgacaatgggttatatgagagctgctagaagaagatcagaatgtcggtctataagtatctaaactattatctttccatacttagattgctactgaataatacaagtctgataaatttataagagctaatcaaagatgacatgaacacttacgttcacagtgactgtaaccatcccctttgaattgcacaccatcaactgtaggacactcgcatactcttccacgaaaagtatcctgcggattaagcagatttaataaagatagcacagaatttataccaagcaatttcacattatacc

SEQ ID NO: 15665 - DNA, 1643 bp, Arabidopsis thaliana landsberg
atttttttggttgaagaaacttttgatacactacgacatgcaaattagaggcagtattaagaaacttacttttttttgacaaactatttaagaaactacttaagagttaagactgaagcttatttaaaataacgtcaattagatcatattttgtttaaattatttcccttttttgggcaaataattaaattatttcctaaccagtttaagtttcgtaatgcaaaatggaatctccaatgttgcttggtcaagttttcttctacgtagaaaagactctttgtattgattccccaaagccattcttctcaatgtaaatctgatttcatcagaaactacaacaaaaaaaatactccaaatgccatgtcttttcaatataaaaattaacaatttgacttgatatcaatcggaaattacaacgaacgatttatctagttaaaaagaagttttttcttaactcttaaacacaattattagactactaaacattcataattaataatcatacaaaatgattagtcgaacaaataaaatatcacatcctttccaattaaaacgagatcacgtggaagcgagtacacaccacgcgccgttacagagagtgagatttcaaaattcgacgaaccaatttgcctccgttcacatgcgatgcatcttctctcttaaatatccaccgtcaccactctctcttcctctttagattctctctctacagagaatttgattatttgttttctgatctgagaaaaagaatggcgaacggagccgatagagtggatctcgacgggaaaccgataaaaccgttgacaatatgcatgatcggcgccggaggtttcatcggttcacatctctgtgaaaagctcttgaccgagacgccacataaagtgcttgcgcttgatgtatacaacgataagatcaaacacttgcttgagcctgataccgttgaatggagtggtcggatccagtttcatcgtatcaatattaagcatgattcaagacttgaaggtcttgttaagatggcggatctggtaaaaatgcttatcgatttcgttttttgatctcttgttcttcgttgtttatgatagttagtctcagatctgattcgttatcgaaattcagatgtttcgcaatgtgttgagatcggtgatgttgtgatgtaattctgatatttgttttttggatttgcagattataaaccttgctgcgatctgtactccagctgattacaatacacgtcctcttgatactatctacagcaatttcattgatgcgcttccagttgtatgtgttttcttcttaacttcgttcattgttttgctttagctcttgtttttgaagttgatggagacagtgatgattgtgtaatgcgttggttttgttaggtgaaatactgttctgagaacaacaagcgtctcattcacttttctacctgtgaagtttatggaaaaaccattggaagctttcttcctaaggatcatcctctgcgtgatgtaatgcctttttgtacatttcgctttccacatgttattgtctttttatcaatctcatcgatgaatgtactgaggaacatgttgaagctgacgttttcgttctttttaatagccacattatgaaaaactcattggatctcgtaaaacttgtttttg

SEQ ID NO: 15666 - DNA, 1045 bp, Arabidopsis thaliana landsberg
atgcattctgacaaacccttcgccaaagatcctcattctttgtcagcacatatagcctgcggcacacagagctaacagatgcaacgtctcttggtgtcaggcgtgacaatatcttcatagacacaacctcgtcactcagctggaataacccacacattcctcgggaaacattccgctccccagcagctaaagctgagtatatcccatcaattgacttttcttttgttgaagatccaagaacaggtccaaggtcaatgtctgtctcgataaagaactggattccaattatatgggtaatagtatcatcgtctccataaataggagtcaaccgcaatctattcatcaacggagatccatctttcctaaagttcaacaactcgccttgaaattcaatgccctcatcaatacattttcttatctcggaaacaaccatagagtcaactaatggatgccttcttttagcaaacggtcctctacattgctttaagcggctgcagaatccgagaaattaatggggaaagaatataagaccaaaaacaaaatttatctccaacttactgatgcggaaaagcaatagacaaaatatttggccgtgcatgtagagactgaaaaaaaaaacaaatacaccaaacaagcataattataacctaaccagattttcattctgttcaagaataacaactatttgaactgatcagctcctcctgtaagatcaaagcttattaataaaggaagctactagcacttctctcatggaaaactaacacacaactaaacgcattggacttagccttttcactggttcactgcacatcaacattgtaaagaatttattgtgttcgctacgaccccgagaaactacacagggatagctcgctttatctcggcatctatatacactttcaagtttccttaacatgcggagcagctgaaacagctcataaacagccatgagagctcgattaatatgaaaactacaatcactgaataaacatctgaaggcagagaatacttatgcacacacagagacttcactgagtcttct

SEQ ID NO: 15667 - DNA, 1682 bp, Arabidopsis thaliana landsberg
atgctaacaacacatatccagctgatttcattggtgtcaatctccaaatccaaaccattgtgatccactctgcttataagcacggtgtgaagaaactcctcttccttggttcatcttgcatttaccccaaattcgctcctcaaccgatccctgaatctgcgcttcttactggtccactcgaaccgacaaacgaatggtatgcgatcgccaagatcgcgggtattaagatgtgtcaagcttaccggcttcagcatcagtgggatgctatctccggtatgcccacgaatctgtatggtcagaatgataatttccaccctgagaattcccatgtgctgcctgctctcatgaggaggtttcatgaagccaaagccaacaatgcagacgaagttgtggtttggggaagtggaagcccattgagggagtttttacatgtggatgatttggctgacgcttgtgttttcttgatggatcagtacagtggatttgagcatgtgaatgtaggaagtggtgttgaagtgacgatcaaagaattggctgagttggtgaaggaagttgttgggtttaaaggaaagcttgtttgggataccacaaaaccagacggaacaccaaggaaactgatggataactcgaagcttgcgtctttgggatggacaccgaagatttcactaaaagatggtctctcccaaacttatgaatggtatttggagaatgttgtgcagaagaagcagtaaaaacacaaggtccaaaactcaaagcaattcattatctttacacgtgaatgtttatgcgtttgaattttggttctatacagatctctctatctcttttatgtaatttttgtattcatggatttcatacagttcaagttaagcaaacttactttgtaataaatgtaccattgttgttgagattattaataatcgaatagctttcttctctgaattttagtcaactaaacaagtctgttcattgataaactcaattagataaatttgtggattttgaaattctggtaaccaaaagattatggtttggtacgcgctaatactggtgattgattatgccattatggcacaaaagagcccagtaaataattattggcccagtttattttgggccttatgggccaatattatcatcgagcatccaacggcagcgatggagatttctttatggaatatctgatatgcaccgttagattaagagacgaggttggctccgaatagcatatagttaaagggcaaaaccctgcgccgcccgcgtctctcctctctctgtttcttttttttttgtttcattttcttatctcctcacactcttcgaacaaggaagaaccctaatctcaaggtaaattcattatcactgtaattttcctttctattagtgttttatctctccggttctagggtttctctaatccccgattttgcaaaatgtcagatatctttctttcttgattcatttcgcttctttctgtagataggattagtttttgtcggtgtttgggaatttactgggttttcaacttctctgtgtgtttgattgggggatttggtatacctaatcgattgaaaatgattaaatttaggttaaaactactagtcacatcaccgtgtcttcatacgcatctgagtttaaatctgttcgcgcttactttcttctcactagtttcttgtatataa

SEQ ID NO: 15668 - DNA, 667 bp, Arabidopsis thaliana landsberg
gtcgttgaatatatctgcatttgtatgcatgtttaattactttcagttgatatcccgttgaatctaatttccaaccaaattccagcaaataatatctcaaaagaagaagaaaaataatctaattaataatatatgtgtttacgggatgaaaacaaaattattgtcattgattccttatattaagagacttggaataatctgcagttttttttgaataaagagacattttggatggaggaggtggacaaataaactttccaaacatgggggaaggaattgggtacaatcgttgcttcgtttttgacgcttttctctctcactcttgaagacaaaaacaaagatctagatatagtttatgagtttcctgatcttaattgcagggtaaggattgcaaattggaagacgggagtgaggcagtgatttagacatcgacgtacttcctgtcggtgatgcagtcgaggctttccagacggatacgtgaggcttcgccggtggctcttctagttatggacgctagaggaacgacatgaagctgctcacggcccacccattcgtggaaggtcctcagcatgaagttgctcacagctcaacaattaaaaaattcaaaaaatacacaaatttattaccaaaaattcccgacattatttttccgctaaaaaattcccta

SEQ ID NO: 15669 - DNA, 698 bp, Arabidopsis thaliana landsberg
tttgtctgtaaatcgaattgccaatataaaaacaaaaaggcataaatcatatcttgtgtttctgaatttattctcagattaacttaaaatatcaagtgcaaataatatgaaaagagaaacataaatattgaaaagaaaaaagaaaaactaataaataatatatctttgcctacgagcactatatagtagcaaactcatccttgttatttaggcttcttaagaacacagacaccacccttgcatgaacctttctttgaagatggcttcgtgaaacaactaaaaagcttggagaagaaacccatctttcttgaactctaaaaacaatattagagctaatgaactttttaagtatttctgcgtggtatgcagctctattaaacttgcatacccacatatatatatgacaaggatgtcataaattatggtaatgaagtttcttttgtattaaatgtactgagagatagatgaaatcgaacggccgaaatgtcttaacctagattatataaatcattaccattatgtaactatgtgttaattaggaagtttaccatcttttctaaatgtatagtttacatttttattttcttgtaatattgatcatattttataagatatgtaagcagcccccaaaacagtgggttgctaattggtctgactcctacataaataaaataagaaaaccctcgcgtatttgagta

SEQ ID NO: 15670 - DNA, 274 bp, Arabidopsis thaliana landsberg
atacaccatattcaaattattaaaataatagtattgaagaatcaaatttaatcaaaggaaccacaaaccaattttattattttatattcaattggttgtcaaacctatgtcttcgtatttctctcaagattctttatcttttacttttcatatcttttattgtcatcttaactatcaattttcttttggaagttatcatcattactttcactgttcgcttcttcgttatacttttcatcttcgtttttatgttgagctacatatatatgaacta

SEQ ID NO: 15671 - DNA, 1269 bp, Arabidopsis thaliana landsberg
taccgccggagaaatgtatactagatgtggttaggttaggagtagacagttaaagagggtgaaaccagacttacatgtcttatgtaatatttatacttttggaatatgaatgaacagaaagagagttggtttcttcttttaccggcgaaagattctctttcccggcacaaacaaaattgtttccatatacaaaattgataatgaaagcagagaaactcacctctgaaagtttcccaacacaccacacaaatcatgcctatcttgattcaggccatttgatatgttaaacctggatttagatagcggtaaatcaaatcctcggtttgattctgttccaaccgcggctactatatcccctgatagcttgccaggaagccacatttcatagttgcgcaaacacaagcaccaaggcagttcttataaaccgcaataacaatgaaaaggattattgtgggatagaatgttcgatcttggcgtggagggtaacaataaggtcgtgtgcatcgtctaagagcttccacacgtctagtttccctaccatattgtggcactctcggagaatctcctccatgctactgtacttctctattatgactttcctcctttgcaacacagaagcagctaccacgtacagcaacaaatcctccgtgggaggagcccgctgctttattcgtctgctccaggaagatttccccatcccagctcttattgcagcttggtctgcccaaatcacttcccagagatgcaatgtttgctccagagtcagctctcttctaaacataacaagaaccattctgtaaacaaagaaacagtcttcagccttgactttctcaagatgcttgtagagttgtgagtctttggatttgataatctttgagactatgttcagttgccttgtgatcccaacctcatcgagtctgaaattctgacgagctttcttcatgaacccaacgaaacaccaaaatgcctcgtagtcatcaggtatgactgagagtataggggagagaagatcactcattccttggcagtagccaatttcagggtcatgtaaggcataggcttcaagaacagcaacaagccgtgcagcgtgaaagattttcgaaggttccaaataactgtaatcctttagaccaactgcttcagcagcacgacgtgccctattctctgaaaccaaagcttgggattgagaatatggagtccattctgtatctgcacggagagcgtctagacggataatacgctgccaggtcacaaaatcctctttggtac

SEQ ID NO: 15672 - DNA, 763 bp, Arabidopsis thaliana landsberg
ctaagtctgggtttgaagtgagaggacctgtggcgacgaagacagagcaagtgaacagacaaaactacacaaacccttcttcttcgtctaatggctcatctagagatcactcaaatgcttactcatcaggggcttcatcagctaatgctggtaatacattcagcagtaccatatagaaagaaagaaaaaacctttttaaaatttttgctttttgtttttctgtttttgagatgtaaataagaaaaaagagtttgatgtttctgcagtctctcttctttttttctcgtccatggtttcaaacagaggttttctgttagttgctgaatccatagctgactgcagaaaaggcggtctctgcctcgctcttgttcaagtcagtcttcagttgcaaacagagagatttgagtgttgtatgtatgtatgtaaatatatttatagattgaagttgaatctaaatgatccgatcaagcaagtttgatgtagcaggtttgtgattcactggtttgagttagaaactgtttttctgtgtttaccttgaatgagcttaaaccgagaggttaaacaaattccggtctaacggttttaagaaactcatgagatccggttctgttaggctgtcggacccagaaaatttcggtaacttaataattatggtcacttagggctgactagtttaaacgcagcgggtgcgattgcggttgcaggagtttgcggaaacgggtggtagcggttttaagcgttatcaaacgttttaaacgactgg

SEQ ID NO: 15673 - DNA, 509 bp, Arabidopsis thaliana landsberg
gttcattaaattctaaattcgtgacttgtcttacattttgcaacaaatcaaccatatataaacacaaaagtacaaattgcaaatacaaaaaacaattaaaagaaaacttttttgctgaattcgaacaagaaagttgacttcacaaaatttgctggttgtattggtctattggatatgggccttaaaagaacatttgaaattatgaacccgagatattttttttgatttttgaggtcatgccgccatgtactttgttcgtaggttattgacttatgacacctcactcaatcaaatatcagccgttgatctttagccaatacctcatcttgacgttcattcaggatcgtctcctcgtttataccaaaaatagtctccctgacaaccatcatcgggaacaggagacagagtctgacagacagaagagagactccatgagaatccttctcctccgtttattatagacaaaaaaaaataaaaatccagatgaataaaacagatttttagggttt

SEQ ID NO: 15674 - DNA, 1544 bp, Arabidopsis thaliana landsberg
tccacttaatcagcttgtcacccgtagctactctatttttttgaacgagccatgtgatgagtgagtacttcggagtcgagtgcttgaaccagattccgttgtagttctccatcaatggctttgcggtgcgaatctgcagccacgtctctttggtgtgaaactcttttcgatagtggtcatgctttccattccataatgctacatcggtctcattcgatcttatgagcttctgttttactatttcgttttcgacttgattcaaaatagctacccgatattttcttcttcttgcccctgccattacctcacccacagtagcagtcatcgggctacccaaatcaatgcaccctcttgcacccaatctgtcataaagacaacccatctcactccatctgtcaaacccaaaagaagaagcttcgccgtttctaacttccactcgatagaaactctttgctgtgtctctgtatttcaaaaaaattttccatatccaagaaccacaagttgtattctctttcactaaccaaaaggagcctcttcgaataagatatttcttaaccaattccacccaaagcgaccgcctagctgagagaatgcgccaaatcaacttcaaaacacagactttatttgcttctgcaatcgagcgtaaccccaaacccccttcttgttttggagaacatacttcagaccatgcaactgtcacctttcgagaatttaaagctggacctgaccataaaaaagcagaacgcaatttatctatttcccgaatacacgcgcttggcagcctgaaagctgcaatccagaaatttgtgagactaaaaatcaccgagattattagttgtagacgcccagcaaaggagagagctttaaccgtccaagagtttatttgtgatctgattttttctattaatggtagataatctgaagctgtcatccgtctcgtaagtaaagggagacccaagtatctcaccggtagggctccatattcaaaaggaaactgttggagaatctcttccttttgtgtatctggaacacctgccatatagagagtagatttctcaagactaatctgtagtcccgagtgctttgcaaagtcgttgaacacctctaaagttccctcaattgatttcttttcacctttcacaaacaccatcaagtcatccgcaaaacagaggtgtgtaagtttcaacaacttacattttgggtgatatgttatccttttgtcatatgccgctttgtctatcttacgagatagaacgttcatgcatattacaaagagataaggacttagcgaacacccttgcctgagtcctctttcacttccaaaatatccagctagctcgccattcacttgaactgaaaaggaagctgttgtgacacaagtctgaatccaaagaatatacttctccgggaaatctagagcctccagcgtgttgagtaaaaacccccattgaactgaatcaaacgctttcgatatatcaattttcatcgcgcatctaggagagactgattccttatactaccttaattatctctgtagcaaggag

SEQ ID NO: 15675 - DNA, 525 bp, Arabidopsis thaliana landsberg
tctaaacaattttagactaatgtcaaccctatttattactgacgttaaacacttaatactacatatattccgtaacatacataacaaattttttatttatttttttgagtcaattttaaactgacgtcaaccctatttattacttacgttaaacacttaaaccctgtttctattgtagtgatatatatctcaacactatatatacacatacgtctcaacacctttgtataagttaaatattttatcttctagatagatatcacccctctaaacaaccactacggttaattgaaaagatgaataacatctcgtttttttttgtttttcatgcttttgtgtgtagggttgggtgatgcgaagatttgggggaaaaatttagtacaatttaagaattctgttgagggaaagcaagtcaatgtcttttgtaaattgaacaacaaacaactattcgtagcttttatagaacctggagaaatctatgatcattggtttcatggtgaatttgtaaccacaaacaaaatggat

SEQ ID NO: 15676 - DNA, 364 bp, Arabidopsis thaliana landsberg
tctaaaagagtgtagagttataactaacaagagatatataatccaaaagtaaaggtatacatcagaagcagcatcaaactgcaaaagcacaggaactggagagccgagagtaggtgtaataactcctgctctttcccgcgtcttgtgatccaacacctctagtttaaaaatgatgatctcaagcctgtatcaaacaatttaacacatttgtgttgtgcatcatatggaacgatgcttctttcggtatctatttcactaagagttttggttttaacaattttagcagaatccaatttctagtgaataaagcaaactaattcagcaacagttcaaaactaaaagacgccgagagtctgaataaccc

SEQ ID NO: 15677 - DNA, 1124 bp, Arabidopsis thaliana landsberg
cgagggctcaattttccttcatcagaatgaatgaacactaaacatcttaaccttctgagtcctgacaagtcttttgtggttgaagtccatctttcttctggaatttggaagtcaatcgctgatgaaggtgttctgttgatcagatacactgatgttgaagcttcttcagcccataacctttgaccgagaccactctcgctcaacatacttctcaccttgttcatgatagttctgttaagtctctcagcaattccgttttgctgtggtgtataggtacacgtcctgtgtctcaccattccctcttgtttgcaaaaatcattaaacttatgattgcaaaactctagaccgttgtcggtgcgtaacctcttcacctttctttcactctgaacttctaccatctttttccataatagaaaggcatcgaatgcttcgtctttggttttaaggaagtagattgaaactttcctggaccagtcgtctatctagcacacattcgatattcagctttcagaagctcgatatgaactgcgtttagcaaaccctgtcacataaaaacaaacaacataaaaaactataataagaaacaaacatggaaattattatattaagacgcaccatgtgtttatctgagatgatggtaatgtctgctccatcttcaagtcccaaatcttttttgagaagttgcacaaaccacaaccaattaggattatcctctacctcaactactgcccaagcaataggaaagattctgttatccccatctctaccaaccgcagctaacatttggcctttgatatcccatttcataaacgcagtatctaatccaataataggtctacatgatttcctccacgagtttttcaaagcttcaaaacaaacgtagagacggtagaatctttgcttgcttccgggtactgcccgggaattgtctcaatctctatagttgaacctttatttgttttaagtatctctccttgataatcccatattcttgcaaaatgagtttcatgactagcttttcttttctctgcaagcaacgtctttgctctcctacactgatgaaacactaacaatcatattgtactccatcttgatttcgtctaccatctcttgtgatttgattt

SEQ ID NO: 15678 - DNA, 930 bp, Arabidopsis thaliana landsberg
aatacatgtaggtatctgagtataattgtgaacctattaatgttggttatgtatacttcgggtgcatattggaagtatccaaaatgaaaatgataaatccatatatcttagattcttttagtaattcatatatatttggatttatttgggataaaagaaaccaacgttataatactctgttagataatttaagtattttgattaaatgtagttatatttaagtaaaaagcaacaaacatatttttggataatcggatatttcatgtagagatgagtatatatgaataaaacctccgaatccgatccgaacccagatatattttgaatatttttggttatttgtgcatttttactaaaataaccgaattaatccgaatcctaactgaaaccaaaccggattttttacaatagttatgaattccctacccaaatagattcgatcgccgaaaaaaagaaccgaacgaatacccagtgcccacgcataacaagttaacaacattaatggtgaatttatgatgaacctatctttgcctggagtcatataaatagtgaattttggtttggtctttaaatattcataatttatattggtcagtttgcttattagacgttttttgtaataaaataccgaattggtttctttaaaattttaaatatatagtattggtctttgagttttttggtcaacgttaatattggttctttaaatattttaacttttgtcgttttcaataattcttacaactttctttattagtataacaacaatataataaaactagtcttactgtaatttttaatttactaaactacattaaattagaatgcttctttcgtgcatctcacgtatattgaacatatccagcttactgacagataaccaaatcataaactcttttgttaaaatattccaaacctgttattaacaga

SEQ ID NO: 15679 - DNA, 1361 bp, Arabidopsis thaliana landsberg
  unsure (1)..(1361): unsure at all n locations
actatagtttaggatttcgtattatagtttgtctttagataagataacagtgcgatttgataggagtggagtgggatgatttcaaatatgctttcactattgaaagatatgaaagtatttttaacattgtgatttatccattctatgagctctatcaaactcatatcttcctcaacttaagagtccgagtgattacgctaccgttttgtaagtgggccgttattgggctttgagatttaatgtgatttgagttcaactagatttaggatttgcgtttactcgatctctacgtttctctaataatatccacagccatgaacggagaaaagtcaccaccgattacgatgacgtttctaaatgataatggtttctcacattgttttttttttcggtttgtgttacatattttcattatcccaaaccaccttttgtattcgattgtatctttgttgcatgtttcaagagctcatctcgataatggtgtctttgttgcagattgtatcagtcaccaaaccacgcagcaccaaaaggtgatagaagacaagttattggtgtaaaagagtgtggtgaaacttatgttttggcagagtatgatggcactttctggtctctgctcgactcaaaatggtcacttaagcagacatgcaatcctgccacagatggtcctctgtttgagctttccggtactcgaatggtgaaagtttactccgggagaaagctggagtatgagccaaaacattgctcaaagctaagaagcgagcaagatttcatgactgctgttgaattctcaaagcaacatccttatggtaaagctgtggggttactcgatttgaagttcggttctattgaggtaacgtttgcaactttgatcttgtaatcaaccattttgttatttctgacttggggtttgtttcaatatgtagnnnnnnnnnnnnnnnnnnnnnnnnnntggaatggtatcttctttcatactcagtgatcttcttaagaaggaaggctttagtgcagccgcaaaagacacggtgaaagctaatggaataacagaggaaagtacggagattgatgttttgagtcaagaaaagctagaagaagaaacaatgatggatgtggatacgactacaccagttgctgtagcggccgagaagatcaacggtggtgctaggtgcttttcgaaggagctaagtgggaacatgattgaagaagaaggtggtcactgtggtggttgtggaggttgtggtggatgtggaggtggaggtggatgtggtggtggtggtaggtgcggtgggatgacaaagatagaaggctgcggcggcggatcctgcactggcggttccactggctgcggtaattacggtggagct

SEQ ID NO: 15680 - DNA, 875 bp, Arabidopsis thaliana landsberg
aaattggaggtaaaaccccggaatcgagtcatcagcaatttgatctaagagtttctttgccagatctaatagaaagaaaattgatattgaagctaaatggatacctgttctcgaacttcctcacttgcagaactaagaagtttgacgaataaagggacagcaccactatcaataatgaccctagtgttctcagatgtccctgaagcgatattggtaagcgcccaagctgcctcaaactatagttatacaagcaaagcaaacagcaaaagccatcagcatatgaatcaaagcaccaagctacacttagatataagaaaggcaagctcacctgaagttgagtgaagtcatccctggaaagaaattgcacaatgcgaggaacaacaccagattgaacaacttcattgattggaggatttcgctctacaaaaaattcaaccaaccacaataagcaaaaactaaaacccacaaaacaatcaaaccctaaacgccatgttaagagatttataaatcacgtaccaattgaaagcaatctcctgaagctagccgtcgcctccaattgtaagtctctatcctctgacattactccagcaatcatctgttgtatattctccaactgcaattgaatcagggcaacttattatctaacctcaagcaatgcagattctgaaattagggttcagtaaaccccaaaattcagtactcctgatccaattatttatctaggtaactagatcagaagctttcgatttcattttaattcaccgagataccctaactagttctcaatctaaattcggtaccaaacataaacgagagaaacacaatcaattagatatagaacacgaagaacgtactctcgtttccgtaaggagaga

SEQ ID NO: 15681 - DNA, 1392 bp, Arabidopsis thaliana landsberg
tacttactaactagtttcttttttattttcgtctatgtaggtcgatactgggttgcacgatcattttagcaaaattatggtcggtattttacttataacgatagttaagatcacgattccctaccagtcatattgacccaaaaactgatcgttaaattaaaaactatcagttaaataacccgttagctggtaaatgttttgttggggttttatatattcggcccaaattattttaagttaagtgacgaatgatgtgatggttttagggcgacgctgtcatgggagttgaccatacgacggttcttaacgaccaggttagatggtaaacgtagatgaataaataagtgacagggttttaggagcctgcgagtttaatttttgttgatttcgggaaatctaacaagatacttaattgataacaatttcatttactgttaactaactcttaaggttctaaaattattagttacttttattcatttgtgtttaccagtgggcaaattttgtgctttcctatctaggatcttaaccggtcccccgccagtggtgaagaaggtcagggtatctcgggacctttgtcaagccctcccccaaaatctgaaataaccgaggttagttgtctaattttcttagctatcagttacctgatattgctgttagttgctgactttattactaatcatcactccattcaggataccactctcggatctgatgttgaaccaaatacatcgacctccggcatatagatggaccccattccaaatgtctctcctgctgttccaccagtcggtccacccattccaactgcggtacacgccgaggtttagtactcacaaccttattctataaatacctttgtagctgctaaagatttaaatatcctgtgtcaggctgctgaagattttcctgtttattcttcacaacccaaaacaattgtccgcgaggaggtttgtctgcatttgttttttcgggtgcattggcgatgtcacttccttgttaaattttcttattattttttttagatcgtgataactaggactgttaactccaatactcccccgagccagtcgatcccttcgaaggtttttttctcctttttcattatatttaatatcattattaggtactaaccatgttacattcgtaacagtagcattatttagtaacgatactgaagcatgtttgttaatgatagtaacatgaataaattgtttttgtttaggttgcggatgatgcttctggtcgtgctactctgctaccgaccacacaggtaactattttgcgaccttagtaattgtaaatctgacaattaaacaaatctccactgttcatttcccatttttattacctcgcctcacatgtatgtttcgtttttcaaatatatacgac

SEQ ID NO: 15682 - DNA, 748 bp, Arabidopsis thaliana landsberg
tcatcatctgaaaggcagttaccttggaggaaagatataatcgcagtcctccaatcttcactatgaacaggagatatagtgagcactgctctttcgagaagttccaccgaagggctcttattgtctcaaaaaatacttccgaaggtagaggcagcccctgtgccgctgacttggctaacagatcagcgtgctcattttctcctcgtggaatattcttaacaaaaaacccttcgaatgaagcttcaagccttcgaactgtgtccaggtatttctcaagtttcggatctcttgccttacaactcgtgtcaatatgaccagaaataactttggagtcggttttaaggaccgcccttcttatctccattgcttttaacttccgaagccccaaaagtaaagcttcgtattcaacaatattatttgtacagctgaaatctagccttattgtgtagcatgttctgactttggaaggtgcaactaaaacagcagccgcacctgccccgaaggttccccaggaaccgtcgcagaatactgtccaagcttcgacatctttatttgcttcttcttcctgagccccctggcgtccaatcagcaatgaagtctctaacgcctgggactaaattgaagatctatgcacatagtcaatactgaattcgttaagctccacagcccactttccaatccttccagtagcttctttgttccttattatatcctttagaggctgtgatgtaggtacaattatgtggta

SEQ ID NO: 15683 - DNA, 522 bp, Arabidopsis thaliana landsberg
atgcagcttcctgaaatccatcagtgttctgattgctatcagctgattgattgaattctgcatcttcaatctccccctatttgactgagtttgatacacaagcattcttccattgatataacctgaaactcaaccaggagacataacacacaaccaatagacaaactctagaagaacattctagcataaacaacataatgcgattagtctaaaagttgacaatgtgttaaaaatattagagactcatgttcacgatgatacaatcatcggtttaaaaagaacaaacaaaaagaacattgttttggtcagaattacaaccgagcttaaaacaagaaatcaaaaggaatcaaaataggctcccccacaacttaatctcccccagcatcatcagttatcgaagaatccgacttatctccccttgcttgagcacataacttagccaaaaattatgtatacaaacagagatatacaattcaggtgaagaagatcacacagaacacttacctgcatctagagcagcct

SEQ ID NO: 15684 - DNA, 993 bp, Arabidopsis thaliana landsberg
ctttatcaaactcttcatatcctccatctcgaaactgtttgatttttttcgaaatcgaaaaggtaactgattgattttcttgaaacacacacgaagaaagagtttttgctttgtcttgtttttttaagggtaaattgcgcacagtagccgttgacccacttttaatttcagattttgacattgtggactgcgcctttcatttcttagacattcagccaaaaactgaccagcccctgacgaaattgaacccggtttgtacgtacggaccgcgtcgttagaatccaagtgaaccgggttcgtacgtacattgttcatcgtcgagaaatgcattaaatgatttctgggtttcggcgaatttgacacttgagattggaattaaatttttaaaaaattagttgggcttagaagtttttaatgctaaaaagttttgacaagattaaaactcatgattacctattataatagagattatattgtaagatatttacataattgagattagaattctgggaaaaaaagaaattcgaaattgtgttacggtgaagaatctgaagttttcagttgctgttttacaaagtttgaaggattgaaggagagacaatctgtgttctgggtaagaaattcgtgttaatcctattaattacacttgagaacgtgatatgaaaataatgatacgtttttaaaaatttctgggttcataaattgttttgttggagattctttttgtatttgtaaacccaaaattatctaaagcaaattgagaaccgaatgagtattcaaatatagttatatatttaacataaattatatttagacttttatattccaattacccaaattacagttataaaatcgaagttaacgtacactcgtacatttatcaaagaatatatacgtacactagtaattatgtatctggtgaattatgtaaagataaatgttttacgtacacgaatacagataggcatggtagaagtgaaatgaattgtaatg

SEQ ID NO: 15685 - DNA, 596 bp, Arabidopsis thaliana landsberg
cctttgtaactcttttctttattgatgtctttatgctttcttacttgaatattctgcttgtttcaatctctatgtctgagtagcttgcttgttagggctagggtttatcattaggggatcatatggtttagtagatcgccccctttctaggctatctgtagaattcttcatctttaattgttcttaatgcttgttctagagtaattaactagaacttgatcttaggttaataggtatgcccaccataggtatctattactggatctatcttagatgagcctagtacttaggtgaacttatcaaacctgattataatgcttgcttagttctagggatttacaagagagttgggatcaatactattaagcacagtgagtttcgcggaacgccactggttactttatattagtgatttgtgttctataatggttcgataatatttctaatttattgctagatctactattctgatatttcccgagcatttccctaaacccaacatcttaatcatctgaatctaaaacaaacttttaattgctttcttgtcttttacttttataatattttatgtttagctttattcgaaacagttagtc

SEQ ID NO: 15686 - DNA, 1855 bp, Arabidopsis thaliana landsberg
attcaaaataattcaaaaattataatgtaagaatagcgtaagaacactgttatttatgtttttatgttttgaaattcggctaactttataatccaatcaaggtaattacagaaagaattattatttgttcatttcaagcaaaaaaaaattaacttctttgaaaaatatttttttactcttttatcacaaaagtcctttaatcaaaatcttctaacactaaaatccgctttttcttttttcaaaacctacactaaagttcattagactcccaacccaaaactggtagtagtttcttcccccagtaggctgatatcttggcttcccgcggaactgcaatgcatacatctatcatgtctgatgctaacccaagactagaaaccaacttttatattatagtaactcagccgatatattatctggagacaaatataacttaattaattatgtccatcaatccatgcaattttcacttaaggtattatcaactttaattttcatcatcctagatgcgaaagataacatagaaagcccttctctacatctctcctagattggttgatttgcagcatctaacatatcataaaagcgttgcgcatctacattggattcttcactaatattttcagcaaatgtatagaatttgtgaagtttacacaaatcacttaaaatactagattgaatacacccaagactcgaaaccaacttctgtatttaataataactctcagccgatatattatccggtggcaaatattccttaattaattctgcctatgaatccatgcaagttattatcagctttaatagtcatcatcctagatgccaaagataatctagaaagcccttctctacatccctcgtagattggttgatttgcagcatctaacatatcattaaagtattgtgcatctacgttgggatcttcactaatattttcaggaaatgcagcaacagtttcatgaaatgcatccataaccatatcatgaaatttattttcctggttatgtccataaccaaattgatcaggtacttgctgaccataattcgcatcattattaaaattactaggttgctcgacaccataatttgtattactagttcctgctctatcactacaaccctctccatgacgtaaccaaacatagtactttggcataaatcctctattataaagatgcttattcactacattaaattccaaatattactcattgatacacttacgacatggacataatattgtaccgttctcacgagcaaatggttcgtttgtcgcttgatacatgaaaccgcgtagtctgtcataatactctctcgtcgccttaccggtcgcttgatctctatgattgtacatccaacttcgtaatgtgtaaatctcatgctctccaccccaagacattattattttctttagaagttttttttttggaaaagattaattttgtttgtaagtagatgttatgatttgagttataatttcgtaaatgttatgttggttatttatagaggtccaaaaaaatattgcaagggatttgctaggcaggttgcgagggatatgctaggaactgatattttttgctaggaatttgcgagggaagttcacctagcaactagaccggtaaaattatttaaaacgtgcttacctaacttgccaatgactcgcaattccgttgcaatgtttactacaaaataaagtgacgttgcaagtttgtcgcaatttgcgaggcgttctttgtgcacgcaaatccctcgctatttgcgatgcatttgcgaggaattctgaattccacgcaaatttctcgcaacttcgacgcaattatgcgagggacttttcccctgcaaattttgcgacgga

SEQ ID NO: 15687 - DNA, 1535 bp, Arabidopsis thaliana landsberg
gcgacctcaaaacttgttttatttcgtttgttgtcagtatttcagtttcagacgtttttagcaaataaagttctcatggtgataaaaataggtttgaaacagtatgactctgtctttaagattcagtttcagatagtaataataaaattacataaacaaagacaaaaaggtaacaacatcaaatggtctataatggcaaaaagatgacactattattcccaagtttacgaatcacaaccaaaaaggaaccaaacacttaatcacttggtaagccaaggatatacgtcaggcgatgaaggaagcctcgctgttaaaacctcaacaccagtctccgttaccaatagggtatgctcaaactgagcgctgcgttttccatctgcggtaactgcagtccatccatcaggccatgttcgatccctccacccccctatcatgacaatgcccttatggttgtaaatagataactcaagtatggagtaacaaatttaaaacatttaacgaatgcaggttaaggacatttaacattgaactcacctgcgttgatcattggctcgattgtgaaagtctgacctgctttcatcactccaactgctttgtttcctgattttgaggttaaggacgtttacactggaatagactaacaagacaacaacataccatctcacgaaattctgaagtaacaaaggatacttgcatagtgaggaatgtttggagcacaatggaagagatctccaataccatgaccacaataagatctcacctgtttaactacaagttagtttttaagtatacagacaggtgctgtgattatcctaaacagcctataaagaaatcaagactttaccactgataacccagacattgtagcatggcggttgactatctctccaatttcacgaaatcttactccaggtttaactgaaagagacaagcatagaaagtcttagcatctcttctcaatttttgaatatattacagtcaaaacataaaagctaagagcaggtaagaacttagcacctaccaattgctatagctttctccaggcactcgtatgtgcacttaaccagttgacgtgatgcttcgtcaacgtttccaacaaagtatgtctcattaaggtcacctaccgataaatcattccatgagacggcaaatctcaacaagcaacaaatataaatatcaatttttcagcaggagaataacttaccatggcaacctttataacagactgttacatccacatttactatatcaccatcttctagtttccttaagcaattaaagcacgagtgattagcgtaaaatttcctaggtcatttagctattttgtcagaaaggctcaaataggtctagatagttagagcatacctagcatccggaattccatgacaaattacttcattaacagatctgaaagggaatattcagaacatagactttataagcagagggaaaacatggtagggtgataacgtaaacacaaaaagaagtccctacgtgcagcaagatttccgaaaagaaataatatttgagggggg

SEQ ID NO: 15688 - DNA, 583 bp, Arabidopsis thaliana landsberg
cacgattttttttaaaaatcctaacaaatcttcttctctccgtagataatttttcagtagccaacaagatgaaatcggagaatccgtgaatccaacacttctccatctcgatttataaattttccatcacatattagtacgaacacctagaggtcatggaaaacatcatcataatatgaatctgcctacaaaacgccaaacaatgttacaaaaaccaagcaacccaataatgaggcatttcttcgaacacctggaggtcattaaaagcattatcataacttcggccaaaagcttcgaagaaatcagtctagcccaaattgatcaactcaaccctacaaaaccaaatccaagtgttcataaatctgacccataacaaaattgtaccagcggaggcaaaagagaagtataaagtgggaggaggctgacacaattgaatggcaaagaaccgggctttcgaagattgtttggggtttcaggccaacgaaaccataagtgagaaagaatttaagaagaagaatatggagatgagagcaagagtgatatagagtgatagaaattgctaaactccaatagatcaagggta

SEQ ID NO: 15689 - DNA, 918 bp, Arabidopsis thaliana landsberg
tgacgggtctttcgcattcatctgatcccatgttactgaatctaaaggatgtaggagttttccatcgttgcttttgttgctaaaatgccaccttaaatgcttaaccatttcctcagaactaaacattctcttaagacgtgtgataatactgtattttactcatttctgacatgtatttatcatcatttagcttagtgatcactcattgtttcatatcatttcccatcacatttagcttattttgcacacttaggcatttaggatcatcttgcatacatattgcatgttttggtgtattttcaggtgtagaaggagcttacaaggattctactcgaccctatactctatccaaccaggatggaagcagtagagcattctactcgaccagttcactcgatctaggcagccacagaggaggcagcaattcactcgacccatttactcaatcaaggcagcctcaaaagaaacttcagatcgatctactcgcccctcctactcgatcctctactcaaaccatttactagaccaagggcgaccaactctaccagacttgttgatctatcaaagcgtcttcagatcttcctcattccccactcaaccaaacatctgagcatacagataggagaggaagaagcatctcctcgaccaattgatcactcggagcatggactcaaagaggcagactttgcagcaccctttttactcgatccccaagatcgagcactcgcccaaaccgcctcaagtctctcgtcttctagtgaatctagggttttcaacattttactataaatagattgggatttgtccaaaggatctagcttttatccttttttttttttgtgttcttgaatcttcaaaacttaattactcttaatctattttgtttttgcctttagttctttgagtaaataatgttta

SEQ ID NO: 15690 - DNA, 458 bp, Arabidopsis thaliana landsberg
cttctattgagtttactggataaatgctcaaactaatctaatttggcgtgcttatgaattgagtttgtatttaaattgttcttctacttttagaaccactatcgattaagaattctccttcatctcctttcttcttcctttttactcaacttgatttctgaccttatcatataactgcttcatgatcaggaatctttgttttatttgtttcaagctatctaatattttattgggttgcttggctaagtagtcacttttgagaacataattgggtaatagggcaagtcactatttgcaattggcaaaagaggtaacttggaatgtgcgtgtaatagaggagcgtgaaatagaagttttggtggggtaagagatggtgtttgaaatgaccgaataatccttttgacaggaaagagagataaatgggagacactgggggagatagagtgtttgagcgaaat

SEQ ID NO: 15691 - DNA, 1308 bp, Arabidopsis thaliana landsberg
  unsure (1)..(1308): unsure at all n locations
aatgtgtttttccagtagtttttttatacagagtataaaggctatagaagagcaccattttaacttactcatgcatatttttaataaatttatttttgtttttaacattcgtttttttgtcctcttttgttattttataaaattttatttaaaaataactattgttttgcaaatgtttgctacttaatttgttcatattttgtttttttgccccatatttattgtttgattgatggatggttaacaattttaacaatacattgaaactactagatgcaatgataggtaatataagagttggattttaaattaaaaattctttgtaacagttagagaggacaaatatgaaagcaaaagaaacttcataaatttatttattttgaagctttatgatagttcatcgcctgaaacattattggtggtatttttaaaaccggttccaactctctagatgatgtatttaagttataccataaagataaacttaaacatttatttgtagataaaacatgtttcacatgtgttgtttggacagcacccgcttgggggttttatgtcgcgaaatgataaaatgtagcaattctttctcgccactctaatcccatgtaatgatgtttggtttttcttccaacatgcttcagccatggtggtgtgtttagcccattcaagacggcttagataggccttcccctcttcagttgtgcctcgacataataatagcatggcatacatgtaggtaacttctttctggcctaaattagctgttttaccaatatggtggagaccaaactcagaataatcaaagacaaagtagcgtattatacgttttatgtagtgagcatttgggttgttgttgtcaaaacatttcttcatagtaagaaggtttgcatgccgataacggttacttcaccaacggaacaagattaagagttttgagcacttgtttgtcagttgctgatgcacctagttttttgcatacaaaaatgcaattgtgaaaatctttggctgatgttgctccaactttagcaaatatttcttcaagtatatcttgaggaagtgcctctaggcgactaatatcagctttgttgggattcattgattttgttagacatatttggtagttgcaattgtgtgataactttgtttatttgtatttgtttaaatagattagtgtggatctttcgtcttcttaacgtataaattatttattttttttattgctgnttaaaagtattagtttagtattagttttttttttttgagagataatgtctggtggcatggttgaaaaccattagtactatttaa

SEQ ID NO: 15692 - DNA, 889 bp, Arabidopsis thaliana landsberg
tgcaggctctagaggacaggatcccgtgggtggcgccggcaaactcgtcggcggcggaacctcttccagttgccgtggcgggaggcggctccgaagccgtcggctcagcgaccaggcacggtgcagctatcagcgccacggacgactcccgcccttccccccgatcactgagggaaggagcgggccaccgccggcatggggccgaccccaactcggcacactcccctccccagcactagtgatgaaaatccttgaggctgagggaggggcagaggccgcagctggctcgctttcccccaccatcaaactggaggtcacatcttgggtgacgccggtggaggggtgcaacgggctgcatgatgaaaatccttgaagccgagcgatggctgaaaggtaccaacttccgcgaagttgtgttcctccaacgacgacaagacgaaagcaacgcgagcgctccccatccgggggctcagaaggtggaagggcgcgatgcatgaggagagtgcgaagacatggttgccatccaagggggtcaccctccttttaaaggcgactctccccacttgtgtcctcaactggcgcggatcgaatctccttcaacacgctccaaggtcctccccctacgacacgggggctgggtcccacgcgtcatgcaagctggcccaggatagaaggagccaaaaccgccgcgcgcggtgcacgcaactgcccagcggttacaagcattcctccactatctcccggaccagcgggtgaaagggcggaccgcaatgcaggcggcatgcaaccgcaccaagggggcgcaccctttcgacttcgatgcgtccagcatggaggcccaggccacatgtcatgtaacggcacgccgttactacatgcaagaaactgc

SEQ ID NO: 15693 - DNA, 746 bp, Arabidopsis thaliana landsberg
cgaacggctctttcgttgattgccctcaccatttcttctctactttatctctccttcctcgaaatccgtttgctttaaccatacatcattattttcccgaagacaaaacgaaacgcttttgtctctctctcacttcccctgacaacctgcacagattctctacatgtaactttcaattaaatttgtcccccaattttattcatcataaattctctgttgtatctagatcttgtccccgatttcatcatctttcaaaattatcatgaatccaacatcttatccaccaattgttatcatttaaggatttcatattttatttagatttttcaccatctattttggtcaatagattagttgagcattattgtcttcaccgatccgaatttattcatttttttcttctattgtaaaataacaaaaatatccagttataacatattatcttgtctaccattcgatctaaatttgtcccagatctaactctatcactcatttgatatgaacttgtccccgatataacatattatttaaataaaattatatgcaattgtaaacgtgtaggtgaagacaataacgttcaactaatctgtggaccaaaatagatggcaaaaaatctaaataaaattcaaaatccttaaatgagaacaattgatgaacaagatgtgagattcataataatagagcaagatgatgaaattgaggacaagacgtagacgtaacagagaatttctattcagggacaagat

SEQ ID NO: 15694 - DNA, 1066 bp, Arabidopsis thaliana landsberg
cgttcttaatgcctattgctttctgatgaactggaatttgtgtccaaacatttccgcgcccaaaaggtgttcgattaaatgtctgaaccactaattctagagatttgtggctctgtaccaaggtattggttgcagggagcgttttggctttaatttgttgattcgtaatgcttgttaggttggctctcgtcaatggtgattgagtcagggactagtttaacttgagggtctctgttgcggtggcacttagatttggttaaagaacttgttgtctaggataatttattgagcatgttaatcacctgtaaactgaggaaacaaaactactcaattaccccatcctcgggaattctttatctaattgatttctttatttactctgctattgtttactgcatcttgttacctgttgcttagtttttgcatttctctcctgttactcgaccagatactcgaccacctagttgtcggcaacagactgtgtagtcgagtatctttgtcagtgtctttgctgtttactcgacctgtcactcgaccacacccagtgcttggcagcaagctgtgttggtcgagtgttttgatttatctgtttgaatttatgtttcctgcatgttcacttaggactgctagaacacccgaaaacctgttattgcttggcttgactctgtgaactctgattgcatcttgattcttagcatcacacccatttggattgacaacctaaaatactacaacgacatgattggtgttttaggataattgactaaaaaacaatcatcaatttggcgatgttgccaattgggtgtttgtttgttacatttgagatttcagacttgtttagatcaagttctttttcaattttcatttcggttactaactgtgtgtttttattgttttcttcttaatccagtacacctctactttatgcaaactcgatcaacaggcaaccagattctcctttacaacgatagcaccgaccgcatagctcgtgaactcaaagaaaggagaaacacaatcaaccttgtacctcagcaaccattcgaaatggctgacgaacaaaatcaac

SEQ ID NO: 15695 - DNA, 540 bp, Arabidopsis thaliana landsberg
  unsure (1)..(540): unsure at all n locations
cggagaagctgctactaaattcgcttgttaggtgatgatgcttttcatgcccgctacatgtttgatgatttgcgtcattatgggctttacttgtttctcaatattgtttggcgttctattagctgattcatattagatacatctcatttgatattagtatcactagatttaagaaatttcagtagtttgtgtgcttaactaacagagctgcattaagtcattgtttcttactttgttatgtggttggctaacagatatgcattggattgtttcaagttatacgaaggtaagttcttttgccttaacctcatgaccatttaatggcttatttctttagaccccaatagaagaattttgttttgagtatacaaagctacttgttggtatgcaagataccaagttcattacacgtttgttcaatctagatctttntagtgtagtaatttggaatggtctgtctctatatttatcaatggtctactagganattcttcattcttcggacanagctnttaacatggctaanatagagtatttgac

SEQ ID NO: 15696 - DNA, 735 bp, Arabidopsis thaliana landsberg
cccaacgttatagtaactcaaagagtaggtatataactcaaggaaggacgagttacagaagcactaacctcgagttgctgtatgcgatgctgtgagctgtcgtgccgaggtcgtatggctggactcgagcccgtgctccttgctctcacctgagacagagtgggagtggaggacgagtcgattgccccgtcggcaatccagtaccgcccatgtctcttgcctcctccgaccctcatgagcacatcggggtcgatcggctcggtgctcggatcatagtctgggccatggacctcctgcgccatggcggtgtagtcatggaggcggctgtagacggcggggttggtgtaggcctcgggtccgtcatccgggttgtaggtgacgtcggacgtcgccttacccttatgggccatagtataggccgagaaggtggagcaaggctgccaccatgtgacgccgactgcaacgaaaaccaacgagatagttagaaataatatctaacttagtgctatatatctaaataaaaaaggtggcgtaccatgcttcggcatattggcccaggctccggctgccttggtggtgggaggggccttgcatcatcaaacgccgttcctggctagctgtgtgcgctcgtccactcagccgaacaccactatccacatctgctccaacacagaggatgtgcggcgcacaatgtggaatcactcaaagtaacacataaagtgatacagaagataa

SEQ ID NO: 15697 - DNA, 2543 bp, Arabidopsis thaliana landsberg
gagtctaaagcgttggctttgattctgtttggttgttggagagattttgttggtgaatttgctcctgtacggttaattggttttcagcagtatggtttctcctcatgatctggaggtaagcatagttcattttaggtttttgtttgatgtttttgcttcggagtttctgttatgaaggctaaaaatttgatacttaacatatgtagtggttgcagcatagatcgttttaataaagttttgtttctatattttatatgaggttatttggaggatttgcaacaaaggttgctgcttgttgattggatataatccaaaggcaaaggttgttgttagcttgagatcaaatgcaaggtaatttattattttgtatttatttgctgtgatcaatgctttgctgttatttactgtgataaatgctttttggttgatataaaactgttgttagataaacgtcaattgctcttgtaggtaaacgtcaaatgctagttcttatagcatttaaaactgtaaaactgtgatgattgcttggtaggctaatttaaatcaatagtatttagtgtggcattgattgtgagctgtctaacaaagccataatttgcctttaaaacacaaaaccgtaacctttgatttttaaaacacaaaaccgtaacctttgatttttaaaacacaaaacctgaaacaaagatatggattcaccaaatccatatcatcatacttcaagctttataaaccttttgaacagtcaagatgacagtcacaatctcccaccaaatccatatgaatgctttgaacttggatcagcaaatgtccctgtgtatagcactgagtggtctgatgatgatccaagtgaagatgaagcactaattgctgggaagaaagggaagaaagccaagaaaccaaggaggaattggtcatcaactgaagatattgttctcatatgtgggtggctgaacacttccaaagatccgatagtgggcaatgagcaaaagggggcagcgttctgaagtccaaagctcaaaggtgtggagaaaagaggccacatacgttgtaaacacatgtgatcaaaagtgaatgacaccgtgaacaagtttgtagggagctacttggccgcaagcaaacaacaaactagtggtcagaatgatgattctgtggtgtctttggcacatcagatcttctcgaaagattatggctgcaagtttacttgtgagcatgcttggagggagcttagatatgatcaaaagtggattgctcagtctactcatgggaaagcaaagagaagaaaatgtgaagctgactctgactctgttggcgttgaagacaaggaagctcgtcccattagtgttaaagctgccaaagccgccaagcaaagtccggttgaaggtgaagaaaccaatgctttgaaggagatacaaagtatctgggagataaaagataaagatcacgcagcgaaagagaagctaatcattattaaagagaagaaaaataggactaagttgcttgagcgtctgttagggaaaacagaacctctatctataatagagattaatcttaagaacaagttaatcaatgagttgttggcttgagtttaagttttatgttaagtgtttgtttctagtttatgtttgtctaagtgtctgttttaagtttgtttttatgtttagtgtctgttttaagtctatgttttatgtttaagtgtatgactatgtactttcatgtttcagtttatgagtagtttcagtttcagttatgttttaatgtttttagttgtttcagttttagtttcagtattaatgtttcactttatgagtagtttcagttatgttaacagaacatgagttgtagcagtttcagtttcagtaatcatgtttcagtttcaattatgttgacagaacatgagttgtagtagttttagtttcagaaatcatgtttcagtttatgagtagtttcagtttcaattatgttttaatgtttttgttcagtttatgtttgtcttatttttcaatgtttgtgttcagtttaagttatagttatgattgatctttttattacattttgtaggacttggaaacgaccacaagtgccgacatcatgtactttagtttgtcacaaaggagggttctttagtaccgacatcaagtactttagtttgtcaccacaaacttgattgttcttttcatttgtaccattcattattgttgacagaacactattcttttattttgtgtgaatgaatgtacaccgcataataagaatccgaacaccactcctttattgttctatatataattcgttcaacacaactctttctacacaattctatcatacttcaatatttccatcaactctctttatcacaataataaacactcttttctatctaatcatctttatcccctctctctctttctataattttgctaaaatggcaggttcttcttcaaactataatctcgatgacatgttcgatgataagtttgatcaatgttttgatcaagcagttgagagttatggtaattgtcaaaaagtcaagccagggaaaaaag

SEQ ID NO: 15698 - DNA, 472 bp, Arabidopsis thaliana landsberg
gccggataactgggccagggaaactaatcgatttgctgaaaaagtgagtatcctcagtacatgttttctctatgctctttgcacaatgttgttgaatacgctgatggcttatgttctcacaggtggaatttgagactttacttgaggatagcccaccaattagatcaaagagaaggcttatacatataacacaactcatgcaacaactatttagcccacctccggctagggtgatatctttggttgctagctcaaattatgatgttgttgcatatactgctggaagagctgcactaggagatgcatgtagctccagtagtaccgacaggagtgagggcttttcgcccccaaacaactcaaacccgtaaggatactttctgtttatctaagtgttggagcttttctagagtttgtggttctctattgacatgaagcgacccactcttgtgtaggttgtctgagagaacggaaa

SEQ ID NO: 15699 - DNA, 763 bp, Arabidopsis thaliana landsberg
tatgatgatttcaattaagctagaccagtagattataaaataagaagtaaagaaaagcaataaatatcaagatgtaaatcggatgggaaaagagtcaggtttagggtattctcagaaaatagatgatagtagatatagaaatagctaggatgttatcgcactgttctcgaacttaaactatgattttagagtaaccagtggtgttccgaaaaactctttatacttagggttaagataaccggagaagccgagaaatcctatactaaagcatgcattattatcaagtttgattagttcacctagtatctaaaccagagcctttctatgaacctacatgttctttcataaatgcctaggctcatctatgatagttcaaataacaagtacctatggtaggcataggacctattatctaatatcaagttctaattagctactctagaactagcattaagaataatcaagatgaagaatcctacagataaccaagcaagggggcaatctactaaatcatctataaccctaatgagaaaccgtaaacctaacaagaagattactcaaacatgatcatagaagaacaaaacatgattgaataagaaatcaatgcataaaacaagaggagagtagagttaagaaaaatattctctaaagggagtctccacagggttttgctcccaagaacagaatagataaagaaaatagcctcccaaagcttagggtcttaacaatgacctaaaaactatatatatgtcttaaaaacgtg

SEQ ID NO: 15700 - DNA, 500 bp, Arabidopsis thaliana landsberg
ttcttcccctgctgctcagagggtctcttcagaatctccttcgcccctaaatcaagaaaatcaataaagcatacaaaagtgtgttcttttgttaggtaagggtcttatagtttgtttaccttgatccataagtcttagtccaatttttgactggtaaatagctctcatggacagaacaatctttgaatcaatcaactcttccacaagtcttttactcttccggtcaattacctatagcaagaagcaaaacaccaagaaactagtaaagtgaatacatttgttctccatgaggagacgcacataagacaccaactaaagagagcaaaaagaacagaataccacaatatatgaagcacttgaaccagtattcaaaccaacgtcataagttgataagtgtgtccattcacttagtttgaacatccatctgaacaaaaggttgaaaaatatgatgttaagtaagagatgtctagttatttagcttaaaagaagaggttttttac

SEQ ID NO: 15701 - DNA, 327 bp, Arabidopsis thaliana landsberg
tctctttgctggtggactcttgacaccaatcctaggagctgccggaatagagctcggaactcttgatgttaatctagaaaaataccttaaccttgattatctcaagggaaaggattttcatgacacaaggatattggcagaccactaactcttcaagttcaaccatccttagcttggaccttctttgctacctctaccatgtgagaaccaaacaacagttagaacaaggcgcaacatcaatttcatgtcatctccctctgccctgaacatcaacatcgaaggggtgagagaaagatgaccaacagtatgttccagctgactctaaac

SEQ ID NO: 15702 - DNA, 628 bp, Arabidopsis thaliana landsberg
ctggatcttttgttgtgtgtgggattatacttccctatattgtaactatcgaaagaaaactgcatctacggtgattgcggagaggagaaaagaatggcgaagatgataaacaagacgcttgtacttacatatatctacttactaatctacattattctttcttctggagttatactatacaacaaggtgattgcagattctactttatttgtttatctagatcttcatatagtttgtggattttttgcatgttgtagcttgtataaactaggatttgagtttagatacgaatgttgtgtatatgaaatgaaaccatcgaggaagatctttgtgctgtagagtagtactatttcatagactttgttactgattatagaggctgagtttaattagtatctatcgttttttggatttctcttgcagtgggttctatctccgaaatacttcaattttccacttcctataacattgacaatgatccatatgggattttctggattcgtggctttccttcttattcgggtattcaaggtacagcgattacacttccatttagtgaatgttacatttgtccacttgtttggagtatgctacatgctcgtcttatgctgagtactccttataatag

SEQ ID NO: 15703 - DNA, 616 bp, Arabidopsis thaliana landsberg
ttgactcatggagaagtctcagggacaagttcctgctcaacttccaagggtaccacccagacaccgacgccctggccgagctctcgctttgcaagcagctggaaaaggagactctgcgggagtattaccgtaaattcttaacactcaagtcacagctgccctccatcgatgatcagatcgctatccactacgccatcagtggccttcgggccggcgtcctctacagtcattgtatcagagatccaccaaaaacctccaggagctatatcagctctttgaaaaatatgccaaatccgaagagctccaccagcgcaaagttgagtcacagcggaagcccaaagatgccccacagtccagccgcacatggacgaggactccgcaaccagactccggtcgagatggccgcagtcaacagcaagtgcacaacatcgccaaccagcagcctgctgcggacccccctcgtcgccaggaatacccccccagggccgcggaaacggaactcgtggcaggggccgagggcgcgcgcagccgccgcgccggttctactgccttttccacggcgaagactgcgcccaccagacccaagactgcccagaaacgaaggccaccagggaca

SEQ ID NO: 15704 - DNA, 611 bp, Arabidopsis thaliana landsberg
  unsure (1)..(611): unsure at all n locations
ctccttctgttgattagagacattctgcgtaccagaaaatgcctgcagcataaaaacatgtgtgttcctcatctttaggttcaatatgaacaaacaatctcttggagccaatgactgttatacaatcccaactagatataaatacacttgaattaagcatagatgtcaacatgaaaaagatatgaagccaatcaaagcagacaaggccaacttctacttcgtataacaaaagaatcagcattactagagaatcgttatgcaaccagaacacttgtataagttgcagatctaatgggaagaaaggaaatggacccgtgatgtttggtgcctgcctatgaatgatgnnnnnnnnnnnnnnnnnnnnnnnnaagatctttaagatgttttatgctaacctaagaagctgaacatcaggggaacttattactatccttatcatcttaccgtagcctctctctcacagaattggcatgaggactactagcgagccctgaccgaagcacagattcttatagtcctagcacagccactcgacagaatctacagtggagaatttagctcatcttgtgattgcaaggcttcataggtcagaacttctcatgtctgagaga

SEQ ID NO: 15705 - DNA, 531 bp, Arabidopsis thaliana landsberg
ccttagattggaacttcgctttaattgttttgatgactgccgttttttcagaagctaagaagaggttaacgaaaccaagctcaagagcatggtgcaaggctgctagaactacgagagattcagccatcaacggtgaggctacacacgatacatatcgagaagcctgaaatcccaactgtttcgtctggatgctgaaaatccatcttagtcccgccacggtatgaatcaatccaagccgcatcagtgttgcagaagatcagatctggcgagaaaacagcccggggaagggacactcgggaataggagcgttttacaagattttgctgcgccgattgccattctttagctcgcaggattgattgaagagctacttctggagggagcactaccttatctttgaagattttattgctccttgctgtccagatcgaaccaatcacccaagggaagatcggaccctagcctaaaccagtcatgagtagacagaggagccgcttgactacatacaatccttgtctgaaagtactgatt

SEQ ID NO: 15706 - DNA, 984 bp, Arabidopsis thaliana landsberg
taaaagattcatgagcagcagaaaaatggcgttgtactttatccagaaatttgttcaagagaagaattggcattacttattctcaaatactgtttattctctgccacatcttctaatcatgcagagattttaccaattcatgaagctagccgcgagtgtgtatggctaagatccatagttcaccatatacaagaagactgtggtatgtatgcagggaaaaagactccaacaaatatgtacgaagacaatgcagcatgcatcgcacaactcaaagacggatacatcaaaggcgatagaacaaagcacatcctaccaaaatttttcttcacacacgatctacaaaagagcgtcgatgtacaagttttacagatccgttccaatgataatctagctgacttattcaccaaggcgctacctactgctacttattcatcgtatcggattacgccgtcttaaagatctcgacgaatatactcataagggggagtaattgtatgttgcactcttttttccttaaccatggtttttcccattgggttttcctggtaaggtttttaatgaggcagcatttcaaatactttacgagttatggtactataatggtcatcagggggagtgttatgaataaagatggatgcccattataaggcttatcatctaagcccatcatctagatgtttctagggttttaccctttccttatactcctatataaagaaccatttatctcaatggaataacacactcatttcctctatctctttctttgtttataacagttctaatgttcttatatttacgtaactgattagtacacaaattattttagcgaaaattgactcaactaagttcataaaaagaagaaacatggaatttcaaagctaaaaatacaacataacatttctcaagaatgactcgtttgagtcctaatttattttcggatgagaaaagaaaaaaaacacaacacaaccttattgaaatatc

SEQ ID NO: 15707 - DNA, 988 bp, Arabidopsis thaliana landsberg
gtctgcatagacgaatcagatcctaaatgatgcgttgggataggtcaagacctcaacccagcaatacgagaggatctcataacctttctcaaggaaaacaaagacagcttcgcctggtcgagtgcgaacctccgaggattaagcctccaggtaacctcacatgaactcaacgtcgatccgacctaccgacctataaagcagaaacgtcgcaagctaggtcccgaaagggccaaagttgtgcataatgaggtcgaccggttgctcaagatcggatcgataagggaagtaaaataccctgactggcttgccaacccggtcgtcgtgaaaaagaaaaatgggaagtggagagtaagcatcgactttacggacctgaataaggcatgtcctaaagatagtttcccactcccacatatcgaccgaccggtcgaagccactgcaggacacgaactattgtccttcatggacgcattctccgggtacaaccaaatacttatgcgcctagatgaccaagaaaaaacagcttttattaccgaccgaggcacctactgttataaagtaatgccctttggtttaaaaaatgctggagctacctactaacgattggtgaacagaatgttcgtcgaccagctaggtaaaacgatggaggtctacatcgacgacatgctggtcaagtcagctcatgaaaaagaccacgtcccgcagctaagagaaatcttcaaaatcctaaacaaaatcgaaatgaagctaaacctcgagaaatgctctttcggagttccatcaggagaattcctcggatacctagtaaccgaaagaggcatcgaggccaatcctaagcagagtgcagcctttattcaaatgccatcaccaaaaacggcacgggaggtccaacgactgactgaccgtatcgccgccctcaacaggttcatatccaggtccactgacaaatgcgtccctttctatcagctccttcgaaaggagaaaaagttcg

SEQ ID NO: 15708 - DNA, 420 bp, Arabidopsis thaliana landsberg
agataaagctcaagactccagtgatagtaccccattggacaaacacggttagtgtaatagttaacttcaactatttccaaacttggtagaattaacgacgttaacacatcttattgcaggagattactgatgaccccatggatgtgtttgttaccccactacaatcagagcactctaatcaggctgatgcaaatgaaggcaaccctatttatgacactgatgtcaaagatcaaaatgctaatgagaaagatgttgatagccaaatgcaggtacttttataaatacaaacacaactaatcaaagcctttctttaaccatcaaaactacattttcttttgtgctgtctttaatgttaatccttggtggacaggttttcttggacacctataatgacttatatatataagagacattgacaat

SEQ ID NO: 15709 - DNA, 504 bp, Arabidopsis thaliana landsberg
taggttcaatgtattcattcttatttatgggaatgagtgaattttgattttatattttattgtttctttaaaagttaaaaacacaaccatttggaacctaaaatgttaggacttttaggtaagtatacgtagtatatatatattatgtgactcacaaatcacaaacaatcaaagtagcaaaatggtagattggtctaccttaccggaggagctcctccattttatcgccgcccgatcgttctccctagttgaatacaagcgtttcagcagcatctgtgtatcatggcactcctctgtctccggcgtgaagaagaatcctttccataggcgccctctcattgacttcaaccccatcgccccaagtgagacccttctagaggaccatgtcttcagctgcaaccccggcgcgttcctctcacgtgcagccttcttccgagtcactctctcctcctctccgagtaagggctggataatcaaatccgacatggacaccaactccgggag

SEQ ID NO: 15710 - DNA, 1076 bp, Arabidopsis thaliana landsberg
tgaagactcgtgggccgggtgctcgagcgaggggctccgatcctcctctgctgttgcagcgtcccccgcgcctgggatggtagcctcggcgcaccttctcgtcgaggcaggctcgatgatcgtggtggcgatgctcgttgccgaggcggtcccaggcagcaggtgcctcgtcccgcgtgcgctcgggatggaccgaggcctcccgcatgtgtcgggaggacgtcgcgtgatgctttgaggggtcagctcgcctccgggaggcggagctcttggctcgtcgaactgtggcgccttccaagagatccttgagtttgccctggatacgccgtccctcggtggtggatggctctggcatggttcgaagtagcatcgccgctacagctaggtcctggccagacccgctgacggccgggggcagcgctgccctggcattgttgacgatgcggcgctggatgtcccgggcccgatgacaggctcctccagcgagtgctcgacctgcccactattgctcgatgttttgtcggagctgcacaagtcgccctgtttcttcgtcaagcttggcctacatctcgcggagttgctcgagctgtgtgccctgaccccccgcaggatcccgagccacatctagctccgcgggatctcaacgcgagacgcaggcacaggggcgtcgtcgtttcctggcatgccaaggtggttgtcttcgtcgtgatccccctgatcgatgtggaaacactcgccagttgggtcgtaaccctcgtcgtcaaggttgtggccatcgtcagagtagcaggagaggcagtgatcacatgcggacatgaagtctcgcatggcactagggtcacagagtccggagaaatcccaactgaagtcggggtcgtcctcttcctcgaaacccgcgggtccggaggttaagacggccgtcagtcggtcccaagttgaccacatatggtacccggaaggtcaggatatgccttgcgaaagtgctcactgaagtggggtcgtcagtggaggaggactcagtgtgacaaggtctggcactcgccataccttgatttcgacgtgtgttatatcatgta

SEQ ID NO: 15711 - DNA, 829 bp, Arabidopsis thaliana landsberg
tgtctgcgggttgtgtttgtgattcaaatatccaggacaggggaatattcaactcgacaaggaagagtttacggttgtgtagaatgcaatgctcctcttataaatccaccacaaagttcaacgctggttgtggctggccagctttctttgaaggaatccccggtgccattacccgaacggtaaaacaaaatactctcagagcacatacactttctccatcaaagtgataacaaaaatgaactctctcttctctgtgttttttgcttacatttgttggtttatcagacagacccagatgggagaagaatagagatcaactgtgcaacatgtggtggacatcttggtcatgttttcaaaggagaaggtttcgatactccaaccgatgaacgccattgcgtgaacagcgtttcgcttaagttcgcacccgcagcgtcttccttgtaaatcttggccgaactggattattgttctttctctggaaacagaacaagaatctcgtatgagtgtgtgtgtctatactgtgtactgtattttttctttcatgactatttaaattcatcacctcgagcattttgacaacaacaactgtagtctgtagtatgtatgatttgcaacttgaataaaacacactcttgtcttgtaatacaaaatctatactatgttacgcatctgtgagactctattgactcgtgcatgataccccagtctaaagattcacaacagtttcatatgaatctagactcaaaattaggaaccatacatcactgaaattatgtacaaagagatcactgtaatgattcaagaacctacctgatcatcatcagacgtt

SEQ ID NO: 15712 - DNA, 798 bp, Arabidopsis thaliana landsberg
tgctgcccttgctgtcgtccttgccgtcacctttgctgcccttgccgtcaccttcgccgccgtcgccgtcgccatcgccgtcgcctccgttgtcgtcgtcgccatcaccgtcactgccaccctcctcggacgagtccgaggagttcgcctcgtccaaggagacctccgactcatccgagccctcgagcccggcacgctcgatagcccggatgtaggtccacacctctgcagcgatccctgggagtcgtctgagtcgtcagacaacgctgggggagaggcatggaccggcgaacccttggactcggaggagaactcctcctccgagtactcggaatcaccaaactcctccgagggaggagtcgcgtcacgttgcgcttgttgttcttgcccatggttaaagttttgggagagaagaaagggaagaggcagtaaggagcagcgaagatatgaaaagaaaccagagaagcaaaggggttatttatagaagggaaaggcaaccgctcacttctaaccgcggtcactgaacagtcgaaaggcattcaataagcacttccacccacccgaagacacgtcagacagcggacgccgtttcatgcaactctacacccattgggtctccagtcaacagcgcaaaggatatgattacactagccgtcccatcgcattactactcagaggcaaccaggctaaaacactcagcgtaccaagccgtcccttgcccacacccattgggggggggacgcccaggaattatcagtatatttttcaaacggtcacatccgtgcagggcatgcagtg

SEQ ID NO: 15713 - DNA, 511 bp, Arabidopsis thaliana landsberg
catctgcattacgtaaaaggaagtttttttaaacggtatgtagactctagtgctgactgctgtgctaacttgaaaggttgagcaactttagtgtgtcttgtcttggcatcttggatctctgaacatttgtatctaaaagctttttaatggagaacattaacagtgatgtatgtactaatcaacacgagttggatctatagttgatattgttggtttagttcttaatggttgatgtactatggtgcaaaagtttggagttttggagttgtggtgttggtgaatatgtatttagtacttctctatgttcttaatattggtgtgtttttgtaggactgggtcaaggaatcaaaggaaggttacaagcagtcagacttggcgagccaatgccatcacaggtagtagtagtagcacaaaaacttttagagggacccttactttacttttggagttctaagaaataccttatgcaggtacaagatttacatagaagggtctgcgtggtcggtgagtg

SEQ ID NO: 15714 - DNA, 932 bp, Arabidopsis thaliana landsberg
ttaagaacaactaatccagaagggatctataattttaactcaaccacctagcattctgagaatggtaaactactctaaccctggctcagaaatctagtcactactcagacatcatagcagaaagcataaacgttgaataggatgaaaacatgatatcaacagagttatagcatgatgataacaggatgaacaacagtaaacgaaatcaaaagcaaaaactgaatactgaatagattaagagaaatacggattacaaaaacatcaagaacacagtgtctgcagaataaaactctttcatcgaaaatgtaaagtacatgctacttatagcgaaattttccgaaaccctaatactcaaaacgacgcaatattgggacggattaaaaacggtactcgacccagatggtcgagtgaatgatcgagtgataagctggagtcttcttttcttccttgtgctctagtgtctggttgagtgcggaatggagaagactctgaagctggcaaccgagtatgaagtcgaatgatggagatggtggtactcgacttggtggtagagtgatcgagtgacggtgatgaagatactcgaccttgtggtcaagtggtgtgatcgagtgatggtcaggtggtggaggtgatgatactcgaccaggtggtcgagtgatgtgatcgagtgactctcatggtggtactcgaccagggggtcaagtggtctattgaggtcgtgaagcatctacttgaccagggggttgagtggtttgacatgatcaggtccgcttcttccaattagctcgttaacagctccaaatcacctaaaaacaacacaaatatgcaaacatatcctaaacatgtacagtgatgacaaatgatgagaaatggtataaaacagtgatgatatgatgcaatagtgatacaaatggatcacaaaacatgtaaat

SEQ ID NO: 15715 - DNA, 1130 bp, Arabidopsis thaliana landsberg
  unsure (1)..(1130): unsure at all n locations
attagacgaccagtaatagatgacacgacacattatggaagcataataactcaaatagaagatgttgtttcatgagtcctgacatgcaatcacaaggaaaaaacgatgatatctagacacacgaagtttgagttacaataagctcatcatttatcatcatcatgatcaacaacatagatcataattaaacacaattttatacaatatacagtttggagctctgataaacaacaactataacaaaagtacccatatgaccatgtatatacacacataagcgacacttgtgatcaactttcgaatttccaatagcacagaacttgagcaaatctagaagattaagagatcctccttcacgttgtaacccatcttgtctagattnnnnnnnnnnnnnnnnnnnnnnnnnnnnngtggtccgcatgcgagtgctagcgattcgtcttccaaaccttcaaggatatgttccctaagcacagcttcagttataaaccgggtactgtaactccaaccttcctttgcgatttcaacgacgtaccaaatctttagcctctccttatgcttactagcccatccttctagctcttccctcacaagaatgtcatcctcggttctgtttgcgtaaaccacatacatctcggtttcgtcctctggatcactcaatatagattgaatgatctggtagataggagtgatgcctgttcctccggcgagcattgctagtttcttggcaaacttaggtttgccgctgaccaggaagttgcctttgcctttgtactcgatgtgccctagtggacctttgatatctatcattgacccgattggtaacgagtctaagtgttgagacatgagtccaccattgggaaaccttggatgaacgtctttgaagtaaactttgacgacgaggtcgatatgaccaaccgcgtcgatggcgctggtgggagtataagctctgagacagagtttgtcgtttatgttggcgcaaacgaaaacgtgcttcccacgggtaaaccaagctgttgatttctgatggtatgcgaatcggaacttcgaacgtcgtcgagatcgaagtctctcaatgagcgtaccgggatgtctcacgtgggttgccanagcaatgtcttttgaggagt

SEQ ID NO: 15716 - DNA, 924 bp, Arabidopsis thaliana landsberg
  unsure (1)..(924): unsure at all n locations
caaagcacaatcaaaaaaacaatgtattatgctcttgtattgtggtagttgtaattcttatttttttttgctttgtttcacaaaaatttgccaatgccacagcccaaagaaggtgatgaggattattctattagaacagaatcatagaaatgaaaaaacatcgttgagattcaaataatacaaacaaccagaaaaagaaaaaaagtcataaaagacattaagccttgcatgtcttacgattgtgtccaatttgcttgcaattgtcacaagtgtgttgttttctagccttcttcttctccatagcaatctccaatgtagacttaattctctatttctttggtctacctggttgttgacgagcttctggtggtaaacatatcttcgacacgacattttcgggaacagttatatcaaagttcctgggcatgatggcattagcataggacttgcataaataattcttctgaaagtaaggatgacacaatgatatctgagaaagttttcgttttacagcagctgcaatcgcgtgnnnnnnnnnnnnnnnnnnnnnnnnnnnnnnnnnnnnngagcatatcttgtctttcaaattaacaacatgcagagatgctccaaacataacttgtacttgatttgcatctatgtcttgcacacttagcaatttggcatactctacacgactctacagaaaatacattgtcattagttagctataatcaccaatatacggatgtatataaattgtgtttgtattagaaatgaaacctgcaagatcttctctactccacgaggaagatatgtagaaaaattcaatgcatcattcttcagttgtacaataggaaggctactcgcgggtgacatgaccttattcattgaatccgcaatgttacttgtcagcaagttgtacctatcaccgggaaatgcaca

SEQ ID NO: 15717 - DNA, 786 bp, Arabidopsis thaliana landsberg
  unsure (1)..(786): unsure at all n locations
gcaccgcgtaacattgtctaatccttccaccgactaacattttatttatgtcgatgtaacattccattaaacagtggcacttataaatatatcgatgcgtgagtctacttcaccatttacgaaagttttatttttccgcataacagttaaagacagatgatgatacttgatccatgttaaagatacttgtttatgccaaattaagtttcatagtattcgatgaaattttagtcataccaaatagcaaaattttaccctttttctttagtctcaattatgtcatttttttgtaacaaataacggaattttcgtctacttttggttactcttttcgaaaataccatagtcgaatgttggtagttgccagctgcttagttgctagccaaannnnnnnnnnnnnnnnnnnnnnntgaaacaaagcaaaggaattgaaagaccgcatagcgcagtggattagcgcgtttgacttcggatcaaaaggtcgtgggttcgactcccactgtggtcgttttcctttttgttgtaatatttgaatgtttgcttttgttattttgtggggatgccattcacaaaccgacgaaaaagacatgatagtcgtaaacgatgtgccatggttctgatttcccacacttgttcagttcaaacctaaatgtttgtcttttgtttaaagttttaacaaattcctttgtaatcacacatttttgatagaagctgaatgtctaaatagagtaacgaaagtcatggaaaaaaaatgaattaggacgaaagttccttgtgaaatgactg

SEQ ID NO: 15718 - DNA, 942 bp, Arabidopsis thaliana landsberg
gtagaatgattctgaagcatctgtctgatctcctgctagaacggtaccatctgatgctaaaccaagtagcttctgtagcgctgtctccaacaattctagctctccattgtcaaaggtcccattcctctctcttgcaaatagtgcactagctaaagacctatgaaagtacctaaccaccggactccttattcgttgctcttggtcctagaggatgaaaacccatgtttagacccaagcatggccaagaatgactgaagctctctcttgtcaaaacgatgactcgtgtctttttcgcttgggaacccatacataagctctaaatgatcgattggaagccgatactctacgtcatagacacagaactccaagtatcccaaacttccgtctggcctgattccatcgtcctctgactctccatatatgaacaattctacagatgaaagaaaattgaccgtctcttcctcatacccctccattggccgaaacatatgaatattcaggctgcactgcttaaacatgtactctacatcatcatatatgccgagtctctccatggtctcaggatgagggtatcgagttcctaaaaactcgttgcgcttcagtagtttgtagtactcgtttcgagttgcgcacttctctgattccaaatcatcaccacctccattctcagtttgatcagcttcctcaggtgaagccatttcttcctcggagtcttcatctacaagttccaaccttctccccatgggcttctttcatcgagtgatatcttccttgttccttgagaactcccttgtagaggccttactcgaccttcgggatcgagtgttttcggcgggggagttgaaagtttgttcttcttgcatgcatcctcgtcttggcttgattcgctgtgattgatctcgaaacttgctcgttctctcctgctcgaccctatgggtgatg

SEQ ID NO: 15719 - DNA, 791 bp, Arabidopsis thaliana landsberg
  unsure (1)..(791): unsure at all n locations
tctacgtaatcactaaacacagcttgtgagaacttttcgatagtagaaacattatccaataaccattgtttttaaaacgcaaaagagaaaccaaagtctcacaatttcaacatcataatcccaaaacgttgatacagaaacaaaaaatcaaaccagaatctaacggtaactcttctggaaacgagcacgagcaccaggaccaccaaacttcttcgactcgcaccttctcggatccgcaacaagaagagtcctatcgtacctcatcaagatgtccttgatctccttcttcgactgctcatcaacgtacttctggtagtaagcaacgagggccttagcgatactctgacggattgcgtagacccgagatgtgttaccaccgcccgtggcacggatcctcatgtcaactccggcgaaacggtgtttcccgaggagaaggactggnnnnnnnnnnnnnnnnnnnnggatctctggctgataaagctcgatcggcgaaccgttgagcttaatcatgcccgagccccgtttgcagtaggtgactgctgttgccgtcttcttccttccgaaacattnnnnnnnnnnnnnnnnnnnnnnnnnnnnnnttgctagggttttatgatttttgtgttttttctgcagggatttgattacatgagaagagcataaaactctaatccgttaagcttctattgacctgatcagttgactatggaggcccataaaattagggtaactatggcctgttacatgatgatttattactacatagcttagattaaccggctagatttctg

SEQ ID NO: 15720 - DNA, 1068 bp, Arabidopsis thaliana landsberg
ctatcattgcctcgaggaaatatgctgccaaacctatgccttcttcacaccggacacgtgacattggttcttctaccgttatgagctccaccaacacaacaccgaaactatatacatagcttttgtgagtgtataggctcgacaggaagcactctggatccatgtacccaaaagttcctgccactaatgttgttaagtgagtctgatcagacgctaccgatcttgaagttccgaaatcagatatttttgctctgtatctctcatccaacagtatattggtagttacgatatttctatggaatatcggaaaagatgcagctgagtgcatgtacgaaagagctcctgcaatctctacggctatgcgaagttgcactttccaaggcatcatgtaatcataatattcatcatgaagccgcttgaacatatctccattgggaatatattcgtaaaccaagatcggaacctctgtttccaagcaacatcctattagtttcacaatattcctatggttaatctgtgaaagaaggatgatctcattgatgaacttttcgagcttatcttcatcgacaacttttgatcttttaaccgcaatgatcttgccatccaccatcatccccttatacacagttccttgactgcctttcccaagcaccctcttcacgctaaagttatcggtggctttcttcaactcttctgagctaaatagccttgacatgtctacattaccgtcatttgtagtagttagttgttgttttaacaacaagcctccattacgtttgaagaacttcctgctactgatgatcctccttctcttttttataaatataatcaacccaagcgtcccaacaactaagaacaatagtcccattaaacctaaaagaacccctgcaataacaagaaaaaacataaataacactgttttctgctctaccttaaaggatggtagatgcaaggtgccattggaactcaccttgtagcacgaggggtttggccggcttgattatcttgggcttgggatcgcatctatagcatctagcgacgtcacacaagtgcctcatcacagatata

SEQ ID NO: 15721 - DNA, 1898 bp, Arabidopsis thaliana landsberg
  unsure (1)..(1898): unsure at all n locations
cttaacaatgaaaaaataataatagtatgaaaagtattaagtatgataacaatttaaaaatccgaatttgataaaagttctctttattcaacttataaacagaatccttcttgatttattgaatcaagatccactccattcattgtattaaagaccatctctttttaaaataggtaaaatatatatataataggatttaacccgtggtacactacaaggcaaatattttatttatatatataataatataaattttacggttttagtttagtattaaagttatataattttatattaatgttgtaactaaaaaaaattggtgatgataaaataataaaataaatatttaacatgtgttatatcaatccaaacccgtcctgctattcatatcaatctaaattcgtcccgctatattttttgtctcatgattttttatttttttataagtttaaatattagttgttgaattagttgtgattgtgattttatgccgaaaaagttatggacttttaatttcatggaatattcaaaccaagataaggaatgtttttaggtgcacatataattggatttgctcattttatgggattgtaaatgtattttggtttgtttcacaatgtttgttttaattgattgccaaaatttaatacatataattcaaatagttcaaattttggttgttttaagatttaatgaatattgtaggtgagataaaaagaagataatttattatgttttgcgtgacatatgggattgccatatattttaaatctttttggtttgttacacaattaattgccgtaaaaaatcaaaccattaattaaaaaaatcaaataattaaaatttagtggcagccattgtaaataagtcacaactccatgatttatttcacaaaatatatgcaaaaatgtatatgtagatttatgaatttaagtgaaaattgtgcataattataatgcttactatgtctctatacataatctttaactctatttagtcagtgtgcacataatttttgcttattagaaaggtttcttttggaaggactacaactctcaagtccctcaacaaccaataatggggaaagaagcttaattcttgggtcacaaagcatatgccttttgggaaggagtttaaaaacatacttatctgagtttctggtcgttacaagaatgaaaaaatatgggtagctcgagatctgtgattatgcgtttactcacatagaaataacattcatttcactgttgcattgatctataaaaaaaatgctggtagaacaaaacgttgtacgaaattagtagtgtataacttcctccacttctccaaacaccaaatcttggatcattcttagagattttaatcaaatcatcactttcagaagactatttctcggtgagaaatgattctaccccttcaaggtatgattgtatagcttacatgcttgttaatcaacaaatggatttattttttactgacattgattttttccatactaaaatcgacaatcaaggacttaacctgttaagagaaagcttcttagataactattcacataactgtataatattctgtttttcaaaattgcatgtaaagtaaaacaaataacatatattgtattctttgtttcatatataactgactaattaaggagttcaattcactttgaaaaatgacaaagaaataaactagcattttaacttgttgaatagccaaacaaaatgcttttggcttatgattttagagaatagacagtgaaatacaagtattgctcaaacccaaaagnatgtattttctctgatttttgtagtgcttacaattaatgataattgttacaagtacttagactttacaaattttaagagacacaaggggaagtttagcatttttgatcgattcaa

SEQ ID NO: 15722 - DNA, 1636 bp, Arabidopsis thaliana landsberg
  unsure (1)..(1636): unsure at all n locations
catgcataaattctcaaaaacgatagacagcttgcaactatagacagcttacaacttctacttgtgtacctagtggcagatgaaagaaaaagaggataccttctgtttgggagcatggaaggtctcatccaaaaccaaaattacacaaatacaataggtgtggtcagtcgggtcacaacaaatcaatttgtgttgctgcaatttagatatatctttatctcaagagaattgaactttgttgggttttttaatttttccttcattgtgtcgtattattactctcgtttattaaaattactatcaaacttttacaagtaattttaagggttattccaataatttaccttttaaaatctcttgtaaaatcctgtttaaaacgtcttttaaaatccttttaaaataccttgtaaatctttcgttatgccacttgcatatacttttaacgattgtaaatcaagttaaacacttttacaaacttttaaattcccttgtaaatcattctatgccactaagttatgcttctaaaacgattattaatcaagtaaaccccttttaatagcttttaaaatcccttgtaaatcattctttaccactttctaatcctttaaaaatgattgcaaagcatgtaaatcctttttaaaatcccttgtaaatcattctttaccactttctaatcttttaaaaccgattataaaccatgtaaccccttttaaaatcccttgtaaatcacttagtgatgctttaaaaactattgtaaatcatggtttagtcttttaaaagcttttaaaaacacttttgaaaaccaattttacaaggagttttagacataccgctgctgttanngntttccctggcgtctctagggttgtaaaccactttgtatctataatatttccggcgattgatagtggcctacaacaacaaaacagtcacaaataaatgttttatttaaaaaaaaaaactcactatcttacaacaaaactcacttgtttttccttgacttcttccattcagccaatttctcaagtcttgtggcatcaactttcgcaaatggatgcaaaattggatgcttcttcttctcagctgtgaaaggtgcttgggtatgaatggaaggaaccgtaccccgcttactctttctttgcggagcgggctgaaaatcatcattgtcgccatcattatcagcgttatcaccatcattgccaataattttccttttcttactctttgcctatcaaaaagaataaaaaaaatagatgtttaaaataccttgtaaacaaaattttcaaaatcataataaattagatactaacctatttccttgttggaacatcaacagcagcactatcaacttgtttctgcctctttctcggcacctagaatagtaaaaaacactgattaaaagtacttttaaaatccgttgtaaatatcataacaagacaattgacaaatttttaaaacagtaccgttgcaaagactaacctgttttcttgttttaagattatcctcagcatgaacacttggtttaactctcttgttctaaagttgcaagaaagataaacttttacaagatttgaaaaaaacattataaaaacttggtgagataatacaaagaattttaaatgcaaacctcatttct

SEQ ID NO: 15723 - DNA, 871 bp, Arabidopsis thaliana landsberg
atttctgccgaatctcttttttgttctagcatggctaggtttttcggttgaaaacgaaacatgtaaaatagattgatttttgggattttgaaggagtgttggaaatgggtatataattacgatagatttatgttttaaagtttgatatttgggtttcaaaaaccttcaaagaagatttcaaatgccgattaacttctctgttgtagcaatttcaaagtttttttgttttgaaacttcaacagtaaatagattgatgtttgggtttgtgttttaatttatagatcctcacttaatttatgggttaccagttgattagagttggttgggaaaagctttttttgtttctattttcagcggctgtgttctttgaaaaggattaaaattttgtttttggaatggtttcaaaacggtctttaaaaaggatcatggagtaatgactgtgttttacaaggatttttaaagtcttaaaacgacttgtaataacttttaaatatggttttacaagggtttttaaagttctttaaacgacttgtaatgactatgtttatgtttcgaaaactacaaatgcataatagatttacaaaaatggtttttaaaaccatttcaaaactgtgttaatttaatgactgtgttaatgtatttaatcaggttttgagaaatatgagtacaaagaaactgttgttccctaaaagactgttccaaccaggcagcgaagtagataatattacaagggtatcaaagcattcatccttcaaaattgtctcgactgtcaggaaagctttagagccgatagagttcaacacattaatggacacattcttgggtcctatagtggaattcgctgaaatggacttagcattttcaagccata

SEQ ID NO: 15724 - DNA, 877 bp, Arabidopsis thaliana landsberg
cagtatccccgagatattgcaggtacgtggtctgccagttttgatcaggcgtgaccacgctttgctccccctcgacgtgcagcgtctcgccctcgggggctgagggtacctcgggttgaaccgaggatacctcgggccgagccgagggtgcctcggaatgatccgagggtgcctcgggctgggccgagggtgcctcgggctcggccgagggtgcctcaggctcgggcgtgtcgtcgatcttgacggagggttgatgcagtatcccgggagaagacgtccgggggaaccgtcgttcgccccgaggctattttagccagctcgtccacagtctcgttgtagcgccgagcgatgtggttgagctcgagcccgtagaacttgtcttccaggcgccgaacctcatcgcagtaggcctccatcttcgggtcgcggcagtgggagttcttcatgacttggtcgatgacgagctgcgaatcaccgcgagcgtcgaggcgtctgacccctagctcgatggcgatccgcaatccgttgaccagagcttcgtactcggccacattgttggacgccgggaagtggaggcgcacacgtagcgcaagtgctttccgaggggcgagatgaagagcaggcccgcgccggcccccgtcttcatcagcgacccgtcgaaaaacatggtccagagctccggttggatcggggtcgttggcagttgggtgtcgacccattcggccacggaatccgccaacacttgggacttgatggccttccgaggggcgaacgagatcgtttcgcccatgatttccaccacccacttcgcgatcctgcccgaggcctctcggcactagatgatctccccagggggaaggatgacacacagttaccg

SEQ ID NO: 15725 - DNA, 791 bp, Arabidopsis thaliana landsberg
cataggtcgacccgacggtgtacaatatctactggttctaactgattatttttctaagtggattgaagctgaagcgtatgtgaatattaaagattcgacagtaaagactttcatttggaagaacatcatatgcaggcaaggcatttggaagaacatcatatgcatacgaaatagttactgacaatgggccacaatttattttgcacgagtttgaagcattttgctcaactgggggattaaagtcagttattccactctgcggtatccacaagggaacggtcaggctgaagctgcaaacaagacaattctaagaaaccttaagaaacgtttgaatcatttgaaagggggctggtatgatgaacttcagccagtcttatgggcatatcgcacaattcctaggcgttcgaccggagaaaccccgttttcattggtttacgggatgaaggcagttgtaccagccgagctcaatgtgccaggacttcgtcgaacggaagctcctttgaatgaaaaagagaattctgcaatgcttgacgattcgttggataccatcaacgagaggcgagatcaagccttaatccaaattcaaaattatcaacacgcagcagctcggtattacaattcgaaagtcaaaagcagaccattctttgtgggcgattatgttttgaaacgtgttttcgataacaagaaggaggaaggagctggcaaacttggcattaattgggaaggtccttatattgttaccgaggtggtccgaaatggtgtttacagattgaaagatttagaggacagac

SEQ ID NO: 15726 - DNA, 756 bp, Arabidopsis thaliana landsberg
accctaatatcttaaacgacgcagtagtgtgggacgggttaagaactgtactcgacccaggtggtcgagcgtgttttcgagtgataagctggagtcttcttttcttgcttgtgctcgagtgtctagttgaatgcggaatggagaagactctcaagctcgacatcgagtatgtagtcgagtggtggtgatggagatactcgacttccaggtaaagtgacgtgatcgagtgatggtcaggtggtggaggtgaagacactcgacctcggggtcgaatgatgtgatcgagtggcggtcaggtgatgggatgaagacacttgacctcggggtcgagtggtgaggtgaagtggtgatgtcctctactcgaccagggggtcgagtggtctgctgaggttgtgaagctactactcgacctgggggtcgagtggttttgcatgatcaggtccgcttcttccaattagctcgtcaagagctccgaatgacctgaaaataacacaaatatgcaacatgcatgcaaaactatcctaaacatgcaaagtgatgacaaatgatgagaaatggtataaaacagtgatgatatgatgcttaagtgatgacaaatggatgctcaaaacatgcaaaatacacacttatcaactcccccaaacttagtctttgcttgccctcaagcaaacaatcaagaacaaagctggaggtgaggtttggaagcggggactcacgagctaaagcaccagataaaccagatgaaatcaatgtcca

SEQ ID NO: 15727 - DNA, 854 bp, Arabidopsis thaliana landsberg
gtatgtatatggtagccatgagttcacaaacaatgcatagacttgataatttcaaattttattcatgttctaatagatagggaatggcatcagataagcgagtttcgaattaaagaagtatagtcaagttacaaattcaaagcagggtgcagtcttacttcagagatacaatcggttatgcaacaaagaactaagaacctgggcattgaacttacttcataatcaaaacatgcttatcggtttgaaatcatcattatcccatatgcaaatgagcaatcctaaatgcaagcacactatatacaatcctaaaatgatatgcaatctacatgacactctgtttttgatgaaatcattttctgaaaaaatttcaaatttttatggttttttctatgccctagatgatgcaaaatttgagataagaaaagagaacacaatgttaaacatgtcttgaaccctcccccaaacttaaattacacagtctcttgtgtaataaaaatctgagaatgaattcaagaccaaaacacaaaacacacaaagaaaaataaaaatgctatggtatgtaaaatggttgaggtggtgttacctcagcgtttaggttaagtaggaggagacgaagtcgtccatactctactttgtgtagctccagggatcaggttgtgtgggactcagttgagctggatgcttcgcattaagtcactctattgcacgtctgagattctttgcctcgatttatatcactcgatcgttgacttctctggactataaaacctgaaatacttaaacataaacatcaaaactaacaagggataaaagtatatacaaggataaacatggaatttcctcccagtaagcta

SEQ ID NO: 15728 - DNA, 2194 bp, Arabidopsis thaliana landsberg
  unsure (1)..(2194): unsure at all n locations
cactcctcacttatccggagtaatacttctcatcagtccttttatcttatcattagtggcagcaaaagaagtgtcagcaagtcgacatgttgtccttccggaatgcaagatgaaaggttctgacaaagattgtgtaaaaagcagcaacactctcaatggcaaccattcacataaagaatccttagatccatcaaccacctcagacaaaactgactggaccaaacatgagagtggtctgggatctacctacaatattcaattaacagaaaaggtattggtatcgtaagcggtgtaaaatagaacataaacatatcgcatggtgagttatacatatatatatttatttataaaatatgcagacgtatgtacctgagtttgcaaaatatatttcaatgagctgtagacgtacaaagatactgctgacttgtttggtaaagaatatgcttgagattcagaatttagtagcttcacacacttctgcagaatacaaacaattagggggctaaaaccaattgatacacctgcaacaaacacagaaaagatacgccagtcaataaccttgtatgagattaagttgatttaaaacattgccatagttgcagagacattagataatcatctttgtgcagataatgaatctaaaaacagaaatggaaaataatgtatacctgaattaacatatataggagcaagatattatatattcatctataccgaatcattgattttgagggcacaaaatacatataccttttaaatgggacaaggagcttctgacaattgcacattgctggaataaagtatttccaacagccgtaactgcatcacataaaaaggagatgacaaatgatgatatgctctgagccttaagaggtagtttaatctttccaacacttggtagaaacaggaaccatgcctcaatttcacttggatttatgtcaaatgcaccggtgctgctcatagatacccgtgctaaattatatgatagaaccttcacctcgttgtgtgatgaaaaaagtaacaaatttataaatacatgcaaatgcttgaacataagtggtggaatttttctaggaactctctcaaattgagactttggcctccaaaagatgtactcattcagtaaagacaacagagctctctgcaattcagctggcatacttgaagaactgctcagaaatttcatgaagacatcaaacaaccctttaggcacattaggcacagaacgctgcaaggatgaaaaacatctagtcgtcaagtacagatgaggaggaacgtccaagcctactactaatgccaagacatattagcaataataaaataaagtaaatcaaattgacaaaagaaactgggttagtaaagcaaaaccatttcctcgaaaatcaaaactaagattctgacacggagggtttaaacaataagacaccctgttattagttattactaaacacaagaaaatgtaatctattaacaacaacacaacaaaattaataatatgacagatcaacgtaccacataaatcccgagggtatccaggagctttatctgaaagaacatctctgcttcatcgaccgaagcgataggcttagaacaaaactctgaaccccaaatttcgtgaaacgatcccaagatattcgttttcagcatcttcctgatctgtcaactgagcatccccagtatcctcttccaaaagatatttgtatcagaacctatcccaccaatgaccatatcactagccaattcttccaaaacagccatctcagatgtctttaaacgcttttttctatctactaatccaatatccaactctgcttttctcttcaaagatagcttttgagacacctttagtacggtccataacacctggaaatctgggaaaaaacttatcacctcacctatgatatcccgcnnnnnnnnnnnnnnnnnnnnnnnnacagagcaaagtttccaagcagtaacaaaagaatcccacagcctcagcgtctcccagagaaatctcaaagtccnnnnnnnnnnnnnnnnnnnnnnnnnnnnnnnnnnnntagcgatcaacgactggctaaatggtcgggggcatatgcatttcatgatagtatggacctctgaaccaccagaaggaggtttatctgggttgagaaagtcaaaagaagatgacattcttacagacgataccaaatctgctgccagggaaata

SEQ ID NO: 15729 - DNA, 718 bp, Arabidopsis thaliana landsberg
cggtgtgtggttatgagatgcttggagctatacctatccaggactactttgacgaatattacgtatggaatttgcgtcgtcatatctctccggaggctagagatttcttaagccggtgcagtaacatgcatccacacaggcccaccgcggcatatctcttgaaccatcctttcattactcaaatacttccatcgccaacaacagaagacaacaaggagatatctaggtcgttgattccaagtttctcgaagcttcttttggcctaatcctctctctatctctcttgtttgcataaaaaaaaaaaaaaaaaaaagaaactggatagtgaatttgctatggcaaagcctaaccgagatgtaccaaggatcggtttgaccctgggaactcgataaatagggggggtcttaacttttaataatcgtgaaatcttcattaagtgtaaaagacatacatgttcaagcttaaatccaagtaaactaaaccaaaactactaaccaaacttaaccacaactaaaccaagcatatacactctaatactccccctcaagatgaagggaactttcatcttggacttgcaaacccaatgaatatgtgtcctccacaactttttttcaatgagagaagcatcaatggacatgaatatccatggcttgaaactgaaaataaacgttacgagcttccgggtggacttgttagtgatcccaagataaatgtgcct

SEQ ID NO: 15730 - DNA, 835 bp, Arabidopsis thaliana landsberg
  unsure (1)..(835): unsure at all n locations
aataatcatcaaagaaagtctatcctttttattaaaaacaaatattcttaaacaaactaatactttaaattttctattcttaaacaaactaatacattaaatattcttaaacaaactaatacattaaatattcttaaacaaatattcttaaacaaactatgcttaaatctttcataataatctttctctcaattgaatttatctttcacaaaattaaataacaaataaattaaagagatatataaatacgaaaaacaatggtcgtcactctcgttcagcttctttagttttcttctaactttcagagaaagacctctctcaattcaaaagttcacaatattaaaagtataaatcagaatcattaaactgttagtctctctctctttttttctcttcttctccctgaattgtctcatctgtcttcttcctttgtctctcctctgatatacattgtgttctccttctcagaaaccctagatttctctcaatcaaatctagcttttctcttagggggagatttgatttctttctcnnnnnnnnnnnnnnnnnnnnnnnnnnnnnnnttctctgttttcttaatttcaaatctgcaatcgtactttttcgagttctataagtgaactcaaaatttagcttttttttttttttttagggttcataagaacaatttggattttgagctcacagcgtaaagaacccgactttgattactgggtaattttaaaaccgccattgntgttctctttactacttttgggaattagggtttatgatttctgggtattagattagataaatttgnttctgatttttttaccaatttaaaaatctatta

SEQ ID NO: 15731 - DNA, 1829 bp, Arabidopsis thaliana landsberg
atccattaatactactatctatacaaacagtggaacaatatattgatccagagcacttgaaaactattttgtatggacaacgcctcttacaaagggagcaactaggtcgagacatatgatggttattcggcagattatatagcattttacctttcaaatacgacgatgtaccgaacttacctttgtataaccaccatgaaccgggatccatgtatttgtccgccccaagcatacagttaatgtgtagggtgacacaacaatactcatcacacatataaaaccttttctttggatctatttctccctcgcaagcttcacaccaataggtcatggtacttgtctccttcccataagaaagagtgagcatatgcttatcatacttatacctcaccttttgaggtaatgtggcacatccaaaacacaaagcaaagtcacactcctcaatgcaattaaatttttcatttgtcaaagaataatttgactctttgcagacactacaatctttccactctcctggttcggatgtcaggaataaaggatgcatatgactttcatggactaatggctcagaaactgcggcgcactgaacgtgtagctggaaatcacagtcttgttcatcgcacttatagaagaaacaagccctcaacaacgaaggacaagctgaacaaacttggctacgatggaccataacattgtaatactctgttactagagttagcaaatgtgcatgtattggatgatggtgtctacgaggaagattcgcacatgcttcatgaagaatgaaatcacattgcatacaagagtagaagttaccgaaatagattggtctgacgcatgcttgacactccatattctcatcgtaatctctgtcagtgctctcatcaagtctcaaatgatgatgcttatgactgaaatgttgtatgattccgtcgcttatcctgacaaacggcttaagttcttcttcattttcttctggctctccctcgagttctttaccatcccacacacttcttcgtgtggcacatcttgaatgtgccccatataaacaaccgtccttgatgcaagaataacctccataatcattgtcgatctttttacggcagacaccgcaaaaccaatctcctttctcaaaagaatgagtgaaagagatacgatggtgatgacgagatatgcgaatgacacgtggtaagctgaaacagctttgatgggccacaaagtcacaagggggacatatatagaaaggacatcttgtatgtgtcaatgcacaaacgctgcaagtcaagggagtctttcttggaaacagagaaagagtatgctcatgccacttgggatggtctacagataagcgtcgtggtttctccacacaagctatattgatagcataatcacaagccggacagtaataaaacatctgttcgagatcttcatcacagcaataacattccctcgttctataagaagcttcaatcaagacaagctggagagaatgttttggatgaagagggtgaatgatctcaagtggagccttgtcatattcttcatcatggtcgtcgccattgcaagccgagcagcgaaaatgggtgtagtcttctcctgaaaacttgtagcgttcaaattggcagtcccgctttttattgctgcaccgctggacatttccagtcacctgaaattttccgtcgtgaaagcttacttgtacttgtgggcataaggaaataagcttctcccactctggatccttagatttgacgaggtagtaaaaaaggtggaggagtgatatgagctccggctccggctcgagttcccttattttaaaaagagaaacttagcct

SEQ ID NO: 15732 - DNA, 719 bp, Arabidopsis thaliana landsberg
tctaaggctattggagctattcatcaacgcaagagtgcaaagtttgtttctttctttcttctgatacacttctgtgactagtcttgaatcttctaagtctctaatgttatgaataaggagagttgaaacattatggttatataatgttttagcattacgagtggctacaggagtttgctaatgtgttataaattcgctttcagggataaaatggaattcaaatcagagaaaccaggtaccagtttttctcccatcattgcatcaaatcgttcaatttttttttcggaacgattgttagtctcgagccttacagggtttggtagtaacataactacagagtttgtctattttatgatttgaacatggatacaaatgtgatgttttgtgttcatttctgtttcttgttcaagactcacttcgtttcacatggtttacattgacagaagatggaaagaaaaaaccgagtatgatgaaaaaggcgagggaagacctcaaatctttattcctgaaggaaaaatctcctcgccatcttcatcatcatcacaaagaaactcatggaaggagtgatgatatcagtgagaacacaccggtggatgaagtgaaggctcctaatgttttggagagagccaaggaagaaatcgaggccgtcatcgataccatccattccaagaagaaagaaaaagacggttctggttcaccttcgcgttctcggtctgtct

SEQ ID NO: 15733 - DNA, 1753 bp, Arabidopsis thaliana landsberg
  unsure (1)..(1753): unsure at all n locations
agtttccgagccgccgttatcactgctaatgctagtttttctatggtcggatatctagtctcggcgtcattcttggccttactagtatagaaaataggtttctcgttccgcggtcgtctctcaccagtaccccactcaccggcgaacttgatacggagatgtatagatatagggtctctccgacctcgggtttggctaagatcgccccgcttatgaggtaggatttgagctcttggaaagcggtttcacattttttgtcccaataaaagtccttgtttccacgcagaagcttgcagaaggggaggcatttgtcagtcgaccgggcgatgaagcgattcatgggtgcgatccgacctgttaacctttgtacatctcttttgttctagggagatggcaggccgagtatcgcgtcaatctgcttcgggttggcttcaattcctggttcggtgactatgtatcctaaggactcacccgatgttaccccgaatgtacatttcatgggattcaacttcatctggtatttgccgagaatatcgaaacacgcgctgaggtgtttgatgttatctgctgcatgtaaggacttcaccagcatgtcatcgatatagacctccattgtgacccccaacagctcgccaaacatttcgttgactaaacgttggtaagtcgccccagcatttttcaagccaaacgacatgactatgtagcagtaaatcccgcgatctgtgatgaagaccgtcttttcacagtcgtctttatgcatcaagatttgactttaccctgagaaggcatccatgaaagacaagagttgattcccggctgtcgcttcgactaagcgatctatgtgtggcagaggataactgtctttaggacatgccctgtttagatcagtatagtctacgcacactccacttgccattcttctttttgactactactgggttggctagccactcgggatactggacttctttaatcaggccggctttcagcagtcgttcgacctcgtcttggacagctttggcgcgatcggctcctagacgccttcgcttttggcgaacttgtttgaaggtcggatccgtgttgagtttatggcaagttacttctgggcaattcctgtcatatctttcgtggaccaagcgaaagatgatgatctcgacttcaggaaggtgatcagttcttcctttatttctccctctagctcgcttctgatacccaccgttcgagatggatctgatttgtcgatgttcacctggatgatcttacagctcggtgcctttatcgattcgagagccggttgttcagacggtgcagctcgctcttcatcctgtaaaattgctataagatttctttcttcttctgcttcttctcgatcacgtaacatgttcgggagaccttttggttnnnnnnnnnnnnnnnnnnnnnnnnncctatcggaaactttagacagagatggtatgttgagggaatcgccttcaacgaatagatccaagggctccccaaaatggcgttgtagattggttccgagtcgatgacaacgaacttagtcttttgcgtgatgcagcctacttggacttggagcttgatctctcctatcgacatctttgcctctccgtcgtatcccgtcagaggtcggaccttggctatgatggtcctttcggaaattcccatctaaaacaggctcttcagtaacattaagttgaccgagcagccagtatcgattagaactcattctacatcgaagtcctccatccta

SEQ ID NO: 15734 - DNA, 984 bp, Arabidopsis thaliana landsberg
aaggccagctcatatctcctgacggacaaagggtttcatatcttcttgcatttgattcatttgggctttttgctttttgaaacacctcctcatttcaactaaacacctctcaaccaccgtctctccacgacaatcctcatcattttcttcattatcacattcaacaacagatttctattttttcatagcaggtgctttcgggcttgggcccgatgcatttcttttcctcttgacacctacaatagaccagttgctgctatttattggtttttttctgggtccaataaccagaaaatatgaaaacaacatttatacttacctatctcttcttgctgttgtgggcacacctgctttgttactccagtataacctcgatcccattcatcctcctgccactcgtgcccatctatcaacagtcgctcaatgtaatcaacttttggatcatcaacttcatcatcagcctacacattgtccgatggtttcacaatatagttgacctcaacctacacaaatgagtttgttaaccatagagaatgtacatttactttttatgtacgtacataaacaattgaacacacctcatcagcagcctcacactcgaatatgctagatgtccggcttgcctgcagtgaggaaagtcgatggatagacctctcagcaaatgtcctgttagcttcatcatcaggtcctagcttagcaatggatgagagtgtttcgaatgctaaaagctggagtgctaatgggaagccatgaagtgcataagacccttccagtaaaccccttattagtagttgagcttcgtaaggagtttagaattttgctatcctccccaaagtacgggtaaaggacacccttccccatgagtatttgcagaagaactccaggttcttcgtcatctaaacagtgttcgaagtagcgatgttggggttattgtgtgccgctaccacaccgtctaccagaataatcagagagagtgccagttgc

SEQ ID NO: 15735 - DNA, 805 bp, Arabidopsis thaliana landsberg
attgactggttcttcgaatatttggatcttttagtggttgtaataacatggtctctgaatctgattttaaacacattcttgcataaacaaacacatgaaactagatatactcattctattttttgtttttgcaagtgctgttgtgtaaataatgggaatgtgaagctgatatttggttcttattacgcgacaggttagtatcatcttgatcatcactgtttctttttgtctagaacatcactgtggctttgtgtattgaacatcactgtttctttttgccttgaacatcactgtggctttgtgtattgaacatgactgtttctttttgtcttgaacatcactgtggttttgtgtattgaacatgactgtttctttttgtcttgaacatcactatggctttgtgtattgaacatgactatttctttttatcttgaacatcactgtggctttgtgtattgaacatgactgtttctttttgtcttgaacatcattgtggctttgtgtattgaacattactgtttctttttgtcgtgaaaataaccgtggctttgtgtattgaacattattgtttcttttgtcttgaacatcactgtggctttatgtattgaacattattgtttcttataatcttgaacattattgtttcatataatctgaaatcattcttatggtattaaaggttttaaaacacgttttcaatttataatgtggacaaggattgggtgcatctttgcaggtaagattttcagtaggaaaatctggagatcttacctctctttttattctccttttaagtcttcactga

SEQ ID NO: 15736 - DNA, 8081 bp, Arabidopsis thaliana landsberg
  unsure (1)..(8081): unsure at all n locations
caagcttggtggaagatccaggcatttaagagattctaggtgaatactcttagtggataaccttttctctatttggttaaaatttcagttcacttgatttcacaatcttcgtctacattttttcatgcttttctcacaatcagatgccggaaaaaaatacaaagccaatcatagcttaccccttctctagcaagaagatccaatgacgggggatcaatacccttttgatttaggataacaaagctgttatcattaccagcacaaacctgcatcagaaaaagaaaatataaataaatatctgaaagaataatataaataaatatctgaaagaatacagcatatagcttggaggtagtagtttcaaactcaccttgttcttcagctccataattttctgacctctttcatcaacggaacgccgctcagcagtaaccatggcttccctctgctccgcattcgagtagaagaatcctgcattaatttcactgttatatagacaaagttaggctacacaatcactaatacacgggagaattcttctaagttatagtctttcatatctattcaattaatcaaccagagatttgtcttatgtacctcttctcgtactctaatgacacattgcaagtcaggatgtgacaattctccgcacgtcgcttcatgtcagggtgtctcgaaccatgatcaagaacaagcccctcaacctattacaagagaaataatccatgttacattcacaccgagtgcattaagatgatatatttgattcacgaccactaccagtaaaaagattttaatcacatacacaagtcattttaatagagtaaattccgactgaagaaatttactgtaaaacaaaggcgtaccaatcgtgtgtcaacatcaaatttatggcgcatgtgcataatctcaaccataaacagatcaataggttcctgaggcttccgaatgcccagaacctgttgaatgagggaagtaaataaaaagaagacaaacggcttgcaaaccaaaattgatccatagattagttctcatatatgtgaaaaagcaagatgatattcaatgagagctatcagtaaacttaccgaattaacaacaatatcagtcagttgatcagctaagccttcatacagctaagtaagccagaaaaaaaagaccgtcagcaagcgaagagaagagttggtgataacaaaaaagatataaatatcagcaaacaaagaataccttagttcttagcgttgtcctggcaaccattttcagaatctctttatcaggctcatcacccataaccacaggtgtcttgaaagtgtcgagaaactggagagtggctctttttgcaatctcgaaaccatcaactaagacacgtggatgcattcctgagacataataaacctttcataaggaccatttctcactgagattaaccaaaacatgacaaggtagctgaagaagaaaagtattatatgttagccatgacaaacagatacagcaaatgaatggcatcagatccaactgattatctagaacagacatagcgaagcataaaactaccctactcaaagtataatgcagagaaaagctagtttggctaaccttcatcgatgcaacgctccgactgtttcataagctcaccaatgaagatgacagtagaagtagtaccatcaccacttatgtcatcctgagcaacagctgtcctggcaatcatgatggctgttggattttgaatttgctgaaataagcaagtaagcactgtaagcaatcagtttagtgtcattcattagagcaggatagtcacattaccagtcccggtctaaagatttgtgtctattatttctgtcacaatcttgaaaaacagcctaacctaaacctaactagggtttaacatgacttcgaccagaacctaccaaattcaatttctgaaaacaaacaaataggcacaaccctagcgttttacaaacaagcttattgacagaattcataagtaagaagaaacattaagctagattattctaatcaatcaacaagatctaccattttttccataccaaaaaaagaagatctacaaatttttgtttctttatcggacttaccatttccttcaaaagcgtgttgccatccttggtaagcttgatatctccggaaccaccaacaagcctacacaccggagtgatcgataaaatggcatgaaaattcagtaacaagtgaagagacgaataaacaatagatagatccagcaagagtgaagagacttacatcttgatagttcccttaggaccgagattcgacttgagtacatcttgtaaacccttagcggcgttgatggtcatatgaagcgcggccgatttgttgagcacctcagcattaggattcagtacacgcacagacattttcgatgctgagagatcaaaagaaactggaaagaggagtggggcttttagggcttttcttctctgggagcttctctctcttttatttctctttcaaatttctgagttctgtcaagtgagggctcgggaggacgatgtgagggaaaagaaagcctcgtaaagttccatcgttttgtcagatgtggagaactctacttgggccatagacttcggattttacaagttttgggcttgtgggatataagactttttcacaaaatagtccaacagaagaccaaagtcactttttgtcagtgtattcgcatacatacaaaagaaacgattataagactatcgagtattcctttttttcaaaaaaaaaaatatttataatttaataattttactatttaggcacatactttattaatacctgtccccaattcaacaaaaataactggaacaagatattttgtaaggactaacgacaatacaaagaaagaacacatgacaaacttcattttaaactgagaactgagccatgaacatggacaaagtgacgaggtcatggatttggcatcccacacatatatagctaaaacatatggaccaatgcgaaagatagagagtaggtaaagtaatctgaagaagcttattcctcgaattcatgcatgtgatctagaagatagtttgcagccaactcttcattcttgttgcacgcaaagaacacttccaacaccaatgctctctcaaatcccatcgcttcaagctgtatttatcaatgtgaaaccgagttcatcgattataaagagtgatacaaactttctttttcagaggaaagatcaaagttctagaagtaaaaaaaaaaaaaagagagaaaataaggaacagacccgttcaatggcttcacgttcctcatgtgtgacttgaatcgcctgtggctgtggcattcccgccgccatttggccaaggaggttgccactgaattacacaatgcacaacaaattatccaagcacagaataactatttaggtaatcaaaatcctcccaacgttttgctgttgatatatatgttacatatgaatcattaattcataatcgtaaagtcatcatatgcatacctttctccccctccttcaacgggttcattgattaagcgtaagaagtcagcttggtggtcttgaatcaaccgcatcaagtttgggttctgttttcccagttcctgaagcatgggctgaagaaaaaacgcaaggacaaaattatttgaaacaatatttaatgaaaaccgacagtgatttcagttcttctgtgaattagaacaacatacctgcagaacttgagggtttgcttgcaccattgctcgcagagcttggaactaatatatacaaaaatagtatttatgtttcacattgatgtctgataaactctgtaagcaagtgtacgagaaaagaaaaaaacagcttatacctgttggctgttgcgcaagaagtcaagtgttccagcaccaggatttcctccaacatttggcaagccctgtcagagataaagagtagattttagctgcacacccatctataatcaagagtttaaatgaaccaaatctgctttctatctcaaggtgtattacctgtgggaagagatctaacggatttgcattaggaccacttgcgggtgctgctgcaggttgttgagtctgtgctggaggatttgcaggctgtccggcactagctggaggacgggcaactggtggaacttcagcttgctcagggatcccctaagacatgaatttcggtgtttaaatatgtattctctcacttagtaggtagccaatcataataaaaaggaaatctattctcggcatagtgattgattagtgaccaaaatctgcctcttaagttgcatgacggtacgaaaatagagagaaaataattgaactcacagtataaagatattccacagctctttcagggttgttaaatgcagcacgaagtgcaaggacaacagtctcacgatcccaggttcctccacccatgtcaagaatctgctgaatggtactctctaaattacttccagcggctagatttgatgctgcttgtccgtaaacatcaccttgacttctattttaatcaaaacaaataggaaacagaataagagtaggtcaatttctgagctgcgcagaagactgaaacgagatgctaaccccacaggagctgagtctggtgcaggagtgcttgatgatatagtagcaggtacaggttcaggtataggggtagtcacagtttcagttgcagctacaggtgcaggtgtcggtgtcagtgcaggtggtggtggacgtgttggtgcaggtgccactggtctgcacagttttcaaattgggggcaaaatattgaaattagttgtagaatgtagccacagttttttcagatagattctaggaatttttcaaacagagagtacttgtctcgaaaactcacgctgatacagaagctggagtctgaggggaaattgaaggctgtgatgttgagggaggtatcgacttggcctaaaccaacaccaaagttagatcattcaacaaacaagaaaatacatagaagcatttgacactttcgtttcattagttgcagaggcaagaagtttttccaaaaatcccaagttgcagcatctgagcctttataatgatgtcataacaacagaaccaactcacctgcgatgtgccagcagatgcactagatgctgcagctgaagcaggtttactctattacatgtttagcaccagagagcataaatcagaatcgggtaatcaaagagctaaacagaaaacaacagaattacttatttattccccagatccaaaacgtaccttgttcatcataatgacaataaaactgttctcagcaactttgttttcctcaatagttgtctcatctttaagcactttaccttggtgaataagcatctgttttgcagcaggatacacatctgcgccctgcacactctctatgttcttcttcacatcaacaacctgaaattagataaattaccagcacaagtccaagaaaatagtcaagcgcattgaaaaataaaaatgtcagttacaactacaagactacaactatcagaaatgcattcacaaaaaaaaaagagatgataacaggatggaagtataaaatccaaacgaaatcttttaaaatggaaatgttgttgcacaactctcagttcagtgacagactgtaaattccccaattggaaaacacttaggagaagcagaaggttaatggatccaaacatagtagtaacaaacacacttcaaatgcaaatgaaatgaactcattcccactacaagcagtgaaattactaaaaaagatggccaaacaaacccatagacaaagattgctgaattgtttaaattctctttagaaacctccaaattaccacattccacttacaagaactagctctcagatcacgaaagaacagagaaacctctaaaatcgaccaaatcaaatactcgatcgagaaacttaattgagaaaaccgactctaccgagagaacaataaactcgatcgagaaacctcctcggatacgtaattcaacagtctcaattgacaagtaaggaaactatctgtagaaattcgcataccgaatcctcgggttttacttcgatctcgaagtgagtccccttgagagttttcacaaatatcttcatcttctctcaccgtcgaaattctcttcccagtgaccgattactcaggctaaaatcccgttctgattgatcaccgccggcaaataaattcgggaaagagagtaggtaggcgaagaaggtactacagaatctggcccctacctttgcgttccctcgatatctccactggatcacacccgaagcacatggcttgtgctttcaactctgccaggtcagccgtcattatcctattaaaatatgccacgtggtattgacaatttccttaatacagtcgtgaaaggataggcccaaaatatcacttattaaatgatagcagataggcccataatatttagaaataaatcaactttctttttataaattttttgcttttattcgttaaaaaatagataatatctacagccaattcttgaattaatctctgtaaataattttgtacatatactctattcttttgtcacaaatggaaagtgaacattaaagggggaaatagagaactatatattaaaaaaaagttaccggctcgacttgaagatcatcagagccgagccgaatagagctgatgggggcaaaacttctgagtatagctaaaacggagcttagagcataagctcagtcttacacgtgctctccttctgacacgtgccaaacacgccgatccttctcttcttaacaggtaccacatgatacgcacgtgacaccggttcgagccttaaagttaggtcaagctttatctcgccggagcccttcacagccggaggcgagaatgccaaaacctcagagacattgctctcggattccttgctctctccttcatgagcagccactatttcagactgatgactcaacgacgaatcgtgactagcctcgtcagactttccctccgattccgcctgtatcgcgacggtggagacccgcttagcacggcgagttttcgcaagtttcaaatcggttgagccagtagccgcggcggcagagttatcatccttggagatatgtcggatgtcgtagatcttaagaggcggaccttggccgatcgtcgcagcgtctgtggcgatctctttgatcggttctcctttcatcacagcctccacggcgtcttgacaaagctgccaattccccgaccacaacaaacccaccgaaccatagatcggattcacaatcctcccacaagcttcgtgcaacaacgatcggaaaatccctgcaaaaatatttgatctaattaggttcaaaaaatgacctaagacaaaacggcatcgttggaaagtataattcaaaactgccatcaaaaggttaaaagaaaaaccactaaccaggacgaaggtgattgggaccggcgttgatgaggttcatgagtccagcacggccatagaacttggcgagaaagacagttgcgttagcttgcgcttcaggcgatttgatccaagccaaacacggccttatactacaatcctcactacaccctttccgaagaactctgcatccattacagctcatccgcatctttggtttcgattatcttacaagtaccaacaactttgatcgtacaaaatacaaacaaacgatttggaactctttgactctgttgtgaaagttatttctgagattttgtgggaggtgttaatgaagattcactgattatataagaaagacgatagctttaaaggattgtgtgcgtgtaagaagcccctggatttttgggggaagcggagagagattataaaaccaagggaagaaggcagaagacaaagaaaacaagataagaagagctgtttttctctaaagacaagggttgtttttgtcttttaattcnnnnnnnnnnnnnnnnnnnnnnnnnnnnnnnnnnnnnnnnnnntcaccctgattcaaggttttgcttcttgtgtttcttccccaagttatgtttttgtccccactctatccaatgcgcgtgtcatacacgtgacataccaaagttaccatttattacaatttttttactactagtccataccctataaattctgaatta

SEQ ID NO: 15737 - DNA, 394 bp, Arabidopsis thaliana landsberg
gattacgtagccgtcaccaagcagtgccgcggcgactccaacgggtccatgtgcctgctcctgctatgccaccgccatcgcaagggtaacgccattacagtattgattagacgtcacgccttactacatgacatgtatagagctgtgctctcatacaggtcaggcgtggcgtcatatcttatatatgataagtacaccacgccatgcagagatggaattgggcgtggcgatgacatgacaaatggaccggatcgcatcgtagatgcgcgggacgcgagatgacgaggctatggtacggcccgagtactgtacacaccacaccgctcggtacgctacgcaagggcggctcggctaatgaaatgagtacggccagcccgacgagaatgaacgtaga

SEQ ID NO: 15738 - DNA, 2083 bp, Arabidopsis thaliana landsberg
gtgttagtatccacaagttaatatggactcctgacatgctacacgctggattttgatccaccaggcattgcggatgcagatgtaatgaaactcattatggggataagaaattaatgttgagatccttcatttgtctcctggttcggtcgatgtaagttctttgcgtctcggcaattttccttgtttcgttttgagaaatcttgggacagtcttaaagtttgtttttgttttcagaagatttgtttgatttgttccttctatgaagattgtctaactgtgttcaacagtctgattaagttatctttaggtcttatgaatgaagatggttggtaattgctcgcaaatgtgtacttaagcattctccaaagcttgaaaatctaaccatcaaggtatatatatatatatatatattcaataagaaaaatctatgaatcaatatatatatacaaattgtgtggttgatcaatcttcttgattaatgtttttttaggatctgaatggttacacgggtgatttctccatgcctctaaaccaagtgagggtgttgcatgttcttgcttattgcggaactgctgaagagttgaaacacttaaagagttttctggaggattttgaacatattgaacttgttcatgtggatattgagggaaaggatactagcataatatcgcaagctacaaaggatctagcagtttcatctatgtaccaagtcaaagtcatatttttaggatatgttccacattccaaaccagttaaacgtgcccattctcttaatcctaacctaataggatgacccccgaataccatccacatctcataacatttcttcataactaactgacgacatattaatccaagaacaagtttaccagaaaaagatgccttgttagcagggatcctaaagaggtccccaaatggagactctagaagaaacgtcatttctggtgttcccttaagcgcaaatgttatctgaccaatgtactccgctttggagtacgcatttatcttcgccttggtagggtagtggtcgagtgcaaacaacctctatggtaattcaatcggatccttagaagtacttcatgaaagttgaaaaatacgatgaagttcttaacacgtacactatatccaaatacaaactaaacatgtccttgatattcatatacacgtacaccaaaaattttatactcaaatctactgttttttggcggaaaacacaaaaaacccattgtcaattgaaattttctgatttgaaatctccaaaatttacctagattttgtatcaactcattccccaaacgaagttaaaccaaacttacccttacccataattgtcgtcgccgccgatgcctcatcaatatccgaaactcctcgccgccgactactcttcctcgtcgccgccattagagctcttctctgaacagttaatcgataaacccaaaaatcgtattattgttccacactttaacacgaaccctatcgaaattttctccactttagcaacgactcgaactcgaacagagcctcaatcggaattgtgtttcagtttcgtcggaatttctctggttcttcgaaatcactcttcgtttcgtcggaactgttctgctttctcgaagaagacagtttttttttatttattttaagttttaaaattaataattttaaatatttaaattattttgaaatcagaaaacggttaaggaaactgaaccgactccacgaaactaaaccgcctccgtcagtttctcgttccagggcaaattcggccattttagccctaatggctaaaatgtggttgacccagcccactttgcctctttgtaaaaaaaaaagtcacaaaggtgtccaacgtaaaaattactttaatatttatgtggttaattggtcgatagtacaaattcgcagagtggttaattaagtacatttatcatttcaatggattgtgagttcgaataaggaaaaattgctgtcatctctcatacactggtggcaaccttttgttgcgttggaccgcgaaaatccaaaatagaaaaccgcgattaatgaaacaaatataaatagcgcaaaaacatggaggggagaatta

SEQ ID NO: 15739 - DNA, 744 bp, Arabidopsis thaliana landsberg
aagtgcaaaggatgcgacgcagaccttttcgagaaacactcacatagtatggaccatcacgatttcatgtccctccgaagccagcttctgctccaccgtcctcactcccgtgatcacaaaatcatcctcacaatccgaatcgatcatcatcccatcccttatctgcacatcctcccggataatccgctctggcatagcagctatccctgcaagaccaaaatcagcaaccataccgcttgatccagtctccgacataattcaggaacactcgaccacatccttcctcacccacctacccccgactctctcacgaaggtcatatcgctgcacggcagatccaaggaccgtccctcctcctccacagactccctaccacgagatctttttagcggcatactataatacaaaaaaaaaggttaagacacagaaatataagtaaaagggtaagccacctataatactaacaacaagggtaagccaacctaaacaaaaagggtaaatcctataggtcaatctacctaaactctagcaagtgactgaaccaatttcctaatagctttttgcaacacatttactcgataaaacattgaaaaccatggtttctcgtagcgtaacaaaccatgctgtgataccaccttgtaacacccctatcccgctataaaaatataaataaaataggagtgtcacgttgaacgcccggagtcagccaacccaggttttcgaaacgaattcgttcgcccgagt

SEQ ID NO: 15740 - DNA, 434 bp, Arabidopsis thaliana landsberg
attgcttttggaaaataggttttatcatagtcaataccatgaatttgcttgtaacctttcgcaaccagtctagctttgtatatctgtatattaccatccatgtcaattttctacttaaaaatccatttacactctatggcttttacaccatcaggtcaagcaaccaaagtccatactttgttttgtgacatggattccatttcagattttgccgcctctaaccacttatcggaatcggggcctatcagcgctttttcgtatgacgtaggctcatcactctctataataaatagagcatgatcatccgtcacccaatctccgaatctatcgggttcgtgacggctcctttcggacctacgtacctcaggttccacatgtataggttcaacgactcttcgtagatccaacgtatgttcttcctgagaagttggaac

SEQ ID NO: 15741 - DNA, 318 bp, Arabidopsis thaliana landsberg
ctctcctctttctttgaatctgcagctcaaaagggtaaaaattttgaagtgtttttgtgcacacaaggtgttcgacgaattgactgtgagactaaaaccaagaaacgactcaacatctctttctctgggttcgtttctctcttctccaaggttgtggtttctctcaaatcactatgattcataaacctaattacaaatactttatctataacatcgtaagtgttcttcctcatgttgaattatgttgtgtgtatggttcgacaaagcattcagccgtggatattgtagtatcttaggtcattaagcaaggtgtctttg

SEQ ID NO: 15742 - DNA, 194 bp, Arabidopsis thaliana landsberg
tggaacattctctggcagccagaggagatctctggagggtagaagcttcacattcgagttctactgcaagcgatggaaattcgtctctctttcttctccaacttggaccacttctctttctacgcgattcaactcttcttttaccgttacacttatcaaaacagcacttgctctggtatggatatgataggaag

SEQ ID NO: 15743 - DNA, 558 bp, Arabidopsis thaliana landsberg
cttttcggtatacatcagcccattaatttgatatgggctaacgtcaggcccatttttaaagaaatggtatctagaaataagtatagtcgttgacaaaaaaaaggaaattagactataaaaaaaaagggaaattagccagctgttatgttaactgaaaaaaggaaactaggagtttcaaaaaaaaggaaatcaggcaccgtcataactcgtaagtgtgtttataaaaaggggaatgcttaagcggagagactcagagactcataattttctcaaaatttgttttgccttcttctttctctcgatcgctagtatcgtgacggaagacgatttccaattatgtaagtaatcttttgattctattgatttctagggttttcttaatcttctgatttctaactagttaactttatcattgtaaagtaatcttctttctctgtttcgcaggtttctctcgatggaatcattcatgaccgaagaagatttgtagcaataattactgtaagaattcttctaattctcttgatttttagggtttctaaatttcaatatttaccagtt

SEQ ID NO: 15744 - DNA, 2510 bp, Arabidopsis thaliana landsberg
ccacacataactaaatatgattatccttgtaattaaatctccaatatcaaaaactgataagacaaccaagaaacaagaccggaaaaagataaagatatttgccacaaccagaacctataaaaccaaactcatctcatgaaggtcttaagcttggtcttcaccctcagtgataaccttggttgcagaaacagccttagtcgacaggaaatcagtgtgctcttggtatggcgatctggagaatctagtctctttccagaactctggtgtaaggaacccatatgtcttctgtaagcaatcgaatgtcgcctgcatcataacaccaacaacatcaacacaatggttaagataatcaagcaacatcatgccaagagttcaaaaaagaaatcaagaatatcaatctatcacaaattatgaagcatctacatccatcaaattaagtacttgagatgaaaatcatcaacaaaatctatgatcatctacaaattgcaatcagctacatttagacgcttcatttatcaccaactactaagcaaatgtgaaccaaatccctattaagggataaccaaatcattaaaagcagagctaaatcaaagaattctacagctaaacattatcaaatgcttcaaaaaagaaaaatcaaaatcaaaccttgacaaagtttccaagggttttggtagatcctctggaagaagtaaagacatcatcaataccagcgaactgaagaaccttcttaggaaccctagcagcaacaataccagaacctctcggagcaggaaccattctcacagtaacagaaccacacttcccggttaccttacaaggcacagtgtgtggttttccaatcttattcccccaataacctctcctcaccggaaccacagacaatttcgcgagaatgatcgcgcctctgatcgccgtcgcaacttccttggagcatttcactcctaatccgacgtgaccgttactatctccgacgacgatgaaggccttgaatctcgttctctgaccggctctggtttgtttttgaaccggcatgattttcatcacttcgtctttcaatgaaggaccgacgagtaaatctatgatctggtactccttgactgggagagaatggaggtagatctgctcaatctttgtgatcttaccttcctttacgagacgaccaagcttagtcactggcacccatttctcctcctctggagcacgacctgcacggcgaccacgacttctcggaccacctcttccaccgccgcgaccaccgaatccacgtccgaaatcgccgcgatctccaccacgttcgacaccacgctcaccaccacgttccgccattgtcgatgcactcgattttgcgtagaagagctaggagatttgattcagttttcggtgtgttagcgagaaacggcggcaaaaaatgattctacatctatatccagacgagaagagatagttagggtttcctggctaaaatgagcttattgggtttataagcccattactaaactaaggcccaacatatgattcgtgtaatgtaatgactgtttcttgattcggtttttttttctgtgtcagttattgcatgtttcttgaaaaatattttttgggggtgataattttttcactgcataaacattattgagctgacacattgacatatttaaaaataagaagatacagagatagaacaagataaacaaaccccaccattgatattacctgccaaaactcaacagacaaataaaaagacaagaccacgtaaaaatctaaattagtaactagtgagttcataaaaatgaatttatatatatatatatatatatatatagtcatgattatcacatttattttgtaagagtaagtaatggttagttgagtcaaagaggactcaataggggagagtagaagtggcagagagagggtggtggtcattgaaggagtaatggggacaacaaaacaaacacctcttcgttttaaccaaatgcatgtggtttttggtttttacacacactgaggacaaattgggaattgcgaattttaattttttcatatataaactgttttactatttacgtcaaaaacaaaagcaaaaaacttttttatttttctcattgtatgtttttcacatatatatacatatacataaatatccttaaattcaatgcctatgaaccaattaagttcatagaatcatggatagaaaaggaaaaagaaaccatcataattacaatgagaccattagtattcaatgttataaagatgtttttttaggagtaacattttttttaatgaaagtaatttgttttcttaaagtcgatataattaaccccactctctctacttcaatcaagtcttaaacctttgctcccacaagctcacctgaaactctctctcttcctcttctcacactgtctctctcatgttcggagccacggcaaggctcgatgaccaactcagcaccacaccaaccaccatttatatagacccaccctcccaagaccagccgagtcacaact

SEQ ID NO: 15745 - DNA, 3014 bp, Arabidopsis thaliana landsberg
tatttaaaatacttacttaaaaatactatttatagattttactgaatttatgggggctatgttgtactttgcttctccaaaataacatcaagcccattttgtcacatccgcataatcatctcgatatgtgcgtgccaaatgatatgtagtcgatcaaactctataaagccttaaaaattcaacctccatataagctcgagcacattccctaaactttttgcacaaatgcctttgtttactttataaacctttaatttcaagttttgatggtagatgcaatatccatggtggacaatggatcagatataggctattgtctcaaggagattttggtttctattcgaaaaaaacacaatttcatggtcatctagtataatcgatttgagattcttgggaaaccaattccaactatcaattttgctcaccatccactacaccaaaagcaatcagataatggtgatgatcgggattttgagccgtagatacaattagaactccgccatatgcagtcttcatatgagtttcatccacaatgtgacttttctcataactcggaagccttcaatggaagctctttaagcgaaaaacaattacttaaacttattttcctcatctacttccgcgataataaactgaatcatgattcatcttttgaaacatgtacatataacaatgcacaaacctaaaacctttctcttgggaacctttaatatcatttgcttcttctctttctcctctccacgcgctataatatatgtgacttgcacaccaaatcttccttgaaccaattcaataagagcttttggattggagtggcaatttatctcggataatcttcaaccaataacgaagtaaccatagtcggtgtgcctctctttttacttcgttcaatagttgtacttgactgagagcatgaatgaatccttctatgagttaatatagcatatagcttacacatatcacgtctcgcagttcatggatatcaatcgcatccattatgtgcttctgaacctacaaccacatatctcaacggctccgatttattcacaacaaactcaaagacattgttatgtacaaccttttcaactaaactttatattgcatccaaattcttggcctatcataatttcaaacacataatctcataatattggtccacacgcatttcattctaaatatctatcctcattctccaccataacaagatattgttatgatggatctcctacatacatagcaaggacaccaccaccaatctcatccgctccaccaataagagatatatcttcattatttgcaacattttgtctaaccaattcctctcttaatacttgatcaaattgttcattctcatccatcttcaaatttggttcaacatcattgttaactttaacatgcaatacacttctacttcttcactcacatcctcaaaataacactctagatcttcatcatcccgaatataatttggtattcccttacgtccttggaatgagaagggaaagtaactcactttaagatttgtcgaagtctcatctacatttcttttccttcaaatcttctcaatcaactttgcatatgttacctcttcttttgattttttcaaaattaatcaaaattaatgaatacactttttcatcttctttggtagaattccaaactacatcttctctaatactattatagtacccaccataagcaaaatgtatgatttagaaattccaaagtaccttccccagttgtcccaattatcttctcaatcgcatggtcccaattatcttctcaaccgcatggtaaacaaggcctttccataccttcatttgtagggaatgaatcctcgtttcatcaatcattggtaatattatcccttttatactctcatgaatctgatccatccatctcctcaagatcttcagtagtaacaacaatcttagcttcatctaaaccacgaagaccaaacttctcctccacatccataatagccttatctaattccaaaccagcaggaccaacctcctcctccacatcactaacatgcacgataaccttagcttcatccaaaccatccacaacaaccttagttgtttccaaaccaccaagaccaacctccttctgcacacccttacatgtttccaaaccaccaaaaccaaccttcttctgcacatccaaaacagtcttagttgtttccaaaccagtaggacaaaactcatcctccacatccacaacagccttcgctccaaccatatctatttccaaacaacaaggttagacctcttcctccacatccacaacatccttagcagtttccaaaccatcaagactaacctccttctctaaaatagcgttagcttcttccaccacctcatttcctcaccagcttctatagagttgtgaccaaccccgtcctccacaacattagtttttgccacagcctcagcttcctcacccgcttctaaagagttgtcttccaaaaacagctccttgtttttacacaattagcaaacacttttagaacatttttctagtatggaacatattatgatagcctagtggaaacattagtgtcatacaattcccaaaacagaataaaaacaattattatttcacagaacaattacttgcaggtaatcttttttcctttttaaaaaaatttatacaattttcaaacttttctatataatacataaccataaaattcgaaaaatcataaattttagaaatcaaatcgtcttatggtgtacggcgtgtcgatctctagtatggaacatgatgtatcatggtttttactgatttataacataacgtgacaatgatttttagagtctttctagttattttcgtatgcttttgaatctttacaggtgcatatctacttttgagaggtatggagcataataaaaaaatttggaagttttctagcaaagaagaccaacaaatacgttattcacatgttggtgtcgatcgagatcacatcagtatcgatcgacacctttatcgacaaaggaatttccccg

SEQ ID NO: 15746 - DNA, 352 bp, Arabidopsis thaliana landsberg
gaataggtttaagcccttgaaaatattttgctgcacattctttttatctacaatgtactggaaaccccagggggggcttcttagaactttttttctgtttcatcccgctcaatccaactacaaccaggaattttctctatctttctttccttcatcatcgttctaactctacgaacatccttccacattccaaaactagcatacatgttagagagtagcacatatgagctcgggttatatccagcctgcaaaataaggtgttttgcgacaagctctcccgtttcaaactccttgtggtgactacaagcggtgagaaacggtctccatatgacatcatttggctcaacaggca

SEQ ID NO: 15747 - DNA, 1055 bp, Arabidopsis thaliana landsberg
caactttggagctgtggttgcacatcatttggtctttcttaagaccaagccctttacaggaacaaggaagaaaactgagaggattggtagtctcctcactcatatctttgagcactttcacattagtactaagggagagaaggttgtgaccaagagagtcactatggatgagacatatctgaagaatgctcattagctgaagggcagtttggtttggtgtttcaaagatcgtatagagaaccatatgattcagttaccctgtcctgcgcttacagagattacaggagagccacatgagcttggctttcaccctgatccttcacttctacacgccgcaccgagcactaggagacagagaggttcagcttcaggatctgcgcctacatagacagaagataagttcatagaccctgctgggggacttcaatttgggtcctcttcttcagctctaccatatcatctgccttctcctcctcctatcccgatggagctagcggtctttcaccagtacgttgttgacagcttcaaaagcgtttggaacgctatagctacactttctcgctacggttgtgttgctcctactcgtagacgtcatcgctctcccgcacccacctccggctctaagcataagaattaagccatcctccatatctatgctttgtactctaacttttcttttcttttctttgagacgatttgttgtttgcttcaaaacttgttgcacttattatcctatgctttgttggacctattgatgtgtgtattagtgatttaacagttgaactgaaggatccatgtgaaaacactaacctgaactctacaacactgagctgaattcgcaaagctctgtaaaaggaccagagtgtcgatcgacaccacactggtatcgatcgacaccacttcacagaaaaggtggcaactcacgtttctctatcttttaacttttgattatttttattttggttcctctatcttgataactttgaggacagtgttatctaagtatgggggagttagtgacttactttatcttttcctttcgtatgagtcagtta

SEQ ID NO: 15748 - DNA, 465 bp, Arabidopsis thaliana landsberg
  unsure (1)..(465): unsure at all n locations
tgcgcatgtaatgaaacccaacgattctggcaccaaataaaatgaacatatagttgaatcttgcactctaatcaatttgaagacgcgcgactgtacccggatttgcccgacttatcatgtataggtgagaannnnnnnnnnnnnnnnnnctatcttgtatgacttccaataacccaactgttgacacgaacatattaattgataagtcaggcataatatatttacaacttacgcaaattataacacaacttagccacaaagtgatgttacgtcagcctttaaagggtcataactcaaccggaatgtaagttatatgtcagccaaaatatatccataagtcaaccgtaatatatctataggtcagccaaacagtaataagtaagccaaccgaaacactgttattacctttactcgaaaatgcttattgatgactattccgactgtttttggtttaacatccggacc

SEQ ID NO: 15749 - DNA, 836 bp, Arabidopsis thaliana landsberg
tagttcagggacgaaagccaaagagatgggcaaggaaaaaatgaacatgccaagtctagttcaaaatggggtcatcttggcgacgaagacgagagaaagttgtcccgaatacacggccaattgactgtatgtgtccaaaagatgttcaatcatcaaagggcaaaataaatacctatttgggcaagaatgggcaaagatgggcaagaatgggcaagtttgggcaacataggcatgctgggcgtgaagtttgccccgccgggcgttgaccgtttgaccacgccatggacacgtgggctggcttacttggagcccaagcaaagtttcttggagccaaatttatgaggattggagccaaagtttccccttccacgtgtcattgtcccagtcttgcagcatatgtgtcttcatgggcgggcgacatgtgtcccgcaaggtgtcaccaccagatgacatgcgtttgcttggagcccaagttgttccacctataattgcttggccaaagtcgagccatttgatgggagaaaggagagagaccggaaggctgcccgactcataaaaatcgcccgtaaccgagagaaaacttgcccgcgattgagaaactttgcccgtgatcaagatcctttgcccttaactaaagaattcatgtccatgatcaagagaacctgttcgtggataagatatccatgtcggcgaccgagacatcagtgaagatcgtgtgtgaatcatgttgagtcgaatcaagacttcttttaaaagatttgatatgctgagttgtgttaaaactcaagatgagggaggttcttagaagaagcttatcagatcaaatgatgtggaga

SEQ ID NO: 15750 - DNA, 576 bp, Arabidopsis thaliana landsberg
tgatcgttcgtccgatcgttcatggttcgttcgtccgttcgtccgatcgttcgtccgttcgttcgtccaaataatctttttcttgttatgctgccgaaattccgatcgttcgttcgttcgatcattcgatcgttcatcgttcgttcatagttcctatccatcgttcatcgttcgttcatacgaactattcaccatcactatttaccgttactttttaccgttactattcatcgttactttttaccgttactttttaccgttactatttaccgttactttttaccgttactttttaccattactatttaccgttactttttaccgttactatttaccgatactttttaccgttactttttaccgttactatttaccgttactttttaccgttactttttaccgatactatttaccgttactttttaccgttactttttaccgttactatttaccgttactttttaccgttactttttaccgttactttttaccgttactttttaccgttactttttaccgttactatttaccgttagtatcaccggttactattcatcgatcatccgatcacccaaa

SEQ ID NO: 15751 - DNA, 494 bp, Arabidopsis thaliana landsberg
attcatctttctattgttcattccaactatgcaggtacccgtataataatgctctgcatcatcaggtggagagtataattttatcgtgtttagaaagcaagaacgatgagatagttgaccatcttctccgagagtgtgatttgattggaaaaattattaaaacagagaaacagccaattctttctggtgataagcaggtatgaattgttttgcgcatgcttatgagtaaagtttgtctagagagataatacacaatttaccatgttctgtgagacatgatgttgaactacttctgtcatcagttctgtgaggcaagatttggattctgtggtttgcaaagcaattatagttatcgttataccttcttttttgttttaaaatcagattcagaaatggcctgttatatccacttctcgacttttcttaaggataaggtgtactgagttatagatataattgattctgctttcatgcagccaacattagctgctgct

SEQ ID NO: 15752 - DNA, 503 bp, Arabidopsis thaliana landsberg
aaaagccgctcgcaagcaaatgttttttcttcagtacattttatttagaaggtttttatggtgaattactaatggcaagtctccagtctttggacacacaagactggtgaattttaattgaatacacaagacttgaaacaaagaagcagaaacactttccgactagtcagagagagaggtggaggcttggtcagctgtttccttcaggaggttggcgtgatcgacgctgcagtaaaggctctttttgtctgaattcgtagtaagaacgaagcccgtgtacttctcccgcgacctttttaagcagatgttagctattaacttgaacatctcgttcccctccttgttgtgatagggttggtttacgtattcctcacccggcatccactgagaatcccacaacaagagagctagcctgttaaaagatctacagccccctaattgagattcatcacaagatatgaaaaatgttttaccttagcagcatggatctcagaatcttgttt

SEQ ID NO: 15753 - DNA, 588 bp, Arabidopsis thaliana landsberg
  unsure (1)..(588): unsure at all n locations
ttgcgtttgcagatgtatcggtatttgttaactacctactgggccaatgatgagaatgtgcaaagagctcttcatgtcaataaggtaatattatacatgacaaaaggtcaaatttttcatatttttggtaacaaagtgtcgaactctttatgagaatctatgattgcaggggagtataggggaatgggtacgttgttattttgagataccttacaatcatgacattaaaagcagtgtaccgtaccacatgaataacagcatcgatggatatgcatctctcatcttcaggtcaggtttaaactctagcttttgaagaattacttcaaaattcaaatacttttttgtaaactttgtgaagttttttgtgtaaacagnnnnnnnnnnnnnnnnnnnnnnnnnnnnnnnnnnnnnnnnnnnnnnnnnnnntctcttaattattctctcattgatgactggagaccttggatgataggagatcaaatcgctgggtattaccgtttcttttgtttcgatgggctctctttgataaactaattctattgttgtatgaactcattagactcttctatttgttgcggatacacgagg

SEQ ID NO: 15754 - DNA, 756 bp, Arabidopsis thaliana landsberg
tagactctttatcacaggctagttaacaaaattgaggacaagtgggaggctttacattttttttgtttatattgaccaacagtttagtaaatcccattgcatatcaaggccacacttcagagacaacaataaaagatgcattcattttatagacaaaaaagtactacacaaaagatttagaatccaggcgttgcaactaatgcaaattgaactgcacaaccaaacttgaagaactaattcagagccttgcgcaccaacgatttataattacgtcgcagtaatacctgatcaagtgcagaagcaaaaaggtctagaacatgaccctgagtgactagttgctttgcgatgctatcataaaacttgacagccttcttatagtacggagcggcatctttatctaaatctttgtgagaacgcacaggatccgacaaatcctttgagacaatctgtacaaaagagattacaaatatgcttcatacacatggtgtgatcaaagctcacaatgccaacaatcatcaacatatacttaccgttccagggccttccgtacatggacctccgatcaaagctacaattctagccccagttccaggcaagcaagctccaagcaatcctgcagctacactcaatgccacgcctgtacatcgttgggaccgatgacctggcttaacaggccactgatcactttgtagctcatccaaaagctacataccaaacatcattcacacaaagatagaagaatgagatgacaatttt

SEQ ID NO: 15755 - DNA, 1012 bp, Arabidopsis thaliana landsberg
aatgttccttctcttccagcagccttgcctgctaagaggcgagtccgcaattttccaagcagaggagaaactcctaaacgccaaggaaagaggcgtggccaacctttacctgcaaccgatgcctcttctgcaaggagtacaggattaacaccacaaatagaggtcaaggttggtaatttatcaggcaccaaagctaagtttgatgctgttgccaaagaacaaccccacttcagccagtcagttgcacccgatattcactcttctggtagtttgagtcaggaaattagaagagacacctctggtactggtggttctgctaggaaacaaactgctgatgtaactgatgttgctcgagtcatgaaagagatcttttcagagacttccctattaaaacataaagttggagagccttctgcaacaacgagaacaaatgtgcctgacgcacaatcccctggtgagatgaatttgcacacagttgagacccacaaggcagaagattcttctggtcttaagaatcaagaagctttatataacctgagcaaggcagataaactggtatcagatattcctcatcctgttcctggtgatctgacaacttcaggatcagttgcaaacaaagatgttgacattgggtcgtctaaggttgctgctgaaaatgagcttgtcaaaattccgggtggtgacgtagattcttctgtaatacaactctctttgggaaatactttgactgctaaatcgtctttggaaaagtgcactgcagatcagcttctgggagaaaaactgtctcaagaaggtgaaaccacacctgctagtgatggtgaaacatgtcacctggcagaagaaacggcatcttcattgagttatgttcgatctgagcctactgcatctgcgtcgacaactgcggaacctctacctactgacaagttggaaaaaaatatttcttttcaagatgaagttaaaactctcaatggtgataaaagagaagctatccttctaagttcggaagagcaaa

SEQ ID NO: 15756 - DNA, 2740 bp, Arabidopsis thaliana landsberg
ctccctgacgatgtattttttgctccaaaagaaaagtatcacgttgtattttatttaacatatctattttcaaaaataagataattttaattcaactgttataatgcttcttattctatgacttttcattctatcattcttctcttctcaattaatttacaaattgtatggctaaaggtaattcttttttttgtactacctggaacctaaagtctttttttttttgtgtgtgcaaaagagtactaaaacctaaagtcaaacagtcttgtgcacagtttaattattttttgaacatatatttaatcgtagaatgaaagattaatagcctgactggtttaaacgtagcggatgcggttgcgggagtttgcaaaaacgggcggttgcggtttcaagcgttatcaagcgttttgaacgactggttgagcgtttgataatggatgcttttgcgggagttttatgactggtaaaccagcgggtgcgatagtaattaaataaaaaataaccaaaataaatataatatataactattaaaagaaataaaaatataatatattaccccccattgataatattagaggacttgattttctgaccaaataaaaatacaatatatcatctcgtccgaccaaatgatttctaatcgagaaaacaaatcgaaacatgtattcaatcaaaaaactcaaaagaatacaaaataaaataaaaacaacaatgctatgaaatagttaaagaattacactagctaatgaatgaataaaaggatagatgatacttatgtttgattcttgattttgattttcatcggatgccataattgagacaatagaattacaatatattgattaaggttttctaataaaaataagatatataaaagattagattattttaattatagtaattagagtttgggtggaagccacaattatttaatttaattaaaaaatgattattttttttaacctaaccgctaccgctcgcaaccgcaaacgattgcggaaaagagtttttgaaaaacgggcgatttcgagcggtccaaaacgatatctagcgatttctatgattggtgccaatcgctaacaaccgctaccaccagcaaacgtagcatttgcgggtgaaagagggagaaccaatcaagccctaactaatcttaatacaataatttaaacagctaaatcaaagtcaaaatttgtaggtaaggaaaaatttccaactttctactctgctcaccgcaagaaacctatcacaactatttaactactttgtgggttataagataaaggaacaagaaactggcaacacaaagcaaacagcagaagaattaccaacctcccacatcctcagagccttgttaaaagacaactctcgtcgaaacaacactaacagcatccggaacgcaaagtgaaggctttcagcaccaatacgtgataggtgtgaaaacatttctttatctgtgagttgcaatatacgccatagtgattgcaattgatccattactccagttggtccctccatctggaaattagcacgctacagtaataaccacatagcaaaagaacatcatattacaccacagcctttgtcacttgctggtaggggaaaactaaaacacatgttacgtatcagtaagcattggaataccgttcttcttatgagcatttcaaagcaccaaaaggcgtcagcattatcttcaaaaagaaatacaaatggagacactaaatcgctcattcctgtccacagattcgcaaccagacagttagtatcctacattagtatgaactcatacgagcgccgttttataacacgttacaaacccaacacaagagagatttgggaccttggcaataaccagttgcaggatcaacccaagcatagaccgcaaggatatctgacattctacctagatttcctggatcctcatagaactcaaggtggctatctgtccttaccacgtcaacaactgaggaaacaaaaagcaattttttaattcggattagtgaccattaatgtgcagactgaaactgaaaagcaagacttcctgtaagatcttgaaataaaagaaatgcgcacaatgtggtacctatccggtgcaatgtccaaagccattcagagactcgatcttcctttacagtcccaccacgagtatgagtctcccttgccgacggcgtttcagggacatctgatattctcaaaccatcaacaatctctgacgtgcagacagaatgagacaacttttcaacagattgaagatgtacaacttcaatttctgagttaatagaagcagttacatcattataagaagacccatgcggttctataactaaatctgcattcttgtcaattcgaaaactgtgcattctctcatcctccgatcttaaatcactttgcgttgaagtttcttcatctgcattataatgtcctctcttgcctaaactactcctcccaaacacatctgtgaccggcttagagggaaagccaaagatatcatctgcaaatggaccactggaaggaaagccatatggactggacggtggtgcaaacgaagaactttcatatattgagctatcatgactgactatgtcaactgactcactggagctttcacttctgcgcacaggagatttttcagtatcattattactcccatcaccgtgattgtcagtgttctcatgcccatctaaacaagcttcccgtctatcatttatatcctcctttactacctcattgttgtatgattttc

SEQ ID NO: 15757 - DNA, 856 bp, Arabidopsis thaliana landsberg
cagaaaatttgaatatttgagggtttatttattcgaatcatttccctcacgtccgaataataccgaatattaatcggtggcttttgttcgtgtgcatatggacccaatcattattggcggttccccataaaaacgctgtttgttatctcgataatgatataataaagaatctcgataaacttaacctaaaacaacacgctaattctactctatccgagcaagggacatcaatagaaccaacaataatgctaatatacaaattagcctatttaataacattctgtagtttgacataactcagccacaactcatgcataactaagccatgtgaatgttataactcggccaaaccctgaaagtgcctttcttacgctatcagttggtacaatcaagtaattaacatatcataatcacattccaactagtggaatcatgaaactagctcataatctatgtactttatcaacatcatactttatccaacatcattcctagacgttcggtcaacatagtttgttaatcgacacttaccgaaaacccaatttattttctgttttcatattaaagatcttgacactaatagaaccaacaatttggtggctagtttgaaatctcataataacttctggtttctcataactcggtcaaaccacaaaatcttctggcataactctgccgtaacgtattggtattccaccgccaaacataaaatttgaatatttgagggtttagttactcgaatcatttcgaactcgtttgacttattttgaatattaactggtagcgtgttcgagagattatggacccagtcatcattggcggttctccataaaaacgctctgtaatccgataatat

SEQ ID NO: 15758 - DNA, 781 bp, Arabidopsis thaliana landsberg
  unsure (1)..(781): unsure at all n locations
gcttgtctttacctaatacttgactcacatcatcttctttaagatcggtgaatgatgatgagtccattttatctatcaatagatttgattttttcctgaaacagaatgtaatgacaataagtactagcaaaacaaaaaaagaaagcaagttaatgattgtcttacattcnnnnnnnnnnnnnnnnnnnnnnnnnnnnnnnnnnnnnngtgtgtatgacctgctatccaaaccttacttcttgtcaccaatttagggttggaactctttttttctacaaaacagatagtgattagttgatggtaaccaatttacacaagcttaattgattacagagtggacatatactataccatctcatggggtaggcgaatcattcctttgcggctggtggtgtgtggaatctgtgccttcttcaacatcctgtacttgtcacttatttcctgcaaaagcaacttccattaaaacaaatcatcttctaaagatatccaaatgtcaatttaataacaaaaatacacaaccttgaaggcagtggtcttcctgttcttcacccaagcattccaagccgtcacagattgtatgttacttggtttcagcgaaagcaaatccgtcttgctcttcactgcacgcactttcgttgtgagcttcgacttagaagacctccacacacaacccatctgcttaaaaacagcatccttttgccaatcttctttcaaattgaacctcccctacacattgaaaacacatagttaaacacaatcatgcaatgattaaactcagcaa

SEQ ID NO: 15759 - DNA, 1549 bp, Arabidopsis thaliana landsberg
cattttgggctcctcggtcagaaacaatggtgggaggtgatccgtgcaaacacacgatccggtcaatatacaattctgcatatttctgagccttatcagtggtgtgcacaggaagaaaatgtgccactttcgtcaatcggtccacaataacccaaattgaatcatgatgacgagaggtgttgggcagacccacaatgaaatccatgctgatgtcatcccacttccacgaaggtacggacagtggttgcaaagctccagctgacttcaagtggcttgcctttatcctctgacaggtgtcacattctgatacatactgggctatctccctcttcattctggtccaccagtacaaaagcttcaaatcatggtacatcttgttgctaccagggtgcatggagaatttggaaaggtgagcttcatctagtatctgctttctgagcccagggtccttgggaacaaccaatcgatctccaaaccatagaattcccttgctgtcctgtcggaagcacttgtatttttctgccttttgctggatcatatctttgataacctgaacacccttatcctcaacctgtgccctgactatccgctcttgcaacgtgggctccaccgagatatagcttaggtcacccgaagaaacaacttccaggttcaatctgcacaactcatcacacagggtggtcactcccacatccatgttcatacaattgcactgggcctttctgctcaaggcatctgccacaacattggccttaccagggtggtaatgcactccaaatcatagtccttgatcaattctaaccatctcctttgcctcatgttcagatctgcttgagtgaagatgtatttgagactcttatgatcggtgtagatgttacagtgagctcccatcaagtagtgtctccatatctttagagcatgaactacagctgccaattctagatcatgtgtagggtagttctgctcatggggcctgagtgctcgggaagcataagcaatcactctgttctcttgcatcaagacacatcccaatccggtaccagaagcatcacaataaacttcaaatggcttggtgttgtcaggttgggccagcactagggctgttgtcaaatgctgcctcaaggtatgaaaggcatcttcacacttttggctccactcaaatttgactcccttcttcaacagttcagtcattggcttggcaattctggagaaatccagaataaatcgtcgataataccctgccaaacccagaaaactccgaatctgcctcactgtagtcggggtttccaatccattacctcttgtaccttctcaggatcaactgatatcccatcctgagaaattgtgtgacctaagaatttaatctcccttagccagaattcacatttagacaacttagcataaagatgatgatcgcgcagtcgctgaagcacgatgtgcagatgctcggtatgttcgtcttcattcttggaatagaccagaatatcatcaatgaaaacgaccacgaacttgtccaattctggcatgaatactgagttcattaggtaca

SEQ ID NO: 15760 - DNA, 3658 bp, Arabidopsis thaliana landsberg
caatgtcgtttgtaggagttaatcttattagactccaataaaaatgagagataggataaagtgaagtgataaattttatttgtctcaaaaaaaaaaaaatgagtatttttattagtactgtagaacactaaaaaaactttaacaaaaagaaaaaacactagaagaattaatctgcgccatgcatgatgaatgaaagaagtgaatccaagtattttcgtaataatcaaatcctcctactctcaagatcaataaataggattttggccgacaaaagagtctacacgtgaacactctgagggcggtcttggctttagaacgttggaaaaatttaatttagctcttttagctaaacagttgtagcgtcttatccgctttccaaactctctcttgagtagggtcttgaggggagatattttcgatatagtgatccattacatatcagcgcatcaaatcgtccgtcttttggatggagaagtatcatggcaccaaaccccttcttgtctcgggacttcggaggaccataggttctggaatgctgactcgcgtatggaaagatccatggattcccactatccctgcgcggccgacaaaaagcattcttgacataagagatcccctactctatgtcaatgatttaatcgaccaaaatacaaagatgtggaaattagaccgtcttcaagcattggttgatctcgttgatattccactcattttagggattcgcccaagccgtacctacttgagtgatggctttagctggtctcacactaaatctggtaatcataccgttaagtcaggatattgggccgcgagagatctatctcgtcctacttgtgaccccccttttcagaaaccaggtgtttcggcacttcaggcacaagtatggaagcttaaaactacgcggaagcttatgcattacgcgtggcaatgtatctctggttgtcttgccacttgccaaagattgacatatcgtcacatgggaacagataaaggatgtccccgttgcggagaaccagaagagacaattaatcatcttctttttcattgacctccttcaagacaaattggggcattatcgcctattccttcttcagggaatattttccctagaaattccctcttctataattttgacttccttttttggcgtggccgggaatttggaattggagaggaggtgttagaactctttccatggataatttggtatatctggaaaagtagaaatcgttttgtttttgagaatttcagggaacctccccctgacactttggctttggcacttaaagaggcatctgtttggaaacaagcaaccctaaaagaagacgtccccataagctcaccgcctttcctagtttcttctcagatttcgctcaccttggtccctgaatgtcaacttgatgcttcttggcatgcagaggactccttaagcggatatggttgggtccttgttcgacaagacttagtcctccatcttggcctcaagagtgctcgacgaagtttatcactgcttcatgcggaatttgattccttgttatgggcaatgcaatgcatgatctctattggcgatacttctggcgcttttgcttccgactattcagacctgatttctatcaatggcaatcaagacgattggccaactttttcagcggaattggcatcctatcgatctttagtttgttttttcccttctttccgtattagatttcttcctcgtagttctaatactcgagctgattgtttagctaaaacagctcaggctcgaaatagtctttttcccatgtaagcacatcggttcctgcatatggctctctctagcggagagtttgtgaaaaaaatcataaaaccaaaatactcctaatagagataaaactcctaatagaggagacaactaaaaaaagaatcataacaacaaatctattgcatactggatctaatcaagaagaagataactaaaacaatcgatgacagaaattagaagaaaaaaaagctgggaacaaaaagaatcagtgaacaaactcatcaagcaaaaaatgcaacttcaatcacaatctaccctaattctgactcgaaagtaactcctgtagtgataaatcttaactttacccaaagaaaaaatgcctcttcaaagctatatacaagacttaaaatgggtttacgaaataactcaccaaggtcacactgttgggaaaacttctgtacatctgcaaaacataaaacatgaataaacccataatcgtcaaatctcagctaatgaataaaccgaggagaggaagaagaaagccgaaatctttgggttttttcctcagcaaattaagaaaacccaattgaataaacgagcaataaacatacaacaaacttgcaaatctacaaaaagtattttagattcgagcaaacgaaacagagtatatagaaagagagattgagctgaccagtagagagagccttgtgttgaatagaagcttgacccagaaaggagaatggtgtaagtagagactggagttttcgatttttgattttcctcttcacttttctgaaatcaagaacaagcgatccaattttaaactacacccagaaaatctattacaagtaagaatcgaaaagagatatgtatacctagaaccgagctaaagctaatggagaagcagatcgagagctaacgataatggagaagcagatcgaagagtgagagataaagggaagtgaagtaccctaaaaatctatttttcttcttttgtccagaattgttgagaatcgagggataagaaatggttctgtgtaattttcaaattttaaagagatatttaagtcatttgctatttttggctacagctaatgcatctcaatgcaccgatcaaactcagctgaatttgttgattttttgggatgagttttataatctcagctaactaatgcattcaactattctaacaaattgtgttcaaacaaacatcaattgtcatctgcacctagatggatcagtcaactgatcaaacgaacaacacctagatagtacatttttttacttttgtatttgaattaaaaatattaaatattttaataattatcacaataaatctatttactatatttataaataaaataataatttaatattctataataagatccgtaataattgatccgttttcaccattcaacatttatttggaaccgcttgatccgctcttgttccgctagaaccgcttgatccgctcttgttccgctagaaccgcttcatccgcttgatagagcatatgaataaaaattatgatagagcatatggatgaaccataacagtaatccgagcatttttagaaaaacataaagaataaccttctttaaccacgtttcttccaccgtaaagttgttggtttttatcccaagaaacagcaaacatcacacaactgtgatcattatcacaatcatgcaagagcagaagagcgtaataacggttcacccccatctaaatgcggaagtatccattttttagagaaaatgaaaaccaaatgagaaagaaagaaactgagggttataagttgattttcttataaatttatcatgtaatattgtgtgttagggcatcccaaggctaaataccattatggtgttcaattacctatttttagcgttaaacttgtttctctcgaccatacac

SEQ ID NO: 15761 - DNA, 278 bp, Arabidopsis thaliana landsberg
gcttctctaccggaagaggtgcttcagccgcttctacatgcttcacatttatcatactctctagaagattgcttgaaatttcttctagagtcttccaagaccgattcaggtcgttccgatctcgcttccaagtctatacttccgacgatcctccgtcatcttcagcttgtttcttacccatcttgccgccattatctgaatctctctctgaaggtccttcgaaacctctgcgcaggtgaggtttcgaatcagaactttttcgtctatcatgacggctc

SEQ ID NO: 15762 - DNA, 509 bp, Arabidopsis thaliana landsberg
agatgtttcgggataatggaatgggctgggaatcgcactatttgttttcaaaaaaattatgcgatttttatggtgcgtgtggaccatttgggttgtgtgttatgtcaccttctcccatgtgtaaatgcttcagaggttttgtaccaaaatctgttgaggagtggaaaaggggaaactggactggtggttgtgtgaggcataccgaactagattgtctaggaaactctactggcgaagatgcagatgacttccatcaaattgccaacataaagcctccagacttttatgaatttgcaagttctgtgaatggtgaagaatgccaccaacgttgcgtccacaattgttcttgcttggcatttgcttatattaagggaatagggtgcctagtgtggaaccaggacctaatggatgccgtacaattttctgcaacaggagaacttcttttcattcgtcttgcacgatctgagctaggtatggcttataaattaaaatcacagaccttccttgat

SEQ ID NO: 15763 - DNA, 3485 bp, Arabidopsis thaliana landsberg
ccaaaagggtaagcagtctgttgttaaattgtcaatgatgtgtatatatatatatatatatatatatttattgttacatgctcagagatttgttgttttgcttgatgacaagtgggctaacgtgtgcaattgtgtcaaattgagcaggttgatttgctgagagggcagaagacagacagagtggatgtcagcttacagccagaagagctggatgctatggaaaatgttttacctgccaagtatgaggaggcaagagaagaggagaaattgcgcaataagccagtggacttgagtgacatggtcgtcgaggtaatgactttctttatatttatatctctatttttttcaacactattgatatgaatgcggatgaataatcaaacgtttacttggtggaatgtttaacagcatgtgcagcagaatagtaggaagaggaaaatgcatgacaaggaagggaagaagaagaaagatttcaaattctgaggtgttctggaagagacacggaaaaggattctggattctggacatgagagagatagggagagattcttgttccagagttattagtctttgagtcagagatcttgagttttagtcttaatgcttatgagattctatactatgttgttatctgaaggcttaagtaaaactttgtttttggaatttgaacaaattcaaagcctgagacttggaacaaaaaaagtggggaaaaaaggctttgttttgtaagcgacgtcttgtttttcaaattgtccgagtactttcagcgtttatggtttttaaaagattgatcattcggtctacagaataaaccgtcgatgtgatctatttcagtgcaccttgttatctttaagcgaggcaaaaatatgtacattttcacgacattcgctcctgaaaccaaattatgttcatatgttactgtcatatgcatagtgtgaactaattcataggcatgatccttgggttgttcaatccctgcatgtgatgaaaaaaacttaacatactgtggattttttcaatgatgtattctattacttttccaatattaggcgacaaatgattcgaccacacctcattccgggagagtaatgaaacagcgacaaatggccaattatgccactcattgtcctaccgggctaccaccatttgcatgagcatgatgactcgtagagtcgtagggttcctaaatcgcctttcttcacctttctttcaacattatctatttatcttcttttcaaatctcgcttattaatcattatacataggcctctacatggtagacacatttagaaacaacaagaagtctctccaaatatgaatggttattcagcctacaagcgatgtcagaatttttttaacacgtagttaaaagtttaactttgctagacaaaagaaatctaagattaatataaacataagaaagtatatatgcttgaaatgagacaaatttagctttaccacttaaaggttttaagctaagtggattccgcttctacaatgattaatgtttgtcattttggtttctgtttacaatgagtttcacatacatactaattaaactactaagtactagccattataaaacatgctgaaaaacgagtcacatatggttcatcgtaccataacacctttggattcccactactaaagagattcaactatgggtggtcactatctattttatctataaagtgtgaaatcctatttttcattcaaatcttaataattataacaaaagtaccattacgagaggattggttttagtttggtaagttttttttgaaccaaccaaaattgaatacaatgtacttcagtgataaaaccaaatattaaccgaaagaaaaactgaaacaaagtgagattgttttgagtttgacactactctcaattattaagccgaaccaatccaaatccgagccgaaattcgaatttaacccaaaagttcatcccaaatggtggtggagtcatgaaacgtgaattgaaagatgaataatagatgaattatttactatatatacaaccatagaggcttctatgccaccacacacttctcacttaagaaaatgaataactctttacaaagttctaaacttgtgcttctattggctattgctttggtcctatttcttaacacggagctggattttcttacagctgctggagccttagacagtgatagcaaagtattcaactaaaaatacctttctctatttgcaaaaatctctaagagttaacggattttaaattttgttggtactcttgtttcgcggattttataggtttatatagtgtatcttggcgaaagaaaacacgatgatcctgaacttgtcacagcttctcatcaccagatgcttgaatcacttcttcaaaggtattatacttgaatcatcttttaaaaatttctactaataatgatattggacaattacctattgaatttgtttatatgtacagtaactattcattaaacttgtcatatatacatgtttaatgtttattagttaaaacatttattcaggcatctgttaggttgataataatatattacatacgtttcttgtcacacaagaaactcattagcccatactctgtttttcttcacagaattgaaaccctcctctgttttaaactttgtttgttatgacttatgagctcatatttcacttttacatatcatgttatatacagcaaagaagacgcacaaaactccctgatctacagctaccaacatggattctctggtttcgcggcgcttcttacatcatcacaagctaagaaaatttcaggtactcaacaaaactcaaactcacatttaaggaatattcgtatctttgactctgaaaacaaagtttctaaaccagaatcttgtaaataaacacagagcatccagaagttatccatgttataccaaaccggattcggaaacttaaaaccacaagagcttgggatcaccttggcctctctccaattccaacttctttttcttcattatcatctgtaaaaggtcttcttcatgacaccaacttgggcagtgaagctatcatcggtgtcattgattccggtatctaactctctccttctctaactctaactccctccctctttccttggctcacatcatgtatgtatgtatatgcagggatatggccagagtcaaaggcagtcaacgatcaaggccttggaccaatacctaagcgttggagaggaaaatgtgaacctggagaacagtttaacgccacaatacattgcaacaacaagctaataggagctaggtactatctaaacggtgtagtcgccgcaattggaggaaaattcaacagaacaatcatccaagatttccaatccaccagagatgcaaacggtcacggtacacatacagccacaatagctggtggctcatttgtccccaacgtgagctactttagtttagaaacaaggtactgatatatatatatatatatatattatttcaccacagaagttag

SEQ ID NO: 15764 - DNA, 531 bp, Arabidopsis thaliana landsberg
ctttaaattggaaccacaataagtaagagatatttttttgttctctaattagaggaattagttcctcccggtcccacgtatatatgaagaactcgctcgaagtgatagagagaagatgaaaatgattacaaagctaatatcttgggtgatatggggaggaaaagagaagggtcttatacgtagaagctttatagaggagctaccaacggagattctaatgatgattctaagcaaattaccaggaaaacaagcattgatctgccgatgtgtctccaagacgtttcttagtgttttagactctccttgcttcatggagagacatcttcgtgatgatcatgatgacggtgaatgttgatacatcaattgggcctcagtgatcaaccggcccatttcaaggaataacgacccagccccgaccatcactttagaactcgagccggaccaccgggccgaaacccggcctggtcaagatgtgagttcggctgcgcagaaaaggggtactctcgggaattcaccttgcgtaccctacta

SEQ ID NO: 15765 - DNA, 3917 bp, Arabidopsis thaliana landsberg
tcgaatatgaaagaattagagaagcctttacatatgttaacccttctatagaattttggagcagaaatactgcagcttctgatgtctacaagatttatgaaagagagaaaattaagcttaaggaaaagttagctataatcccgggtagaatatgcttaacaacagatttgtggagagctttaactgttgaaagttatatttgcttaacagctcattatgtagatgttgatggtgttctgaaaacgaagatcttatctttctgtgctttcccgcctccacattctggagtagctatagcaatgaagcttagtgagctgttgaaagattggggaattgagaagaaagtttttactttaactgtagataatgcttctgcaaatgatactatgcaaagcattttaaagagaaagctacaaaaacattttgtctgcagcggagaattctttcatgtgagatgttcagcacatatcctaaacttgatagttcaagatggtttggaagtgatatctggagctttggagaaaattagagagactgtgaagtatgtgaaaggatctgagactcgagaaaatttatttcagaactgtatggatacaattggaattcaaactgaggcaagtttagtttttagatgtctcaacccgctggaactccacttatcatatgctctcacgagcaattcagtttaaggatgtattgcatagtcttgcagaagtagataggggttataagagtttcccatctgctgtggagtgggaaagagcagaactgatatgtgaccttttgaaaccatttgctgagattacaaagctgatttcgggttcgtcttatccgacagcaaacgtgtattttatgcaagtatgggcgattaaatgttggctgggagatcatgatgattctcatgatagggttattcgtgaaatggtggaagatatgacggagaaatatgataaatattgggaagatttcagcgacattcttgcgatggctgcagttcttgatccaagattgaaattctcagctttagaatattgttataatattctgaatccattgaccagtaaggaaaacttgactcatgtgcgtgataagatggttcaactatttggagcttataaaagaaccacatgcaacgttgcagcaagcacttctcaatcttcacgaaaggatatcccatttggatatgatgtaagttgctaattttgtgtgtttacagtattgttcttgtatgtttgtttgttgtgatagttagtggctatgaaaatgcattcttatacttatacttttagtgacttccattgaaaaggaaatatatttgtgtatgcgacttttctgagtatatcatctcttgaacttcaaaagtttctactccttttagttgctagtttaccattttacagtgtacctctctctatttttggtctttgtttgtttttgatacttattattttaatgcctttggttctgcataatcatttgcaaatcttctaactagaatttgggttatgccatctactgggtctgttcgagctttagagaggcattgttgaattatagctgcaaaatattttagtttctttcctatgactttgcttttattgaaactatgctttgatacggctggtcattttttgctctgtgatctaggtgacaggtaaggtggaagcaaggcaaagcgctgttgcgacacttgtgaaccaagtagctgttctccaaaagaaattctcatattgccaaccatcacttttgacaagaaatgatgttaagtttgtcttcaagctcgcaagagatgctattgtgtctcaaatcaagtggcctgaggaaactagtgatggcaagacgttcaaagaaacttgtgtgatttgttacgaaggcatcactgttgacaagatcttctcgatagatggttgtttccaccgtttctgcttttcctgcatgaaacagcatgtggaagtgaagctactaggagggcaaactgctagttgtccgagcgacggatgcaaatcagaagtaaagatcgagcgctgtgcaacatttttggatcctaagcttgttaatgtgatgatccaacgtaagaaagaaggctcgattggtgtttcagataaagtttactgcccatatcccaagtgttcagagctgatggtcaaagccgaagtcttggaatataccaaacagttgttcattggtgctgaccaatctggagcaagaaaatgcatgaaatgtgggctgcttttctgcacccattgcaaggtaccgtggcaccataacgtcacctgcaatgaattcagaaaaacaaagggctatcagaatgctggtgatggaatgctgaagtctctggcacagagcaagcggtggagacaatgcattaagtgtaacaatatggttgagcttgtctggggatgctaccatataacttgcaggtacgtcattctaacttattagattgatcagtcttctttcaaaagaattggactgcattaaaaattccagttactggataaagaaaagagagaaccttatttggtcatatgttactatcattgattcaatgtttttttttgcggcttgtaggtgcggatatgagttttgttacacatgtggagctgaatggaagaacaagaaagcaacatgtttgtgcccgatctgggatgagcgcaacataatccgtgaaaggaatgcgaaccctcctaggaggtgactgtttcttctgttgcgttcaaaggttaatagagtagtaggagtaacgaatggttctggaatctaaagaccagttatggttagcttgggtttctttggtttttggagattgatcccaggtttcggtgttttttttgtttctatcttctatttcggtttattgatgctaggaaaaaatatgacatttttaacttgaatgttcaagatccgaggtttaagtgaaacttgtcatctccggatgaagttgaaatggccttgttcaagacttaatgtctcgcaggtattctcagatatgttggtttggtttgctcagattaaaatttggtttagttttgattcaattttatcggtttggaactggatccttccagttttttagttgaagatgcgaaaatggtgtcgttttagtaattaatgaaaagtaaaccggtagattaattaaggtaataataaaataacacgagagttgaaccaaaaaacaaattgaaataaagagtaaaacgtgtacttccaaaacggcgtcgctttacgtcgataacgattcctttatgggcattaccatctgatctccgtcgcaagatctgtcggccgagatgatttcgcagttttctttctcagaggcggctcatggcgacactgtgctttctcccatcggcttgatttcattgtgattttctaaattgaggatatgattttctgagccatgggaagggagagaagaaagcttagcttgagcttgaattatgattcatctgaaaaatgcaggcaaatgttgatgcacatctcctgttgttcaagtaaactctttgtgattcgccactacagtatcttgtccgttcaatttctgtctgattgatggcttttttcgttcaaaaccattgtttggtgttgatgagaacacgggagctgcaaatcataggtttcaaatgccaaagacgaggacttggcgtgaacatgatggacttgactttggattcagcttggtatgaatattgttacaagttttagtgcatctatctagtttggactctaattgcttctttattaggttgtatttgcttaatacctgaagatatattggatttaagaagaagccagtggatatacttatttaactagagattctggttttagtattgtgggcttgctcttgatgatagtggagaatattctttgaaccagggtatgttatagaggtctcagtttttatttctatatag

SEQ ID NO: 15766 - DNA, 711 bp, Arabidopsis thaliana landsberg
tacgcaaactagactaacatgcatgaaactaattcatgcaactatctttcatgcacaagcaaatataaaccatggggacttaacctcacatagtttatccacaatcaaccataataaatcaagcaatcatacaagcaagatctaacaataacccgattatatgacttaacgtataaccgaggatccaagcaatcaatgcataattagcacctaatccattctagttatcaaacaattaaataaacaagttggtttacatgcgttcattgaacaacatgcaaccacatgcaacacgcataacctgaactcaccttggcttagctctcaggaaaacgactactctcgactccctatacggactacgatccgaccaatctttctccgacggatgtggatctaagcattgaaccgaaccaacctcttaagaaatattctaaaactaagagctaaactacctactgattaattatactaagcataattaatcactactctaatcatgtattagtccctctaatcatggtttacctaatcctaattaactattactaatcctacttaacgtcataattaattacttaaatagtaattaaccaaacctagttcctaatcataggaaacttaccttggctaagcgactaaggactatcggacgcctagactctcgactactcgctcaacgactcactcgggaactctcacggacaactc

SEQ ID NO: 15767 - DNA, 1214 bp, Arabidopsis thaliana landsberg
tcaaacataggtggggttggttgcatgttagtatgttgtcgttccccccattggtctgagctacgtggtgcatttccatttgccctatatggctcataggtttgatcgtttctttccggccttctaggtggggccggaaaactttcctgggctctggatcctgaattaatgggctggtgcattgcatagtgtgatgggaagtgtttctgggacgggcgaggattcaggtaataatcctcctcaaaagactcatgcgcggactgtccggctatgtacccggaccgttcgtgattatatgcggaccgtccgtcgttgtatgcggaccgtccgactgggtagtttgggttctgtgtcatatgtggtggctcaggtgcgtgtctgggtacttcattaaaaatgggcccggccatgactggcccggacggtctgcgatcacgcgcggacggtccagtcatgtgcagatcggctgttttgctgccgatttgcggttgctcagggtatgtgtccatcggcatcccataaaggggttgtgactggtcgcgacaacctatagccgatgtattacgcatgttatcccctaattcaacctcgtgcgatggaaaatttgcaatgctagatttgtcaaacgcacgtgctaatctcctatagtcgttttgcataccccctataatactttgcatttgttctcgctgttcatctacataattcttaagagattgcagctcgtttgtattacttacattgaggatatctggcgtgggtcgcaatgaagccggatccgtcgcccgttgtcggacgactttgttgttcctgtccactttgaagttggccaagaacctcgcttttgcctcctggatcatctgctccttgtgctcctcaaactggagctgttcgtcagccggcaatgtgtcccaagtcggctctatgatgttgtttggggaaatatcagagctatcccttgaaccggccattgagggccgatttgataggtctaaatatgttttccccagcggagtcgccaacaagtatgttgacgctttatcggagcgcccgatactcaagaagaaccggcggcggtgctctttggtcaggcgcagacggtccgtgcctgggccggacgtccacgacctggcgtgaggcggctagggtttcttctgacggccggtcggtccgcgccctggggccggacggtccgggggatcctctagagtcga

SEQ ID NO: 15768 - DNA, 6818 bp, Arabidopsis thaliana landsberg
tatttttgcagaaaatgtacataacaaacgtacgaaatgtatgtaaaagccgtggtactacatttatttttgtctgcccttctcggaaacttccttcaaagttatttttgccgttcttgaaagcgttgaccctacctttccatttttaaaatgttctctcattttgacccatttttttccataaaccaaccaaattttaactttcagaaacataaaactaattagatacaaaataataacatgtacatgcacttgcctcgtccattcctcacatcatcatatgtctttgtatatatatagatgaaccaaagaaatgaaaaagtaacaacgtcacctaaatctctctcacccaatttgtgtttcttctttctgctaaaaggttataatttttgtttcttggtttggtgagaatcttcaagaaactgaaacaaagaaaatggattctagttgcatagacgagataagttcctccacttcagaatctttctccgccaccaccgccaagaagctctctcctcctcccgcggcggcgttacgcctctaccggatgggaagcggcgggagcagcgtcgtgttggatcccgagaacggcctagagacggagtcacgaaagctaccatcttcaaaatacaaaggtgttgttcctcagcctaacggaagatggggagctcagatctacgagaagcaccaacgagtatggctcgggactttcaacgagcaagaagaagctgctcgttcctacgacatcgcagcttgtagattccgtggccgcgacgccgtcgtcaacttcaagaacgttctggaagacggcgatttagcttttcttgaagctcactcaaaggccgagatcgtcgacatgttgagaaaacacacttacgccgacgagcttgaacagaacaataaacggcagttgtttctctccgtcgacgctaacggaaaacgtaacggatcgagtactactcaaaacgacaaagttttaaagacgcgtgaagttcttttcgagaaggctgttacacctagcgacgttgggaagctaaaccgtctcgtgatacctaaacaacacgccgagaaacactttccgttaccgtcaccgtcaccggcagtgactaaaggagttttgatcaacttcgaagacgttaacggtaaagtgtggaggttccgttactcatactggaacagtagtcaaagttacgtgttgaccaagggatggagtcgattcgtcaaggagaagaatcttcgagccggtgatgttgttactttcgagagatcgaccggactagagcggcagttatatattgattggaaagttcggtctggtccgagagaaaacccggttcaggtggtggttcggcttttcggagttgatatctttaatgtgaccaccgtgaagccaaacgacgtcgtggccgtttgcggtggaaagagatctcgagatgttgatgatatgtttgcgttacggtgttccaagaagcaggcgataatcaatgctttgtgacatttttccttttccgattttttgctttcgattttttttttttttttttttggcaagttgtaaatgtacgtacacaaaattatttagtggaacgtatatgtacgaatcctaataaatatctaaccacccacaacaacaattttgatatatatgttagtttcatgtacttttttcatgtgttgttcatacatgatttgaatgttttgattttatggtcaaaaaaaatttgaaacgtaaatatacaaattatttagatatttacgtacatatatacacacattactcccgtatacgtacacattactccggtgtacgtacacattactaccgtgtacgtacacattactaccgtgtacgtacacattactatagtgtacgcatatattattacggtcagagtaaaatgaagcaaggcgacgattaatggtagcctctatgcgggaacgcattccctacaacaaatcatcatgattagtgacatgtacggtatgtgaaagtaaaaacgttataaagacgttggcgaaatattactcgattatctgccaagatgagacccaggtcgaactcatttattcccacgcatttttgaaacaccctgaccacaaaagcgcgtatactccatccggtgatcatgggacaaagttcggaaatggcatgatatccatcatccatgatgacaacaacaaaaaccagaataaccaactttctgtcttatgtgtgtgatgggtgtggacttttgtttgaatgaattaagggtgttatcaccaggttcttaaatagattttaaaaagacgcgatgattggtcccaaatcaatgtaacggtttagtaaaaaatgtaaccgtcaactctgtataattagatgtactaagtgtacgtacaaatgaaaacgtttatcaaacgtacgtacagacaacaacgggattgacaaaaagttgaaggataatcaaatacacccataatacgaggtccacaaacgtacgttcagaaggtaacgtacagacaaaataatatgtaatattacaacatagactgatcaaaagtttttcaaaaacgtatgtagaacatcttccaaaagcacggagacgtaaactctaaccatggcgaggactaaatagggtttttgcatgtcttcttgttatgccccgttttccgacatcttgtacactgattaggaatgagttttttctgcctctttttctgaaagttaaaaaatggtaaggcgcctaaaaggaaggaaaaattgcatagaagtgaggatgggggaaaatcttacccggttttccccagtagatggtattctcttggtgggtggtctcccaggtggtcgtctgctgcatggaggtatgagaatcatgtccgataactcttgaggaataacaacgtcttttgggtccggtataggtaaaacgggttcttggaaagaatcagaaaacacttgaaggctataccacaatccaacaacagccttcgggttgatgccaaaatgtattgcagcagctagagcatgctcgcatgggattcttaaaattttgtacctaagacaagtacacgtacactcatctaggacaacgtgaaaatgctcaccagtctttgaagtaacttgataactccaaggcccagacatcatgactgagaactttcctgacgcaggcaagtcttgaaggaaacgttcatctacctccggggtgaccaaagagttacacttcgacacttttttccgctttactgcaaaccatcgcatgatgacctctcggatgaactctagcatatagacaattggatacgcttttgccttgcttaagacattgttcattgcctcggagttgttgctagtgatgatattgtaccgctcccctttgcagtatgccctagtctaatgctcaaatccaacatcctctaaatactttgcgcatccggggctccgacctcttaactcttcaaagtatttttcaaaatctctaacccgatacgctttagcggcgctaaagaataaaccagacacaccgtaccttgcgtaagacaccgatatgttttgctccaggtgtactatacatgctccatgattggctttcgggtacaccacactaacgcctttatatatggaagaatgcctgtccgagacaatcatcaaatcgtcagtatctggaacaatctctgataatttctcaaagaaccaaatccatgaagcatcggtctcgctgtcaacaaccccaaaagctaatggaaaaatttggaagttcccgtcttgtgcacatgctataaggaggcatcttttgtaacgaacgactagctgcgttccgtctacaacaatgactttcctcatatatttccaaccttttacagacgccgagagagaaacgaatacatatttgaagcgctgacgacctttatcttcaggagtggagtggagatgacagattgtaccgggatttgctaattgtagaagatacagatatgtatgtaaaaacctgtaactagccatatcaggactcctgatagagtttactgcaacctctctagctctccatgctgaagaatatgagatccgaacattaagatcatttaagaccaattgagacaaatctacagctctcggacccccttgcgaagaactatatctattcttcataacctcgcctaaaagcttgtaagttgcatgtttacgataatcctttcgagtctcgatcttgcaaacatggatggaatcataccctgtgattttgaaacatttggaattgggtatgacatgtgcagtcaaatgccatgaacaattgtgatctacgcaaaccatctctaatcttttagggcatgaccgagtttgtttgtagcggaagcaccttttgattgcaataagtcgcatagtctgctgtatgacttgcctgtttttgaaaacacttcccacatacaacggatgacctgacgtactcaattcaacttctgtctcatcgactcgaacattggctaaatcatcgaatacaggagcaacattggtatcgagaaactcattctcaccattatgcaatgtagaaaaccctttatacacttcgtaggcttcacctgttgtcactagacggtcgtcagattcaatatttaacccacttgcagaaaccccttctaggacgactataccatcatctctagttacgttctcagctatatcatccacatttgcagccgtgtacttaactaattcaccttcgcatcttgtctcctctgcacagaatctagtgtacgtacattggtacaaaccatgttgacacgtcggggatggagcagaggttggtgtactgtcaaccaaaacaccagtgggttctacatgaggtacatgtgtacccgtcgacgtacacgatgccaatagacgagtgaattcccctgggggttccacggtttgttgagtgtcattcacgacgccctcctcaacatgaccatttccatattgttccacaatcatgtcaccccatttattgtaatcgtaatcttcgctactaccttcactaccgtctactgtagggtcgagtgtacttccacggctttcaccatcggtgtcatcgtcatgtacatccatatcttcgtcctcttcattatcctcgtcctcatattcatcctcatcaccttcatctatgtcatcctcctcatctacatttatatcttcgtaaaaattatgagctgcatcaacatttgtaacctctgtctctgtatggcctccattgccgatagggtaaaaagacacaaacaagttaacagaaggatcgccattacgaatcaacataaatgtatccaggctgatttgattctcaatatatactggagggcgattacttgctatcatatcagacatctttccaggcatccagtaacttattatagggttccattcactaaacttatagctgaaaacatcacatattgtacttgccaaatccgtgtacgtcgttgtgtctataatacgtacacagcgtccgaaacttcctttttcagcttcaaatttccaaccttcttctttgtatatccactcaccaaccataattgatacatgtaactccatacctgcaacataaattcctcaggtcagaccaacattaaatagaaaaaaaatcagatctttttgaaagctttcatttatgtcaacgaaaacaaaaagaatctctaacaaaacaatttatgtacttataaatttaacaaaacaaaacatagagctttcatttatatctacaaatacaaataaaatctccaacaaaacaatgtatgaacccagaattttttaaaaacgtatcattcaaatcacgttctcaagtgtaattaggattaacacgaatttcttacccagaacacagattgtctccccttcaatccttcaaactttgtaaaacagcaactgaaaacttcagattcttcaccgtaacacaaattcaattttcgtttcttcaccttaacacaatttcgatttacgttttttccccagaattctaatctaaattatctaaatttcttacaatataatctctattataataggtaatcataagttttagtcttgtcaaaactttttagcattaaaaacttctgagcccaacgaattttaaaatttttgaattccaatctcaaatgtcaacttcgccgaaacccagaaatcatttaatgcatttctcgtcgatgaacagtgtacgtacgaacctggttcttttggattccaacgacgcggttcatacgtacaaaccgggttcagtttcgtcaggggcattttggtcagtttttggtttaatagctaacaactgaaaggcccagcccacagtgttaaaatctgaaattaaaagtgaatcaacggctactgtgcacaatttaccctaaatattatgtaagcatactgataagactcgtccacaccttatatttttaggttctaatctttaccaagtttcttgcgaggtacaccaaattagtgacttaattgatgattataatgttggtcatataacttatgcttgttggtgtccgtcattttgtaataatccaatttttgatgagggtactttattttttttgttgctaagaatgagggtacttatacattaatttagttgttatgtgtagctatgtaacaagttaaatactcttaatgagggtattctaattactttgtgtaactagcaaactttattcataacaaagaaaatctgacgaccggacggttcaccagaatagtgaccggattgatggtcctggtgttggtcatataacatatgtttgttgatgatgcatgtcaccgtacaaactcatctttttgaaggtaaatttaattataccgtgttaaatggattttt

SEQ ID NO: 15769 - DNA, 755 bp, Arabidopsis thaliana landsberg
cagccgcatcgtggaagtcaattcctcaatatgtggaagtttcaccttgtttttgcctagtcaagactctactcagtcatgtgcttttgctatgacagagttacccgtgaagaagattccagtggtctgtgagtatgcagatgtctttcttgatgaattaccaggaatgccaccagaccgggacattgaatttgccatcgagttgcaaccgggaatggcacccatttccaagaggccttaccggatgccacccactgagttggcagaattgaagaagcaattgcaagatttgctggacaagggatttattcgcccaagtacttcgccttggggatgtccagccttgtttgtgaagaagaaggatgagagcttgagattatgcgttgattaccgccctctcaatgcggtaactattaagaacaagtatcctttaccccgcattgatgttttgtttgatcaattggtcggagccaaggtgttttccaagatagaccttcgctctggctatcaccaaatcaagatcagggcaagtgatattccgaagacggctttatctaccagatatgggctttatgagtacttggtgatgtcattcgggctgaccaatgtgccggcattctttatgtatttgatgaattcagtgtttgtgcgggagttggatatattcgtggtagtcttcattgatgatattctggtatattctagatataaagacgagcatactatgcatttacacatagtacttcagcgactgc

SEQ ID NO: 15770 - DNA, 606 bp, Arabidopsis thaliana landsberg
aaacagtgtgttcctcatctttaggttcaatatgaacaaacaatctcttggagccaatgaatgttatacaatcccaactagatataaatgcacttgaattaagcatagatgtcaacatgaaaaagatatcaagccaatcaaagcagacaaggccaacttctactattagctattcttgtgatttcaagtattcagtcagaacttgtcaagtctgagagaaatttcacctttacacataaaaatccctaagacaatgtctttatagatatactcagattctgcttacacataaggttatgttcataaaaagagtgtgcatacataaccacagatgcacaagcataactaataaagttctctctagtcctaaccaatattcccaagacctctatggtcatacacttataaaaaatcaatttgttaaaccaaataaacagaatcgaaaaccacatctcatcatacccggttcggttttcttaaccgaatcaaattatatataaaacggattaggcttctccggttttcgactgcgtaaagtaaaaaacctcacaaaaaccttttcttctctccccaaatcctgcaacctctattatcatagccttggcg

SEQ ID NO: 15771 - DNA, 448 bp, Arabidopsis thaliana landsberg
gaacagtatgtgtaccatcaaccgaactctcaacattagacgattgttctcctattttcaagggggttaatttccctgtatcattcatgggctgcaccagtccattcttgaaagttccatattgactataccaggatggagccatctgaggactaatttgttgatgatctgctctaaccgaggctgcatgatttttagaggagaaactctgagaaacagtatgacctaaatgcggcaagtgattcgctgactccttgttatttaacccacctctaactaaaccatcagatcttgaaggtgattgttgttcccctttgtgagctacctcttgaggatcaaaatcaccattttcaacagtcaccttggatgtatcgccctccccactttcaaccatttgttcctcgtgatgtaagctatcctttggaacgttttttgaaagaagagagcg

SEQ ID NO: 15772 - DNA, 403 bp, Arabidopsis thaliana landsberg
ttgtaggaaaatatgcatgttcaattgacccaacaaacctctgaaaaagttgatgagcaaccagagcataatgcttttggagctaagaaagatactggaaacgtgttgatgcctgatgctcaagtgaggcaccttaaagatcagcttattagggcaaaggtttatctttcccttccatctgcaaaggccaatgctcattttgtgagagagcttcgactccgtattaaagaagttcaacgggcacttgcagatgcctccaaggattcggatctgccaaagacgtaagtgtttctcacctcttgaaatatatgtttcttcctctttaactgatatttctctgccatttttttgaaccccagtgctatagaaaagctaaaagcaatggagcaaacactggccaaag

SEQ ID NO: 15773 - DNA, 350 bp, Arabidopsis thaliana landsberg
atcctaatttcaaaaaagcaagaaaccataaaagaggacaaaattgtttgttactcaccaaccatgtatggcttcgaggaataattgcagcctgcaaaagaccaatccagaaggcagagatagccaccaacaggctcaagatctttactatatgcttcatttgtcccttaaagtaaaaaattatgtaaaagagtttaagttagctgcgaatagaaatgcatagacgatcacagcattctccaagaagttgtagagcatgtaaaagaaatcactcagcgaggcctataaaccaaaatctagtaaatcaatgaactattcacaatttcgtagttgtcatgatcaacacatat

SEQ ID NO: 15774 - DNA, 690 bp, Arabidopsis thaliana landsberg
  unsure (1)..(690): unsure at all n locations
gcttgtgtccgaagaaaacaactgagccaccacggctcgactcggctcggcttcaactatttcagccacttcagaattactcacatcgttgaccgaatcttgccagttaacggccgctaaagaggcgcggcttgaatgtctttaggagaatttgtgactggacgaggaagctcgccggctaacttgggaaaattgaggtaagccgttgtacctttaatggctaaagcggcaacgtcgtgagctcgagctgccatctcagcggtttgaaatgttccgagccaaatccttgttttcttgtttggttctctaacctcacaaacccacttaccggagtttctccgacgaactcctctgtatattgggnnnnnnnnnnnnnnnnnnnnnnnnnnnnnnnnnnnnntcttggggcagctgctcgcaagcgtcggaatataatcaccgcctgaggaaaccgaagactcgtaatcggagccaaacatttcagaaaaagcagaaaatgagttcattgatcagaagagtactctgtttcaagaaactggataaggtaactaaaagatctctgtcttttttgttggtatggtttgctgaaataatagtttctctctctttctgttctagttcaggtggatttaatgtttgtagataaataaaagttggagtgagacatgctgttttataatggcggaagat

SEQ ID NO: 15775 - DNA, 741 bp, Arabidopsis thaliana landsberg
aactctgtcagagccgccgcaatcgcttaagaagccgacaccgaaagcaaaactcccggacgaattggatgtctatgtttctaggtccgttctcgtgttttcttttgcttcgtcttcttcttcttcgtttcttctgtttttttttgctgaattgtgactcgcgattgtgtttccgtgttgatcgtgcagcgatttcaaaggaatcatgtcggcgttgcagcaattcagagagaaagcgcacgaagatggccgtaagaagaaggaagaaagcatttccaggtgatatatctctccgttacatgtttatctccgattaggttatgtaaccttcgatttcatcgttcactatgcagttatcgataaattcatgtcgatcgctcatgtgcatttgttgatggagcgtttcttctaattgttatcgttggtacatgaattagatgtggatcttgtatcgcaaatcaatttatcaattagatatagctagatgaagctaaggtgttcgatcatttgttctagcatttgatattggttgatttgttgtgagattggttatggtatgctcttgtatcgcttaaactagaaagcatatatatgttcgattgatagatatcaagctcgtttgtatgtggatttgtctggatcttgtatcgcaaaccaaatatcaactagttttagctagataaagtgttcgatcatttgttctagctcttgaattgcatattctataaagcaaatgtttaa

SEQ ID NO: 15776 - DNA, 5375 bp, Arabidopsis thaliana landsberg
aggttggttttgataaatgtactgtcatcaactgaatgtttgatcaccggatctttcaatcttagaatacagttgggttacatacatacgtgagaaacaacatcttatgagttatgactaaattcaaacatattgaacttgaatctgatctaccaaatttactgcaagtgatccaaaatcgttactggttagatcattgtggtaaaggagattcgcgaatttgattatctgattccttgtttaaaccaaaagattcataaaaccaagcaagttttgaagatactagaacttgacatggggaacatctctcttgagaatgaaacaacatttctcggtgaatctcttcataagagcatcaaaactaagggttaagagttagacaagtgtctattgttgattggctgaatgataaatattaaatattgaaggagcaaaaaatcaattcaaatttcaatctcacaaatgaattagaaatgtcaataagtaaaccattttgttcttattttttatatcatctatgttaaactatcaaccatttcttttttaaaaagttatatgcccataaggcattgaaaacaagattttggttagtctttatgaatgataagcctttcaatttgttaatcatctatgttaaactatcaaaatttgtgtgttttgtaatgtcatgtatgtatataagttgtaataattattaagttttttaaattaaaatgttttatttttaaatatttttttttcttcttaagaacttcaagctaagtttccacaattgcatattactaaaatttcaatctcttaactaaactcttaacatcaaaattttcaaaatcaattatatatatattcttaagaactaacctaagactagactaagcaaccatcaataatgatggtctaacttagtcttgcttggtacggttttgattcaccaaatgttcgggacggtttagataaaccgaatcgcccgccgtaaaatctcctagacagaggacacaggttgcggccgcagacatgtgttggcatattgaaggcgtgatttgtggagctgacgtgtcgatgacagcatcatagcaccgctccaataagcttgcaatagtaatgatttaagagctccaaacatttcatgatccttcttcttcagtctttgtctaagacagcacaaggaaaaactcatatcaagcaatataatgaagaagaccatcaaggttcatatcgtgacttttttgtggttcaaacaaactaagtttattttggttagttcgtaatttagtttattgatacttacttgcagaactcaactcatagacccgaggatatacttgtgcatgcaatcaaggtaatcaatgattgatttgaaccatcaaaataaggtgttatagtgaagtataacttgtatttacgtaaaacattatggtctaaactctcttctttactcagaagcgaagatcagctagtggagatgtcaagaatgcagtgaaactcaaggtaccccatctcttcatcttttgtgatctatctatctatctatctatctatgatctttgacttgatgaatcaaaccaggaaggagaggattacttacgtgtagaagaagaaatacctcatgatgataatgttgttgttattgatgatggttgtgatcatgatcatgatgttgatgataatgatgacgatgaggaggaaaatggaagatattgtagacgtgaatttgatcatggataccatctagtgaaaggccaaatgggtcatggcatggaagacttcatcgtggctgacaccaaaaccgttaaaggccacaatcttgggttatacgctatattcgacggccactcaggcagtgatgttgcggattatctgcagaaccatctctttgataacatcttgagtcaggttttagaaacaaaaactcactcattcccctctcaagaatttctcacagaatttaatgactttgttgttgttgtttcatgaagccggatttttggagaaaccctaagaaggcaatcaaaagagcgtataaatctacggacgactacattcttcaaaacgtggttggtccacgaggtggctccacggctgtgacggctatagtaattgatgggaagaaaattgtggttgcaaacgttggagattcaagagcaatcttgtgtcgtgaaagtgatgtagtcaaacaaattacggttgatcacgaacctgacaaagagagagatcttgtcaagagcaaaggcggctttgtctcccaaaagccaggtcccttcttttgtatcttttactaagaagaaaagagaaaatgatctatttcggacttccaaggcaaagccaataaacccatgttacttataatgattaggcaatgttccgagagtggatggacaactagcgatgacgcgtgcgtttggagacggaggccttaaagagcatataagtgtgatcccgaacatagagattgccgagatccacgatgacacaaagttcttgatcttggctagcgatggactctggaaggtttctacatatgaatgccatgggacgttattaattggtgcacccaaagataggactaaatcttgattggtttctttgtcaggtgatgtcgaacgacgaggtttgggatcaaatcaaaaagagagggaatgcagaagaagctgcgaaaatgctaattgataaagccttggctagaggaagtaaagatgatatctcttgtgttgttgtttctttccttcaatggatcgattaaatgattcaagtatctttaatgtttcattaggtgaaccacatattaagcagttttttgaaaggaaaacaaacattgtttcatacaataatatgttctcagtcgaatcactgttacatattgctacaaaaatgtgtatagtagaatcacaaggattcaggactcgttgacggtctgatcctggaaggcattcttaaaagtctgtctctttccatcttgttcttgaaagagtgcttaggcgttatggacatcttgttcagggcgtaatcaagatcagcctcgtcatcttcgtcactgtcctcatctccattcacgatcacctcagcatcattatcatcatcatcttcgtcataggtcgctttgaccattgaccagtagatgaaatttggggagataaagctacaacatcacccaagaaaatgcagaaacagagtcaagactttcaattaagattcctgtaaaagaatcggtgcaatggtttaaagatagagatgaacctgtttgaggattttagcaagcaagggtcaaatgggaagaatgtatccagcctctcaaacccgccaaaagcacgggaaagctcagactcaagtaggtcatcgaaaatgaacgagtctgagacgatgaacagaccaccttctttagcttgtctaaggaactccgcaactaccgatggaaggcatacctattctcaaagcagaattcgcttatcatgcatttgatacattggcacacttccatataacagttgaccttatgtgacgaaaagataactcaccatcaatgggtttagtttgtgcattaatattgactccaatggtgtaagctgggaccgaaagcgaggaacatccaagatggatctcatcctgaagcagagcacatacatgattgcctgtggtcacagaacagattcaaatgacagtttaaaataatgtaactacattttggaatgactctttgaaacttaaaactctcaaggacaggtaaaaaaaatattttcgaggatgaaatagcaacagagtgattgtagaattttgtgacagcaggggcctgggcttgaatgctatatatacctgacatccggagaagaaaatctgatgtgcttcaggcctagtatcatcattgcaagttctgcagtaacccacacactcatctatcaacctaaaatttttggacacaacaaaaacaatgttacaagttacaacaaactgaagcttcaatcagataaaatgattatgtttgaggtgacattttgtagaaatcgcttccaccttttcaacatgctagccacaaaggaaacaggcaaaaactttccacgagccaagaagctagcaagataagccaccgcactcattctgttaagggggagagacaaaagcacaaccaagtttgtgattagaacaatgacagaacatatcatgcagcgaacgagaaaatttaaaccgaagggatgcttgcctagtagctacatgcttgttgctggagagaaaaatctccactagcttactagcaaatttcacaccacaattttcaggatccagtgagcaggcatagaatatcagaaactgcagatgatatagaaagtgagtataaaccgagacatctcatgtcgaccatgctagagtctagaagaatatgtacataattatgcaaaatatgatagctatatggactacctgggtgaattttgatttgtatgtgttcagaatgaagttttcaaatgacttgaagaggctttcaaacacctacgccaaaataattaaaaaaaatcagaagtgctaagaagattctcgagtccatcattaaggaaagtatagatgcatatgtcaatgaggtcccatttggtgccatacctgatccaaacgaccatcattttgacaggattcaagatgctcaaaagctacgaccatcaatttgtccaacaacttagagactatacttccatctgatgtatcctgctttagaggtcccactggaagctgcaatagataaatcaagtccaaactttcgtagttcagcaaaaagaatgttccaactaacttgttatctagcaacttttaactgatacaaaaaggaaacataaacataaagtctacctcgtctccatcattcatagtgccttcagctgcatcttcaagttccatatcaaacattcctctactagagtcatcttgtggaatatcatcccattcaatctctaactacaaggatacaccagcatatcattcactcaccaataccacattacttactgacctcaattgtataagcatattctgtctacttacatccaaatctcgcagcctctccatcaccataccaagaatcatgctgccaccaacttgccctattgagctattctccaattttaataagctctccacatatatcactatcgactgcaaggcggtaagatagtttcgtatgagtttatcgccagtatgagcttacgactaaattgtccaaaatttaccaaaaagaaagactcacatggtcctttttgtgcatcttgggcatttgctggaagagcattggcactaatcttgagggagtaagaggaaccaaaatagagatttttagaagcgctgcatgcacccgagaaagaacgtctatctttttggttaggatacgggagtgcgaa

SEQ ID NO: 15777 - DNA, 706 bp, Arabidopsis thaliana landsberg
acactttttctgaagctctaaccaattatcagatggtagagtgttttgctctacatgcaggtcgagcttagaggtcgagtgtgagcattttgagtgagtagaggttgaactcgacctacatgtcgagttagatggtcgagcatgagttggacatgcctcttttgctgccataacctctgtttttgacccaatcacacctttaatgacatctctccatgctaccaccttgtgtgaggctaatgatttctttgagatcaaggtctcactagaaagatacttagcttcagctcccttagttaaagaggtttggaattgatttttaacaacaagcccttccagcatttctagaacactctctttctgtatagtagtattgcactcttggctcaactcaaccatttcctgaacttcttgggatctttccataatcacttccttaggagtatcaaccaagggtaccttctcttctaactctttgatacacttgatgaacatcatcttgtgtttctggaagatccttgcattaacttgtgcaatcctttctggaaagtatggtttaggttcatagggaagtggaatagggattgggttgctcgggtcatatgctcgttcgacaagccgagcaaagaagtcgagttcaatttcctgccttgatcttggtctcaaaacctccccttcctgaatcccactgttctcagtggcaaaa

SEQ ID NO: 15778 - DNA, 474 bp, Arabidopsis thaliana landsberg
agtccccgagttgactcccgccgcttcactcaaaactgtgtgtagcgtaactaattaccctgtttcttgcttctcaagcatctcgaagcttccattgtccaacacgacggatccggaggttatattcaggctttctttacaagttgtcattgacgaactcaactcaatcgttgagttaccgaagaagctcgctgaagagacggacgatgagggactcaaatcggcgcttagtgtttgcgaacatctgttagacctcgctattgatcgtgttaacgaaactgtttccgccatggaagttgttgacgggaagaagattttgaatgctgcgaccattgacgatctccttacttggctcagcgccgctgtgacataccacggaacgtgtctcgacgcgcttgatgaaatcagccacacgaattcagcaatcccactgaagcttaaatctggcatggttaactcgaccgagttcacaag

SEQ ID NO: 15779 - DNA, 521 bp, Arabidopsis thaliana landsberg
aagaagtacaggaaccacacaaacaagatacttgtacctgcaggaccagaaagcaatatccttggattcaaaatggtcaagtcggatgcatatggggcatatcctatattcatcttattcagatgcatatctgaaacagctagtaagacatactttgtatgctcactgcaaaaataaatcagaaagaccttagtcagcatacaccaaacatagaacagtacacatgcaaagcccaaaataccaaagaaaagaataaaatatgattcgtgtgaaagactgaaacaggaaggataactctcatattctccaactgtaatacttaaggaagggaattagaatttatgataattcaaagttcagagcaaaaaaacattagaccaaaatattcttaatggaaaattcacatgcacgtatcttaactctgcataaatacctcaaataataaggaaaattttcgaatgaaaattccaatcttttgccgtcaacaataccagctcgaatatattccctgaactttgcag

SEQ ID NO: 15780 - DNA, 933 bp, Arabidopsis thaliana landsberg
gtcaattgctttatcaaggtcatgaactctatgatatactttctgcttaggtctccatcctcctccaccagacttgtgtctcacctgaacaaacgtccattgcaatctactagatgattctccaggaaacaacacgaaactttcagtttctctaagcttatgaattctcaaaataacggaaaagatcgaagaccttctgtataataacggtttagacattctatcaaacagcttctgtgcacaatcctcaccaaccacaatgaaattcaaatcttctacttctaacttctctgagaaatattagacgaaatcacaaaacaatacgaacacaaaataatttcctcgaggaagaatggattaacactgcaattttccccagtattctcctagtaaagattttttgctccctggactctgaggagtgtaatttccgcggtcattctaaaccggtatgcagaaacaaaatctcgtttatgggcttccaaatatttaaattcaggcccaatgggtcgacccatatatctattgttgggtcagaggctgaaccatttattgaaattgaatagatagttttcttctcgtcaaactcagacaggggactcattgttgcttcaacttatgtgtatgtgtactacaaaaatcaaatcataaaatttcttaattattcgtacataaatataaataaaccccattgaaagaaaatgaaatttcgttttttctattgaatatttttgtattaaaataaggaaatataaccgactccaacggctctattgtaatctctatataacatggatccatcgattgggattagacctaaaaacgctctcacgcacaacttcttctaaatctttcttctttgagtgaaataaaatcaaaattctctaattcgatgatgatccaattagtagacattgaagacgtgaaaagccg

SEQ ID NO: 15781 - DNA, 680 bp, Arabidopsis thaliana landsberg
ttctttattattttattctataatattataatatataatatttaacacgtataagtttttcttttgtgtgtttttttcaatccaaagcaaaataaaaatgattttgtcaatgtaattctcaagcttttgctggtgtattgtatctacatcttttaataacatgatatcttagttttttttatgtttgtttggtatctatatatgatgcgttggtctatgtcatgtttcggtcttcttgagtcaatcgtccaacatcaaagccaagaaaaatcattgagacaatatttcacatggttttgacattagattgatttgcaaaactagccatttttgataacttactacaaaaatatggagcatcggtagcacccgaaaaacgctatttaacattactataacgttttcataagcgctctatcatcgtccgtcataatagatcgaagacataatatagcgatttcgttttgtgttatcggactattagttattatagcgtattctttgctgcaatattagagtatagaataacacttcaattatgttattaataatgttgatcgaaacgatttgcatttaaattctaaatatggtattttcaatttcaatgaatcatttataataataaacaaaaataagacattttattcatattagtattaataacaacttacaaaaacaat

SEQ ID NO: 15782 - DNA, 481 bp, Arabidopsis thaliana landsberg
ttctctatataacgttttatagtcaaaccttatcatcgtgcatatagtttaataatcatcaaatcataccatcatataacctaatcctaatcaatcaaatccaagcctatatgctacaagtcatggagcataacaaaagaaaatgataccatgcttcgtagatacaaccctcacctcaattgattggaaacaacgactagaaagctggaattgcgattagaaactgtgactgcgttctggaaacttgcagctgaagaaacagattcaaacaacaaattagggtttctaggtttaaggagaatgactcattcttggccaacaagcaagcgcttccatggctatggattaccttttccgattgatctgaaggttctagtggcttccctgacacttcctctatccgaaaccaccggcgttgggtctatctatcctttggagtgaccagaaacgctttctaaaaaccttaagatgaaacagcact

SEQ ID NO: 15783 - DNA, 767 bp, Arabidopsis thaliana landsberg
acgaaggtttctgtggcagtcattcttcaggtagggctatggctttcaagattattaggatgggatactattggcctaatatgatcatggattgcgttaagtacgcccagcgatgcaaacgttgccaactccacgcgcctcccatccatcaaccttcggagttattctcttcgatctctgccacgtacccgtttatgaggtggtcgatggatatcattggaccattgcacatgtcaacccgggaacaccaccggttgctctaaaatcatagtttgagtttgagaacggtgcaataaaaatcctaattttagctaggtctacaatttatctatctttagagacaattccttagacccgacgctttaatcatttgaatctataactcgtttacttgcttatttatcttttacattcatttactttgtcttgcttatttatcttttacattcatttactttgtctagcttatttaaaaacatcataagtatattgtgtgaacatcgagagctcagtggaattagacccttaaatgctaacgacgatctcttatttgagggagtaagcttatagcaatttgagctatatcaaatttggcaccgttgccgaagttctcttttagttcaccattagactaggtgtcattttaagtttatatacttcttttctatcacctattcacgtgtttctttatcttttggtctcttgtgtctcaggtaccttcagattgagaatcacgtttcaatgacagactttcacgatactgtcga

SEQ ID NO: 15784 - DNA, 609 bp, Arabidopsis thaliana landsberg
  unsure (1)..(609): unsure at all n locations
ttaccgattaggttttccgacaaaagtggagggtatcttggggcgcaagttatgcgagtggcgcagactttcccacgatttgtgtctggcgttgcagccacagcgcatctccaaagaagggcagccacactctggacccgcgtcggtcgaggcatggcatctacaccagcggctttattcctgagcttttcgagcttagatgccgcaaaaacaaatctcttggtgacacttgttctcttaccggtttgatctactgtcggaaatttgtaggcctcattagcaggtnnnnnnnnnnnnnnnnnnnnnnnnnnnnnnnntgctatcgagtctctctctcctcgagccgtggcagtccaagcctgaatgaaattggcaagagatgttgcatcagcgagcttatgggagatgcagattccgatggccatgccgccgcattggaagtaggtcgcctttaccagcagcaatggccatgtaggagtggcctcagcgtcaagcggaagcaatagttggagggaatcagaatctggggatctgagaaattcagagagaggacaattatcggcacgtgcatcaacaaacacagctccttcgtcgttagagttgacagtg

SEQ ID NO: 15785 - DNA, 1155 bp, Arabidopsis thaliana landsberg
  unsure (1)..(1155): unsure at all n locations
cgttatggtgtaacgaaaaccctaatgaatttataagttacgtagtgcagtagcatatgtcgttttaatgtttctggttcatctaaataattagataatttattttgcatttatcgaccaaaactttaagctcatagatttgattcaaacaagtaattcatttactaaattagacggatcataggattttttgttgattcgattagccttttcagttatgcaatgttcttgagggaaacacaaacacagatagcatatttggcgacagcgtctgccttttgaattggaaagacgagaaatataactaaaggagatagaacggaaacaaccttgaagctgtcgaatttcttgaagaattccatgaatgtcattgatagagttgtctagacttttatctcataaatcaaacgaaccttagaccgtcaatgtttttctttccaataatgagagtcttcctaaaaccaaagtctagactaattcttgaacttaaatactaatagaagtgtggtagaatgtgtcaatggaaaaacccgaagttttgagttacacaacttgataagggaaatccaatattggcagaagaaatttcttgaagctgaagtcacatgggtgcctagaacgagtaataaagttgctgattgcttggcgaaatttccatttccaaataatacttctttttctttcttctctttggtcccatcttgtattgttcaattcctccatgaggattatacttcttcactataataaagcataaagtttgaagttaaaaaaaaaaaatactaatagaaatgtttcttgcaatttacagcgttatggagtctaagttgaatagttagattattacacgtttataaggctttattttctggcctagaacaacgacctgaatcttcaacaaggggaaactttaagtccacttccacttggacagtcttcaaactttgcaagcattagatgcaatttgcatcatagcgactgaaggaccattcgagtgacaagtaagacgggtcgtgtatgtccatagttatcttgttttccactttctttccatctacttcacgaatttttgtgatcggtgaattttttaagacgaaccgaataagaacanacatgtctattcaattttacgtatggtgggtggtaaaaaaaaaa

SEQ ID NO: 15786 - DNA, 1415 bp, Arabidopsis thaliana landsberg
aaaacttaccaagaaaataatccccaacacagatgtccgtgtcgaagtcgacaacacgcgctgccgcgccgtccgttcgcgccggcgaaggaagccttcgtcccttcgcgggcccgcctgagggtggcttgcccacgccagaagtagcagccttcgcaccagccgaagccttgctaggcccgggagcggcagcttcacagccggcaatggcttaccactgcccggggcggcagacttcgcggctccccgcgccttcttcgcctcacggaaaggatccccgatcctaacgaccgcccgacgcttctgagcagcgtcttgacgatccttctccatcactgccgatacaacaacaacgaatatcccgcccgtaaggaaaaatcttaaagtcgcgagccatacgagacgtaaaaaagtcttcgccagccgtgcgggggatcggaacattctttggccatcgacccccggtaacatccagcatccgcgccgaagactcccggagctcgggcgaagacatccttcccccgagggctacgcacgtccccatcaactccatagcaaaactatcggagacccccagtccccccactgcagtacctagttttctcttcttagcggccggggcagccacctgcgagggctcttcctcggtcacacccatcggttttttcccacggcggtcggcggcgtcttccccggggtaaccaccgtatggcaaacggttcaattcgaagacccgattcaatctatcgttggccccacggatatcccagctccgtagttcggcacatagcgccccacgatcctcgccacaccgtcttccgcttcgcgcacgaatgcggcgggatcccgaccatgcaaatccaacacgaaggctggacttcgcacccgctgcccgccccgggaaggcatctggcgagggcatacttcgcccagcgcccagccgtgcgccaagggcagaccccgtacgccacgaactcttcaactaaatctcgaccgctgctctgaccggcggcgcaccgaaggccccttcgtctgcatcatcttctgctacttcataaggcggataccagagtaatagtgagagcacatttcggacacggggagccctttatggccttcgacagtagcctcagcaacataaaaccaaaattcattccaattgccccacttgttgcgggcgcacgggaccaactccactactggcattgtggtcttgtcggtcttcggcgtgaatgtgcatgacccgaactaggcaactccgtcctcaaccatccttttctgccaatgcaaacaataattcttcgcaaaaacttcaactgacggctgtccgccgtacgaagtcgtcgcccagacatacttcgccagcgccattatggcgttcggtgtcagctgatgtatttgaacgctgaatctac

SEQ ID NO: 15787 - DNA, 5369 bp, Arabidopsis thaliana landsberg
  unsure (1)..(5369): unsure at all n locations
cagtgggagaccgatgacgtggccattaatagcatcactacactttactctctcccaacggcaacaatcaccttcatgatgagtccatgacttgagaatactaagtccttcttcttcttcttcttcggcatcaacgagattcttgagatacgacttgagctgcaacaaacccatccgttcagtttccacacagcttacacatcctttcatttggaattgaattatcattgttattgttatgaacaccaaagttatatgcttcttcggtttaacccaccaccttcttctctcgtctgttctcattttttttttctctgttttttttttgctagaaaaactgataatttgatttgatgcccaaagtttaaagagattgcatagtttgccaagaatagaattgtaagatgtgaatataaactgtacgagtccacgaaatactcaacccatattggacttttgtgttcaactccaaaaatgagaattgaccgatgagtccatatccatcgaacgtatgcatgcctaattaccatccaccagtagctatcaacatctctaaggacctttgtgttttgttgcgtaaattaagtaggagagtcaaagctatcctattgatatcttttacgttttttttcttctctattttgcatttatgtttacgtgtaattttaaagatttaaatttatactttacactatttttttagtttataaaagtttaaaatgataatacaataaaaaaatttaaaataaaaaattatatattttcgtcaactatttagtatttactcatataaagtttattaaagtattactattttatatatgtaggttttgcatttggggacaaatattcaatttcaggtaaggttaaagcccaaaagcctgatccaactataagttttgggccaagacctgatatgggtttggcacctttaataaagtcaaatgagtcgtcatcattcttgggggacgatcaaaataatgaaatgcatcatctctcccaccaatttcattactttgcttcgactctcagactctttctctcattcgcctcactcatcatctctcactttctcgcatcatattcctttcttcttccacctgactcatatctcctgtttctcttagaagaatcccgtactgagatcaggttagattttagtttctcttctgatgttttgttcttgcccgattgcatgtactcagcatcttgctgattcaccatggttatcttcaaatttctgttttattttgcttgtaacatatatgggggaaaagtgatcttttgtggctttttaggtgtttttagtataaaagtatatagttactaaactttattcagtttcctaatgaagaagaatcacatgtattagctgaactgaatttccggatttcaatttttttttttatggatctcttttggcctgtgattagtcttctcagttcggtgtgctcagggaattttttggtgaacttctgattgagaatcgggaatgtcaaactgatcttgtcacaaagattattcatttccataaaaatattaatttgttggaccctatagttatatttatttacacttgctttgtcatgtctttggacggagaatctattaggagattagatacaatctattgatagtaactagtaatttacataattttcagttttactttcccaaagattcagtgttgtgtatgtcagtaacagtgtttttatggcatagaaggtaatgcgaagtggttgagagatttcactatgatggagctatctctagtcagattatggagcacttgttttcctagtttcttctacatttcgactgtgctttttctgctcaccggtggaggagtttactctcactctgaatatttgattggattgggaagctatgacattactggcccggctgctgatgttaatatgatgggttatgctaacatggagcaagtagcatctggtattcacttcaggctccgtgctaggactttcattgtctctgagccccaagggaagccggttgtgtttgttaacctcgatgcttgcatggcttcacaaattgtaaaactaaaagtgatcgagagactcaaggcacggtacgcacctaatcttttcctcggttgactagccttagtttttaatgagattgtagtagctaagtctgtatgatgatcgagatggaataattaagctgttgtttgcagatatggggacttatatactgaacagaatgttggcatcagtggtattcatacccatgctggtccaggggggtatcttcagtatgtggtgtatatcgtaacatcacttggatttgttcgtcagtcgtttgatgcccttgtcgatggaattgagaacagtatcatacaagctcacgaaaatcttcgtcctggatcaatttttctcaataatggtaaggaccatatcctcttctctctggatctgtacgtatatgctgcaggaatgatctttggaactgctattctcatgaggctacttaaacttatcttacaggggaactcttggatgctggtgtaaaccgcagtccaagtgcatatcttaataatccttcaaaagaaaggagtaaacacaagtacaacgttgataaggaaatgactctcttaaagtttgtggatgatcaatggggtccagtaggtagtttcaattggtttgctacccatggaacttccatgagtcgtacaaactctttgatcagtggggacaacaagggcgctgcatcacgatttatggaggattggtatgaacagaatactgctgaaagatcttactctgaagagtttatttcagatgagatacctagaagagtttcaagcctaatcgagaatcatcaggacagtcgtaagtttaccacgcctttataactgctgtacattgtgtctataaagatggaacacgatcaaatattcagtgtgtttggtccgatgcagatcacgagttgctagagcttgcatcttactttgagtcacaacctggtaagcctgtaactagaatttcaagttctgcaaggcgggtgaggagtgctctgaggaaggcggataagcctggcttcgtttctgctttctgtcaaacgaactgtggagatgttagcccaaatgtgcttggagccttttgcctggacactggtcttccttgtgatttcaatcacagtacatgtggtgggaaaaatgagatgtgctatgggcgtggaccagggtattcacctgtctttttttttttttttttttttttttggtcgtcttacaagtttggatagcacaaacttatggtaaactctcatgacctatttttctttatcatttcagctatcctgatgaatttgaaagtacacgtataattggtgagagacaattcaagatggctttggaacttttcaacaaagcatctgaacagctacaagggaaggttgattaccgccatgtttatgttgacttttcacagctcaatgtgacacttcctaaaaaagatgggaaatcagaagttgtaaaaacatgtcctgcggcaatgggctttgctttcgctgctgggaccacagatggaccaggagcatttgattttacacaaggagatgataaggttttcagtaaaattcataatgcattatccaataagtagatattgcctttatgctttccaattcttaagtctacgtttggttaaatcaggggaaccctttctggagattggtgagaaatgttcttaaaacaccggacaagaaacaaatcgattgtcactatccaaaacctatcttgcttgacactggagaaatgacaaagccatatgactgggctgtaagtagttaaaaatgtaaacttccatgagtcttgtatacagtattaagactctactctaacttgtcgttttgaatccagccgtcaattctttcattgcaagttctacgtattggacaacttttcattctcagcgttcctggaggtagtggagaatctgcagattgtcacaattaataattttgactagtgatgcgatgtttaataatcctgtctatctttcttgtcagaatttacaactatggctggaaggcgtctccgctatgcagtgaaaacacaacttaaaaacagtggtaataaagatttgagcggtgagattcacgttgtgatagctggattggctaatggttactcacagtatgtgactacttttgaggagtatcaagtgcagagatacgaggtaaaagcttatctactggcccttttaaacaaacaagagttcgtattcttacattaatatgcatgtgttacaatggttgcatctgttagggtgcatctacgttatatgggccacacaccctcagtggctacattcaagagttcaagaaactctccaaatctctcgtccttgatatgcctgttcaaccggggcctcaaccgccggatctccttgacaagcaactaagcttcctcacaccagtcatgatggacacaactcctagcggagacagtttcggggatgttatttcggatgttcctaaaaacttgtctttgaagagaggaaacggccaggtgaccgttgtattccggtcagcctgccctagaaacgatctactgacagaaggtatcatcacccaaacccaatagaaaaaataatatttgagttttttttttaatttctcgagtaatatttctttgaaacaagttactatagagactatacttgtgcttgcctgtaagcttttctagtccctttttctctaattctgtgatgaaggataataaccttaaccatggagcatagtcgcgttgatgcaaaactgtgagcttttaaaagtgaaaatattgaaatactaactattcttgctgacgtgaatttctcatgggttattattgctcataaatttctaaaattgcatatgcttatgtctacttcttagtgatggatcctttcaaaataagtgacttgtcatactttgatgctaagaagagatactatgttcatgacagggacgtttacactggtggagagactagagcagaaggacaagacttggaccccggtttatgacgacgatgatctatgtctgaggttcaagtggtcgaggcataaaaagctgagctcccggagtcaggccactgtggaatggagaattcccgagtctgcatcaccaggggtttataggatcacccattttggtgctgcaaagaagctttttgggtcagtccatcatttcacaggctcttctagtgctttcgttgtaacataaacaagtagaaaccaaagtagatacatagtaaacttgtattatactaggtttacctgatgcactgtcttgtgcacttgcatgtactacacanatgtagccagagagtacagaatggtgtcaaagactgatgttga

SEQ ID NO: 15788 - DNA, 525 bp, Arabidopsis thaliana landsberg
tcattatacttcccacgccaattgccatccaccgcctatgcttgtagccgtcgctgtctcacccacgtttgccataaacaagctgctctgtcgcctatgcatggtaccaacggtccgctggtggtagtcatccggctcagtggtttgcggagaaagcagaggactgtttaagttttcatcttggtcagaactatcttcattgtttctctctggatcccactgggactcctgccttcccatcattcccagtatacttcccatattggggaagagcatgctgcgggatgatgcgttcatgttctcggaagggagattctcatgaatgctaccaaagagagtgacaagtgggtccatgagggatccgccacgcggtaacatgctgccttgtcgggaagccaatgcgagagaactctgtcctttcactggcttagccatccatgactgtccatcctctggaccatatagttttatctgatctttcctcggcagttcatttccaccggcgttgtctggtacaatcacatc

SEQ ID NO: 15789 - DNA, 707 bp, Arabidopsis thaliana landsberg
tgtcaagcgacttgttgacaatggaatgagctcagattaagcttagctgcttaccaaggacatcagtgcaatcatgctgcctaaagccaagaaggagaaggcacagagagtagacatagctgaatacatccgcaccattactcctggtcagaccactgagaagcttctagatccaggtagctttattcttgattgctctatctccacaggcagattcagctgctctttgtgtgatctgggatcaagcatcaacctcgtgcccaagtatgttgctgagagactaggcatgactcactacaggctaactagcatcactcttctcttcgcggatcgttccaagcgaatccctgaaggaatccttgaagatgttcatgttaaggttggtaactccataatccctgctgatttcgtggtcctggactatgagaaggaacccaaggatccccttatccttggaagagcattcctaactacaactggtgctaggtttgatgtgaagagagggagaatctctctcaaggtttgtggttaagatatggagtttggcatggatggctcattaagccaatcagttgcattgttccagcatagtcatacctccccagactgatcaaaatcccaccatagagccacacacaacgctcccatctgctcgactcgcaaatgagagttgtagggcaatagtctcgatcgacactactacctct

SEQ ID NO: 15790 - DNA, 1841 bp, Arabidopsis thaliana landsberg
  unsure (1)..(1841): unsure at all n locations
gcctcttccacatccagtttcccgaacccggaaaatctgcatcccataacaaaataccgctgcattcatatattcatccatacatgcatacatccatacatgcatacatccatacatgcatacattcatacattcatacatgcatacacatgcatatatcatacattcatgcatatatatttgctttcttgatttattgattaggtcattgcttgcttctttagtacatttgttaacaacttgttcttgtttgtttcttgtgcttatctcagttcgtaaagtgcttgtttgtttcttgtgcttatctcagttcgtaaagtgcttgtttgtttcttgtgcttatctcagttcgtaaagtgcttgcttgtttcttgcactgattgcttacatgtttaacttgttcactttattccttctttgtttcattgattatttgatcgttgcttgacttgtttgtttgtttccttcttggtttcttgatttactttacttcattgggcagggttgtgcttggatactcgcttacttagtggtttcaatcaatttctttacacactcgttagcttgtttcctgatcctatggttattctttttctcttatactttcgtcgtcactatatcttacatgaacttctctacttgtttcgatgaatgcattactattttcattaggatactcgctttcttttgctttctttactccttccatagttacattgcttgcttagacgtaattgcttaagaaaaaatctccacaacatcctctgtgttcttgcaaactgcattacttaattccgtttatgcgtatcttttaaaatatctacaactctttagcgaaattttataatccacactatacaatttaattcgttttatatatgacatgtttagcaaaaaaaaataccaattgcttaaattggtttgttatccccttttccattggttgattattatctttacaaaaaaagataaaataatgttttgctctcacatgttcacatgtggatcgaaatattagtaaaaaaaaactaatatgataagtattatttgacacatctcatgatctaaattaaattccattccttttcatttccttaattccacaatatgcaattatatttttgttttttcccccttaattgctcttgttctttcaattttttttacatattttgctctaatatgttctaatagcatttctgatttttttccttctttagaaaactttgacatatataaataattaaacaattatgaaattgtcaagcatctcgaataaaaatggggtaaaaaaaccttttctaaaagggaaaaaacccaaaaaaaattttaactaatttttatttggacgtttaattcccaattttgggttgggaaaaaataaagtaataaaaatgtgcaatttaatacccaaataattaaatgttgttattttcgatcccacaacaaaaataaaattccaattttactttaccatctcaattgattattaatctttagattatatgacattagttttataattttggataaaaataattttattaacatatttgtttatggtgtctagaaatttaaaattttatttttattataattattctattttaaaatttaacataaaaattaatgaaaatcaaaaatattttaaattggccggtaaacaatttgcgttcgaatttaaatctttcacgaatcaaactatttttgacaaaatctcaatccgaatcttatcgtctctttcaatattgacggttactttttcacatttcaaaatcttaatattaacggtccttatagacttttaccaaatccaccatgtncaatttcattggttgagt

SEQ ID NO: 15791 - DNA, 1071 bp, Arabidopsis thaliana landsberg
taaaattaaaaaccgccccgaaagtgggtccacggttaaacatgagttttgagatcgccccgaaagttgggtccacgatcaatgtatcaaaataaattacaaggacgacctattcaagtcgtctggtttgtttcttcaacgcttacacgtcgaatatcgcttccgctaacgaggtcgacatttgagtcgtgctggtccgccacaggagcaatttgggaggcttgcctcgaaaaaccgagctgatccggggacatgttcaggtcatcatccccgagctcgatgacgtgcaaggcattaacttcgtcagtcgcccttttggttaactccttaaggccgctgagttcggatgccgcaatcttcgcgcctctctgcatcagaatgcccactatctcctcagcacctttggcttgattctcaacatccacctttggcccgacaaggtcctcttgctccttgagataagccttcactttatcaagacgagcttgggctttctttgtagtacgggcgacattagcagcttggtcactccgcaacctgttgcactctctctccccgtgctcttttacagcaaccaatgcgacctgaagatcgctgatctctttctgaagatcagcttctcgactattgagcctcttgacctcgttattcaacgagctcatctccgccttatgaatctcggcagcatctctcaatgcagccatctccttcatgtctttggcatagatggctttcgcctggtcagcgcacttcttcaggttatcgaaggcctctctgtcggcgagcttcagcttcaacttgcgatcatatgtcgcaatcagatcgttggccagggcggcggtctggaaaaagaatcatggttaaatccaaaatacaaagatattaggcaacaggaagacatgtaactagcgcgtacctcaagtgatgatctggcaaacttctgatatccctcttttagaaccagatcatcaggattagggaaatccttcgtcccggggagcatcaagttgcgccaaacgtggctggcggcctcttgatctctcacgaggaatttctcaccagaatacttga

SEQ ID NO: 15792 - DNA, 723 bp, Arabidopsis thaliana landsberg
gattaaataaaaaatgcaccatatttttgaaatatagcaaaattagttttttaagattcacctacaaaatttaaaagtcaatataattatatggtaatttttaatgaataattattatcaaataaagtaaaaatatttaagtaaaaaaagaaaaagtaaaatttgacttgaattttgtctttatcttactacataacaaataacaaaaggttatataagtcatttactaaaatctctattagacaaaaagttgtattagagaggaaagagaatagtgtctatttctcctatttttaaaaaaactatctactttgcaaattatttgtagaaaaagtgtctactttccaacttattattttgcatacctcttgtgtacattcttataggattttctttttgtatctcgaccctttttgactgtttttgtattcattaataaaaaagatcaattcaattcagaaatcatataatatgttgataagaagacaaaaaccaaaacgaatattataagttttattgaaatttgtaggggaaacaaaaacagaagacgaaacagtacatgctattgtgtaaaatgccaacatgtcacatgtgggctctaataggaaaataaaactaaaaatcgaacgggccttttagatgaacgttacaaaaatgtgttctaatatattattagagattgatggtgaaaggcactttggtaggcggtaaccatgaagcaga

SEQ ID NO: 15793 - DNA, 584 bp, Arabidopsis thaliana landsberg
gcttccctgaaaaggattctccccacggccagcactcaccgtttcgcattctctccacgccgtgcgcccttttgtctccgagccctctgcgcttctctgtactcgcactcctctgccattcgccactgcagtcgccatggcctcgctggttcgtcccgagcgtttccagaccgaggaggcgctcgacatggtgcgccgcctgctcggattgagcgcgccggcgttcgctgggaggatctgggccagcaccacccccctcggtgacctcaccgccggggagttcatgctcttcatctcctacctctcctatgggttggtgctgccgatctcgccgttcttcctgctgctgctggaggagttcgaactccagctctagcacctcacgccccactccatcctccaggtggtcatcttcgtccacctctgcgagatgttagtgggggtggcatcctgcacttccctctttcgccaattcttcgtgctggtgagatctgggaagggcaaagaccaccttggtgcctactatttctagacgaggtcagatccaaccgtggcctacatcgccgcctgttggggacttgttc

SEQ ID NO: 15794 - DNA, 646 bp, Arabidopsis thaliana landsberg
tgcaaacgctgccactccatgcaccacttattcaccaaccgtcggagttattctcttcgtctccgccccataccctttcatgagatggtcaatggatatcattggaccattacataggtcgacccgaggtgtacaatacctactagtcctaacgtattattttttgaagtggattgaagctgaagcgtatgtgaatattaaagattcggcagtaaagactttcatttggaagaatatcatatgcaggcatggcgttccatacgaaatagttactgacaacggaccacaatttatctcacacgagtttgaagcattttgctcggatttggggattaaggttagttattccactccgcggtatccacaagggaacggtcaggccgaagccgcaaacaagacaattctaagcaatcttaagaaacgttgaagtcatttgaaagggggctggtatgatgaacttcaaccagtcttatgggcttatcgcacaactcctaggcgctcgaccggagaaatcccattttcattggtttacgggatggaggcagttgtaccagtcgagctcaatgtatcaggattcgtcgaacgtaagctcctttgaatgaaaaagagaattctacaatgctcgacgattcgctggataccatca

SEQ ID NO: 15795 - DNA, 933 bp, Arabidopsis thaliana landsberg
cggttattgatctcagcattacaattggttctgatgagagcttcttgaagactggtgataatcctcttcttaccattttttcggctgggcatgctcttcatgtattcgttaatggcctgcttgcaggtaaaatcatataaacttgaagcccaaactctcccttttttttttttttttttttttttttttgtcaaacaagcccaaactctccttttggaacaaaaaaaaacgtaataaaaatccattttctttgttttaggaacttcctatggagcactgagcaactcaaagctcacatttagtcaaaatatcaaattgagtgtaggcatcaacaaacttgctctgcttagtactgcagtgggtcttccggttagttatgatcttgcttctgttagaacatctcacaatgaaaataaagatggatctaccataggaaagaccataaagttcgtgatgtccattattttttggcagaacgctggtgtgcattatgagacttggaatactggtattctagggccagtcacattgaagggagtaaactctggaacatgggacatgtctaaatggaagtggtcttacaaggttctcttgaacatgtgtttgataaaaacaattttaccaaccacaacaatactaaactaaatgtgtttctttttatttgtgatgagtagattggtcttagaggtgaagctatgagccttcacaccttagctggaagttcagctgtgaaatggtggatcaaaggattcgtggtcaagaagcaacccttgacctggtacaaggtaagaaatattctctcattttcttcaaaatagatcttttaagcttaaatttgtgtttcgaaacacaaatgaaatggtttaaaatctatgccaaactatatgatattttcatatacgtacgtatacgtacaaaattattggttaatga

SEQ ID NO: 15796 - DNA, 1039 bp, Arabidopsis thaliana landsberg
gctgggttttgttgagatcagaatactataatcttcttcatcctcttcaatatcttcttcttcagcaacggtctgttcagtttcggcggcagaagtacctttgtccgttgttccctctgccacaactagacctgattgtttcataacttcagaaattggtgctgtctcggtaaccacagcttcttctccctcacgagtcacccttgcggtcgaacgcactctagccatttttgatggattcccactgtttggcaaaactaacgtattttttgtagtttgacgaagcttatcttagatgacgaagcactcgctcgaagagagcaatgaaaaagcttcggctatggttaaatttttcagcagcataacagtgctggcaatgaatgctgtggtaacttcacacctacctgtctgtttatatagtgctgcaggtgaaaaggtgaatcgtcaagttacccgcacccgtcaaacagtcgcccacacccgctgatagtcacccgcactcgctgaacggtggaccatagcgcccaagaagctgaatcaccagatcgcgtgtacccgttgaatgtgggaccacccttcactcggaatatttaaatcgtttctcggcaacgagataagggaaggtgtttttcggaccttcggcattccgaagcctgagagagtttttcacgggtcgagctcgttacgaaaaatgatctagcaccgtgaaggggctattgttgggggtctgcttcgtcgccgaaggtcccataagaagaaacaccttcggaagactggcacaaagccgaagctatcaatcaaagtgcttcggagtacatttccaaatgcaccgacttaaagacgaaatgaccaatcggcccgtgataacttgtattatgattgtaaacctttgtaaaggacatgaatgtaatttctcacaggctgtgtcctgtgcctataaataggtgaacagtacccctgtactgttcacacgatcctgcattcgcttgtgcgtaatgcttggattcttgctttctgttgagccgaaggtataaatgta

SEQ ID NO: 15797 - DNA, 1088 bp, Arabidopsis thaliana landsberg
aaatgaataatgctttaaaagtacatgtaagataaatttcaggggcttttgtaagattggacacattttagcccaataattagaaaaaatgaactttttgaatgggtttatggaaataagcatatattggtaaggaaaatgatggttttgccccttgtgtgaggttataatgttgataaaacaccattgtcttcaacaaattctcctgcaactcaaatcctcaatcctcacttctcactgccgcacttgcttcataaacaccatatttgtcaacaccatcacctttaagtccatcaaaaacactatttctttcgtttccaactttctccgtcaccaacacgtcgtctccaattaatccaatcaatcaagttaaacgatttgttatggaagaaatataaaccctaaggatactatctaggaaacccaagggttctactcttaaaaacgattcaaatcaattaatccccaattcatcactaattctaaaccaaaaaattgttcgttattgtcaacagagttcattgtcatcaccgttgagagaagtactggaaaaatgaagaaaaaatgtagaagggtaaaagcgtaacataaacagaaagagaagtacctatttctataagcatatgaaaaagtacctaattaaacaaaggcatacacttaattgtgccgatttcgtaattgatccataaatttcattttaaacttttggtctgtatttttttgttatttgctaaatattatcatttactttagtagaattaatagtcttaccatttatcaatcttgtaataacattaactcattaaggattataactttttgacgtaattttactatttccaacatttttaaagcttgtgtaaaattcctcaactcaaaaagagaaagaagctaataaaagtaatcaaacacacttaattatacattgcatttcagatacaaacactcaaacagacacttagagcatacaaattacataattaaatccaaaccaaacccaacccaaaccagatcgaaaatatcgtccagaggacatcattactccactttaaaaacacgtagaaacaacaaattagggagatattttt

SEQ ID NO: 15798 - DNA, 787 bp, Arabidopsis thaliana landsberg
ccattaatttgatgaccgaccactgggtctgggtaagggtatgtaaaacatacctgtgctgaggcatatagctggttcagttgactcctcaaaaccagagcatagagccttgagtactgcactcttctccaacttgcctgcaatggaacgattataaaataagctaaactacatatattgaagtctcaagttgaacactgcggaacaaacctcggtactgtctgttgttgacaactaaggtaggcaatatggtaacatcaccccttgtacccttgccaacctacataatataatatgtcaaacccaaaacaggttacgtacagaagagtcaaattcagatgtgggaacagtaatttacttgagcatcttgttcttcctttaaaactggattgtccaagtcagcatcagggtctcccatacacttgtcaagttttttactatcaattcctgtaaagacatagtaactatgcatcattctccccaaaattgtctttctttaatttgcatataacagacacactcaccaagagatttgataacggaatcagcacactccttattgtatttcttctccttcatgggacatctgatctggaaatcagtaacataatcccaccagacccaaggtttgccggtttcattcgccaccttgtaaacacaaagctgtctcaagttttccacgaccacatcttttccatcgtatcccgagctaaagtcctgctctggatcaggagcacagtacctacctatattgatacactgagacttacactgtcgactcatccgt

SEQ ID NO: 15799 - DNA, 887 bp, Arabidopsis thaliana landsberg
atcccttcctaatcatcgctgccctttcaaccaatttgaaaaccgaggtcaatgtctggaccaaacaatgattgcggatctctatccttagtccgcggataaatcggcacacttgagcttgttcctcctcaagttcacatcccacaaatcgcctaaggccgttaaactcctcatcatattcacgcaccgtgcggttcccttgaacttggttgaggtacgcacattcaagcctatcccaagcctccggtggaaagtacttcttgttaaactcgtcttcgaaatccgcaaaggaccggacctcgtcccctctgcgtttcttgacggttaaccaccagttatgagcgtctccttcaggaagtggaccgaaatgtccctttggtaatcctcagggcagcgagtagacttgaagttccttttgaatcctcagggcagcgagtagacttgaagttccttttgagtttactcctccactcatcggccataatcgggtccgtactgcccatgaagtgtctcgtgcccagccttgagatatgttcgagaaggctcacatagtctccccttttccgcccatgattcggctgcagattcacttccacaacttccgagttatcgtccttttggttatccactctttggaccactggatccgctacaacggccttggttaatgtggctagttgcgccatcattcccttcatcaaatcccactcttcttgggccgttggagtattgctccggttatatgtgctgtcccttgcaccgctactctccggtgcttcctcatttatggacttcttcccggcctcaggagcagatgagtctgtcccatcgcacatagacccgactctagttttctcgttgatcatcgttttctactcaaccaaagt

SEQ ID NO: 15800 - DNA, 190 bp, Arabidopsis thaliana landsberg
gaatggatatctctctgtcgcgaatccgctcactaagaggtatcgtgtccttgatcactctaaatcaatctttcttggtcgtgttaaaaaaaggggagagctaagctttaacctacgaagtcataaaatgaatcgcattggttttgcggttgatcaaattgatagaacaagtcagggattcaaagctgtc

SEQ ID NO: 15801 - DNA, 2969 bp, Arabidopsis thaliana landsberg
tgttcaggtttatttttactgaccaaatctgtcctttcacttcttagctttcatcgctcaaactctcccgaccgatgaattcatcaaattcttcaaaatcgtccttgaaggggaaaccctctggaactcattcacccttgattggcttataaaggctaatctcaagctcaaaatgagtccacttggacagctcctccaacttccattgcctcctcctttacctcaaggaacgtcagctcgggcccttgcttcctggcgcaaaacgttttccaaaccgagggctgaggcctgtgaggcaaataagacatttctcatgtccaccatcgacaaaaaagagtatagtaggaccttgctagtcgacgacagcagcgccgagggggccagatccgctgaacgtcatggtggccgttcgcctcgaagaaacaatctcctcgtcgcggctctccttgtcctctccctgaggtggattgagtagcgaaccagtcgctgacttaattcgcaaaaagagagacagaccagcccgaggtagctcttctccaaggagagagaaatcaaaggctcgaactgatcgttctcctaggtcatctcctccacctcgattgatgggtcctcctccccctgtggtcacatctccccctcctcaacttagtggcgagaagactaaccgaggtgtgactcctcgacaggaagatgctgagtctcgggatgctcccctgaaatcaaaaatcgttcttgtttctcaagccaagtcgctttcaggttcggtaaaaaagtttccttttctgacttctgcgttgttcgtggcctcaataacccttgaccccttctctctttttcagctatggaaacagagggtaacgttttccgatgtttcaagacccagaaggatgcgatcttgccgaacttcgatagatggcgtcctacaatccacgaacgctttttacttcatgcctaccattcatctcaggttagtttcatttctatttttctaatcttgatattcctttatgtactaacttgcttttccggatttattctcgatgccaggcaaacagcgaactcaacgacatggttgagcactatgaaggactgctgatttctctgaggagcaagaaaggtcctatttcaaagccattctatacgagaaacgtattcgccttgctgcttttcccgcttcatcctttaaccctcagcacttcgaggagttctttacccaatcatccccttgggtgaatcgggtttaaattgggctggtaaactttcatacctaaagcttatcatctatcggtttcttttatatatatatatcttttgaaaacgagcccgttgagactgccgcactcgaggatcaagtgagcccgttgagctgttctcctcaggatcaagtgatttgaactgttctcctcaggatcaagtgagcccgttgagactgccgcacccgaggtgcctgctacatcgatagggattgttgaacctgatcctgttttgccttcagctccttcgatcgtggatagtgacacggtgatcatcccaaatgatgaaggtgatgtcgggcatgaaccgggagcctcttcagagcaagtccctaccgtcgaaccaaatgaaaccgagccggttgatgttgagctcgagatggctacggattcatagtggctgcgcccacttaaatttgggatttgtcccaaacatttaagaatttgaaatttaatattcagataaatatgttttttcctaaagaggctttttttttgtttgaacaagattttgccttagcaggcttttaaactttttccactataatcctttgagggtattgctaaaatggaatgcaggtttgcaaagtccgcattaggtatttttgaccatgtggttaagtttcgagatttctcggcttatcaggcctttctcttagttagtgagaactgagctcgttttcaacgtgaattccccaactcgagtttagtcagttcggtaaatttgttggacttgggccttaactgttttactttgtatttaatcggcttttcgtccttatacgttgttcgcggcctgaataacccttgaccccttctctctttttcagctatgtaaacagagggtaacgttttccgatgtttcaagcccaagaaggacgcgatcttgccgaacttcgatagatggcgtcctacaatccacaaacgctttttacatcatgcctaccattcatctcaggttagtttcatttctatttttctaatcttgatattcctttatgtactaacttgctttttcggatttattctcaatgccaagcaaacagcgaactcaactacatggttgagcactatgaaggactgcagcttagtagggagcaagacatttgcacctggaagggcaagttttcttcccttgaggctgacctccgctccctctctgattccaaacaaaagttggaggatcaagttgaccttttctcttccgaactcatgaaatcgaacgccgaattgcaagatcagtatcgcagacatgacaaactccaagatgaactctcggttgcccaaggcaggctttttgaatccaaatcggccgcctacaccttgaacaaccagttcaccaaactcgaggcgaagtacaaagcaatcaccaaactttgagatgctgagttggctaagtcggcgtctaaagccagaaatgaggtgaagggtcgcaggatggagttgattcaaggggccattcttttcattcaaaccaagaaggcacgttcagaactagaatctgatatcaaggagcatgaaagcaacctactcttactggaccaaatccacgaagatgatttctctgaggagcaagaaaggtccgatttgaaagccgttctatacgagaaacgtattcgccttgctgctcttcccgctataatccttcaaccctcagcacttcgaggagttctttacccaatcaccccctgggtgaatcgggtttaaattgggctg

SEQ ID NO: 15802 - DNA, 1618 bp, Arabidopsis thaliana landsberg
tgttatttttgaagaagaagaaacggacactaagagggtaggcatttatatccgaaagctgaccataacgttgaagtaactgagagaagcgattaagaaagattatagttagaattttccgatgatctgaaattgggaaaaattctcgaaattaattctctgaagctatttttgaagcagtcaaataagctatcatcgtagagtcaagcttggcatggcgctggaaaatggagactccattggcagtttattcgaaattgtgtgcattttacaataaaagacaaaagagagggaattattaaagagtcaaaaacatttgatgggcctaaccttaattaaaagcccaattcgatattgaatttgattttaaaattcagaacttgttatatatcagaccaacacagtaaacatcatagattccagtaatgcatcagctataaacagatcctagcagtgtgaaatagtaaatatgctacgatttaaaggtttggatccaaagaattttaccaacttcatagcagattgttcacactctacactcaataagccaaatgtaaacaaaaagatgaccaaagatcttcacaaatctaccatgaatcacaaaatctatgaagacaatgtgatttaaagcaaagatcttacagattttatgggctcttagttaaattttgagatagtaaattttcatataggcccaaccgtccaagtgagcaatctcgcaggactctttgtgttgtttatggcttttgtcttatctgactcaggaaatctcgttttttgtagataaaagaaagatataaatgacgctttttaaactttttaaagactagagttttaataaaattagaaataattaatggaaaatagataaaacaagaaaataataatatacgatgttgacaaaaaatgtagaaaaagatacgaggttattattggcatgaaaaacttgtaccgaactgcatcatatcatcatttatataaaaaatattttttggaggtaattcatttgagtataattaattaagcagatgacaaaaaatgatatgtggttattaaattttttaaccaaattgttttttatataaaacatgtaacactttctgtttgttttttcttttatataatcttgttaacacctttttatattttctgcttttcaatattttctattttattttattttaaaacagttttttttgtagggattttaaaatagtttttgaaactactaactaattattaataaaattcaatgctttgaataaaatctaaattattaagctaaaatattaaactttacaagaatatgagttaactatttaatacttttaagatttcgtatttacttttgatgatgtgtacattttaatacctatatggcaatatcattggtagatacactatttctaacttaaattttaaaatgtggtaaaaccataatatataaatactaagaaatgtcactaataacacttttattctcaaatttggatttctggatgcttctataggtccaaccaataattaaagaattgatagtaacaaatgggaataattaaatgtagggttttaatattgattagaagaaaattatattaggttaaagaaaaagaaagag

SEQ ID NO: 15803 - DNA, 138 bp, Arabidopsis thaliana landsberg
  unsure (1)..(138): unsure at all n locations
aagggncaaacctatctcccacgctttgctgacacaagtaaagcggcacggaaaattacagcacaggtatttgagcagcactcatcccgagcaacagtgtcacaagcacgaagggtcagcatgaaaaccgagagaaac

SEQ ID NO: 15804 - DNA, 4400 bp, Arabidopsis thaliana landsberg
tcttcatcagatccctgcaaagacacttgaccaattctacagccgcgactcatccatttaaaatgaggtaatggaggttatcttatcgaaactcttttgagagaaaagtgtgaatttttgtgatgtgtattatttggtgcttattataaagaggaaaaacaaagaaaagctatatattctgtgtctccctatctggtgatattttttttggttctgcattgtgttccaaagtggaaataaaaatcgataaacgatgtcgtattgtagtactttccttttctttgtatgaatttgttaagattggtttataaatgggattataataagtatctttaaaaaaaagtgtaattagtatctttaaaatttgcagttagtattgtggaaaacaatcatgatataattgacacgatagaccaccgaaataaaggaatcaattagattagattattgaactaaaccgagttttgtccattctccaatcaatcgcaatcttcgttatctataatcaattaagtttacgcgttgattaatctttttgcaaaggaataggagaacctagagagaccccctccaaggggctacatagtgggaaaataatgataccctaaccttctctaaacgctaaagcaaagcacccccacaaaaccaaccaaaggcaacattatttttccttcttttaaatttcgtttctgttgcctatatttcaaagaaacatccaacaaaaagacaaaaaaaatcacagaataagaccgaagagtcgaagaccgatctactttgctcacatgcttcaaaaccaacataaaacgaccaaaaaccagagaaacaaaaacattggaacaaaatattttcttaaaaaaaaaataatgggattttgtttctccaaatttggcaaatcacaaacacatgagatcccaatctcttcctcttccgattcaagccctcctcatcactaccaacctctccctaaaccaactgtttctcaaggtcaaaccagtaatcccacctccaatcctcagcccaaacccaaacccgctcctcctcctcctccgtcaacatcctccggttcacaaatcggtccaatcctaaaccgaccaatgatcgatctctcagctctctacgacctccacaaagaactcggccgtggccaattcggaatcacttacaaatgcacggacaaatccaacggtcgagaatacgcctgcaaatccatctcaaaacgtaaactcatacgtcgcaaagacatcgaagacgtgagacgtgaggtcatgatcttgcaacaccttactggtcaaccaaacatagtcgagtttcgaggcgcgtatgaagacaaagacaatcttcatttggttatggagctctgttctggaggagagctttttgatcgtattatcaagaaaggaagttactctgagaaagaagctgctaatatcttcagacagatcgttaatgttgttcatgtttgtcacttcatgggcgttgttcatagagacttaaagcctgagaatttcttgcttgttagtaacgaagaagattctccaatcaaagcaacagattttggactctctgttttcatcgaagaaggtaaagtcatcctctttgattacttaacttaagtgtcttgttaactcttgtttcaaagatttgtctttgcttttacataaagtaattagtgtgttttaggagataaaccataatgtttaaactcgtgttaggatcaagaaaaagatagcgacattgtatctccgtgtgggacatcaagtcaacttcgaaaacgacttgggtcaactcaagtcaacagatgtttcccacaagatcaaaaaagtgacaaaaaaaagcagaaaagcagaaatcattttatgggggattaatattcttttgaacattttgattcacaccaaaatatcaaaagacttttgagactggagagctgtattagaatttgaatatgtttgaatgcatattagctaaaactttggttctgtattttgaaatccgtacaagtaatcatcttatatggttaatatttgtaggtaaagtgtatagagatatagttgggagcgcatactacgttgcacctgaagttctacatcgaaactacgggaaagaaatcgatgtatggagcgcgggtgttatgctttacattcttctcagtggtgttcctccattttggggaggtatgcaaaaaatactgaatcatctaaaattttgtaatcacatactcaacttgaagaatgttggagacatgaaccttaattggtactacttaatgttgtttagagaccgagaagactatatttgaggcgatcttagaaggaaagctggatcttgaaacttcttccttggcctactatatcggaaagcgcaaaagatttgataagaaagatgttgacaagagatcctaaaaaaaggataaccgcagctgaagcacttggtatgcttgcaatgtgtataaatttgttacatattctacctcctgctcctaagtccttactaaccaatcttttgttgtggatttttatcggaaaaaacagagcatccatggatgacagacaccaaaatttctgataaaccaatcaatagtgctgttcttgttaggatgaagcaattccgcgcgatgaacaagctcaagaaacttgccttgaaggtaaagtaaatgattctccatctccaaaatgacttgaagatcaattttgtaattgttttgtaattttctttgcttttaggtgatagcggaaaacttatcggaagaagagataaaaggattaaagcaaacgtttaagaacatggatacagatgaaagtggcaccatcacttttgatgaactaagaagcgggttacatcgtcttggatctaagcttacagaatctgaaatcaaacaactcatggaagctgtaagaaaaaagaaaacaaatccaactacaaaataaatcatcatcaatatctttctcaatggtttttctttattcataggctgatgtggacaaaagtgggacgattgattacattgagtttgtaactgcaacaatgcatcgtcatagattggagaaagaagagaatttgatagaagcatttaaatacttcgacaaagacagaagcgggtttgtattcttctaaccatctccttcttcaccaaaatgaacacaactactttatatatcaaagatatatggaattgtcttcaaaacatactcttctttttttttcaaaaaccagttttatcacaagggacgagcttaaacactccatgactgagtatggcatgggtgatgatgcgaccatagatgaagttatcaatgatgttgataccgacaatgtaagaaaaaacatttatttctagttgttttgtttcggtctaatgatgaatgttaaacaaaatgattaataatgatgatgatgatgattgataggatgggaggataaactacgaggaatttgtggcgatgatgaggaaaggaactacagattcagatccaaagctgatcagatgatatatattcaactacagtgacgaatgcttttgcttcatatataataattaaaataaactaataataaacacgaatgcaatgagaattaatgcattcctatgttttttcccttgagatgtataaataataaatatgatgaattgcgtaagtatgatgaatcaaaaaataaaatgaaacttatggcccatttaaaatgagatgttttaattattcacgcgaacttatggcccatttaaaatgaaaaagccttttaaggcccatttataataggttcagaaacttgaagctttgtttatttattaaacggcatcaaaagaaagagtggcaaaccctctattttatctagaggcttttgatttattttttcagagaagccaaactaagattttgaagttgacgagtgacgacgatgctctcaatctcgcagctgccgagtttctcgttaaccaccgccaaatctcttcgttatccttcttctccttcgtcgtctctctctatcttcttctccttcttccctaaggtttctaatttcgtcagagcaagttccggaatccccaatttggtcgcctgtagtccgacagagattatcatccccagagttaataacgccggactcagaatcgaggagatagtagacgccgcgaaaggcaaaattcgtcttgattcatggatctcttctcgtatcaatggcgttagccgagctcgtgtacagtcgagtatacgattgggactcgttaccgtcaatggtcgtgtcgttgataaggttttaacttcaaaattcgattcttcaaaaaagtttcaattttgcaatcaagtttcaatctctctcactctcttccaggtttcactcgatgtcaattcaagtgatgaggttaattgtacgatatcagagcttcaacctttaaagctcag

SEQ ID NO: 15805 - DNA, 120 bp, Arabidopsis thaliana landsberg
tgtgtgtaagataaaaatcaagtttatcatgatgaaatagagagttacactataatgcaaaatcgaatgtgtaagatagaaatttgtttttagttaaatcctaaaccgaatatagaaaca

SEQ ID NO: 15806 - DNA, 3801 bp, Arabidopsis thaliana landsberg
aaaaagaaccggtcaagcccaaactaaagaaccggtcgggtaattcattgtgtctcgataaatatttcgaaccggtacggaaatgatccgccagagtttttcccattgaagaagatcgagtgaaattcgaagagcgaatcaaagaggaagaagaagaaggaggaggtatagcaatgggggtcgattattacaaggttcttcaggtggatcggaatgcgaaagacgacgacttgaagaaagcttatcgcaaactcgccatgaagtggcatccagacaagaaccctaacaacaaaaaagacgccgaagccaaattcaagcagatctctgaagcttacgatgtaaattaacgatatgcgttttctctattcagagagattcccatattttgcttgaatttgagcaattgtgtagtttgtcaattcactatggttacttctctggcaattaagtaatcttgatttgcttgtagaattgtgtttgatagattccttatgctgttggattttgtaaggttttgagtgatcctcaaaagagagccatctatgatcaatatggagaagaaggtctaacaagccaggctccgcctcccggagcaggcggcgggttttcggatggaggggcttcgttccggttcaacggtagaagcgcagatgatatcttctcggagttctttggcttcacaagaccatttggtgactcacgtggtgcaggtccctctaatgggttccggttcgcggaagacgttttctcgtcgaatgttgttccaccgaggaaagctgcccctattgagagacaacttccttgtagtttggaagatctctacaaaggagtcagtaagaagatgaagatctctcgggacgtcctcgattcaagcgggtcagttttttttcagctacattgtcatgaattgagtttaagaatcaccttcttatggatttagttccaaaacattgatttgcttaggaatttttaccttaaggagctttggagctggataaatacatgaaagatgtagtgctagaaattagtcattagccattggatagattatgttggactcattagagttgttttttttgtagctatgatgttgttgttatcggtaatgcaagttgaaagtgtattctttgttgcaatgcaggagacccacaacagttgaggagatcttgacgatagaaatcaagccagggtggaagaaagggacgaagattaccttcccggagaaaggaaacgagcagcgaggaatcataccatcagatcttgtattcatagttgatgagaagccgcatgctgtgttcaagcgagacgggaatgaccttgtgatgacacagaagatccctcttgtggaagccctcacgggatacactgctcaggtctcgactctggatggaagatcagtaacggttccaattaacaacgtgatcagcccttcttatgaagaggtggtgaaaggtgaaggcatgccaatccctaaagacccatcaaagaaagggaacttgagaatcaagttcactgttaagttcccatcgaggctaacaacagagcagaaatctggaatcaaacgaatgttttcgtcttcctagtctgtctctttctttcttactgctacgtttgattttcggttatgactaggtatgtggtagtgtgggtctttgtttgggagattgtgaggttcttgaacgatgtcgcattgagatttctcaacgtccttcagagcttttggtttgggtttggggttttacattttagcatatttttttttttttttttcttttaaatttgttattagattggggaaaaaataaaaaactaaataaagattctttgcttctttagtttgtttagagctttcaaattttctaaatacatacaaggaaaaaaatgtatgtggcactatgccactatggcaccagctcctgcattcttttctatttcagatcaactaaaacaattcctaaaattattttgataaaaaaaacatattaataaaacttttcatgttttgttctaacaaatcttctacaaacagacgacggtcacgtgatttgggtttagagaggtagagcgggtgagagtcgtgaatttgggttgtgttgaaaacatgaaaagaagaaacatgttttggcatgaatataccttttttcttccgttaagagtgaaaatgattttctcaatctcatttctataactaccaagaagtcatccttgttatcgtacatctctctttgtctttgcttaatcataaactactctttcttccttgtcgtttcaaatggcgcaattgtattcttccgtgaaacccacgccaatgttgaaagatgagctcgacattgtgatacctacgattcgaaacctcgacttccttgagatgtggcgacctttctttgagcagtatcatttgatcattgttcaagatggtgatccttcgaaagtcatcaacattccagtagggtttgactacgagctctacaacaggaacgacatcaatcgaatcttgggtcccaaggcctcttgcatttccttcaaggactctgcttgtcgttgcttcggttacatggtctccaaaaagaagtacatctacaccattgatgatgattgctttgtaagtgctctcttatgtgcaaaatttcttaagacatctgttggtcaaaccaaagtcttcttcaaagttgacaatgtatgtgcaatgtaggtggcaaaggatccaactgggaaagagatcaatgcgcttgagcagcatatcaagaacctcttatctccatcaactccgcatttctttaacacactttatgatccatacagagatggggcagactttgttcgtggataccctttcagtatgcgcgaaggtgtttccactgctgtttcccatggtctttggctcaacatccctgactacgatgccccgacccaactcgtgaagcctaaggagaggaacaccaggtgacaataattatcatcataacatgtttatgtgtttttttgtcaggatattcaaatgtcagtttttgctaaacgtttgatatgtcaggtatgtggatgctgtcatgaccattcccaaagggaacacttttcccaatgtgtggtatgaacttggcttttgaccgtgatttgattggcccggctatgtactttggtctcatgggtgatggacagcctattggtcgttacgacgatatgtgggctggttggtgtgtcaaggtaaattcaattcttatcttgcttttgtgcattggttatactgtaataccgttacatttgtccaataatataggtgatatgtgaccacatgggatggggagtgaagacgggtttgccttacatatggcacagcaaagccagcaacccattcgtgaacctgaaaaaggaatacaacggaatattttggcaggaagaggcgattccgttctttcaatccgtgactcttcctaaagagtgcacttcggtgcagcaatgctacctcgagctggccaagctcgtgagagagaaacttgggaaggttgatccttacttcatcacacttgcaactggaatggtcacctggatcgaagcttgggaggagcttaactctgcggagggaactgaggctgaggcaccaaacggcaaaaatgagtaaaagagaaggtcactgaataaggcaaatggtattgtttactaggaaaaaagggtttgagtcacatgtgcaactctctctatttttcttaattataatttgatttgcttctgtctttaatttcttgtcatcagtatttgtggtctcagtgcattgcagtttgtcacaaaaagagaaggtgtaatgtg

SEQ ID NO: 15807 - DNA, 8551 bp, Arabidopsis thaliana landsberg
tcattaatgatccattcacatttttttcttttctaactgtttaattttgttgtccacaaacatattttacaatacatatataaatctggccgcaacaaaaaataaaataaatatatcttactctgctcaaggttaacggtggcatacattgttgactttgcttctagttatccacacaagtcacccatttggccatttctaaatttgatgttccatttcgttggagaaaaaaacccctatgtgtgtattaatgtatgaaagaataccaaaagataataaggatattcattgggatttaacgagaaataaaaggcacaattctctcgcaaattggtcaaaaatacgaataaataaatcaactaaatacccaaaaaggtgaaagaattagagacaccccaatgtacttcatatagtaaacatttaaatatgattatcgcttggcacaattattcactcgagtacccctatatatacccattccttccatttgtagattccatattattcacgattctcatcaaatcatctccgatactcacaaccgaaataactaacccctcctcaacaaaaaacaacaaaacatgtacactccatcatacttaaaatattcaataatctcaattatatccgtattattcctccaaggaactcatggagacgacggaggttggcaaggtggtcacgccacgttttacggcggcgaagatgcttccggcaccatgggtacgtatgaccaatcccaatatctaagaatgcataagttagctaaattgtctctttatccacgtgtaagttagctaacaagtggcatgcacaaatcaggcggagcttgtggctatggaaatttgtatggccaaggttacgggacgaacacggcggctttaagtacggctctattcaacaacggactcacgtgtggcgcgtgctatgagatgaagtgtaacgatgacccgaggtggtgtctcgggtcaaccatcaccgtcacagctacaaacttttgcccacctaaccctggcctctccaacgataatggaggttggtgcaatcctcctcttcagcatttcgacctcgccgagccagcttttcttcagatcgctcagtatcgtgccggcattgttcctgtctctttccgaaggtccgtttacttttctttaacttgggacgctaagtgataagattgcgaaaagacaattaactgacagtttttaacatgtagtcccaatccatatatagtagtgtttactattaacaaattttcaaaacattaaaattgtaggtttatttgggaaaagaaaaacacacttttttttaacaaaaccaacctttaccttataaatttactagtccgaaactaatagacaagtcttttgtagctagtagctaccatagttaaaacttaatacccaacaaataatttgttcctaattaatctctatttaatgagcttatcttaactaaatagtatatgttttttgggtcttaaatgggatatagcatttttctgataatgtttaacactaaaaccacactattaagcaatagcctatgcaagatcttgtatgtataagtccatgtttcttaaataatggcttaattttgtcggtgtttttacgtgattattgcagagtaccatgtatgaagaaaggaggaataaggtttacgatcaacggacactcatacttcaacctcgttctgatctccaacgtaggaggagcaggagacgtacacgccgtctcaatcaaaggctcaaaaacacagtcgtggcaagcgatgtctagaaactggggacaaaactggcagagcaattcatacatgaacgaccaaagcctttccttccaggtaacgaccagcgatggtcgcacactcgttagcaacgacgtggctccttctaattggcagttcggacaaacctaccaaggtggtcagttctgatccaaaccatcatccacatctctctgttttgggtgctgacgtggctgcatattgctgaggtggctcgtaagcacccgcttaattagcttagcctttttttctcttatttacgaattattgcttcaatggttgtattttcattgtgcctacaaaaaagcaaggtttttttacatgtttattggatttttttcttctctttataagccaatatcgacgcccaaaagaatgaaattacacatgaattgatttaataatttcgaattttatttaaccaactacaaaggtttttttttttttccttatacaaagtgtttatatacacgattataaactatccggacaaaccggttcaccaaacgaaaatcaaatgtgtaaaccacattatcatctctaatagcaaccccgccaaaaataagccattgtatcttgtagtaaacttgtatgattgtatccatcacatcacaatttgatgtttatgaaatctttgagtgctttctcatctaatcaggcccataagtaggccattatcatcactattagtaatgggccaaaaccccgtgaatttggtcacgcacgactcaaatgagacgacaatggttgacctctggactctcgagtctccctggattactacactcgagctcgacgatccttagaccaacttcgtcttcttcctcgagagcttctctgatctccttcgccgttaataatttccacacgatcgcttcttcttcgtctactctctcttctcgcttgacaactgtatcatcgtccatggcttctggtgacgaaggagctgttttcaatttgtctgattctagccttcttaagatccttaaaggagacatcaccaagtggtctgttgattcttcctccgatgctattgtaaagtctctctctttctcaatcaattcaaaattctagggctggttttcccacaattgatatatttctaaaattagatggaaacttgagcgttggtgatgaaaatggtttgataggatcttgaattgtataattaggtctctcgaattttgctgcatgattagtttgacttaggaagtctgtttcgtcaggtcaatccagcaaatgagcgtatgttaggtggtggtggtgctgatggaggtatgttttaggatcctttgtcctgttcaatccaatgccattgtgtgattgtgctggtgtaatctgaaatctgattatgtatgtgacagcaatacatagagctgctgggccacaactcagagctgcatgctatgaggttcctgaagttcgtcctggagtccgttgtccaactggagaagcaagaattactccgtgagattaccctctttttaactcgtgtataaatgtagattgaggtagtttgaaattggtattgttgagtgatggaaaccagttggattgaaaaattggaacaggggttttaacttgcctgcatcgcgtgtgattcacactgttggacctatctatgactcagatgtcaaccctcaagaatctctcaccaattcgtacaagtaagcgtaaacactgtttctctcgtttactatacttgacatgtttgtttcctctggtaccaacaattcatcttttttcttgctacagaaatagtctgagagttgcaaaggaaaacaatatcaaatacattgcatttcctgccatatcttgtgggatttacgggtaaagttgtcacaaccagagacctaagttgttcatattgttttcctatttagcttttttgctcttagagcgagtatgattcgatactagaccaatccatctaatttttaccctttagtgattgacaactcttggaaagtttgtgcaaggtgaaagtgaaaccttatgttcgaaatcaattgtttttgttagatatccttttgatgaagctgctgcgataggtatttcaaccatcaaacaattctctactgactttaaagaggtaaagataagtttctcttgtctagattgttgcacttcccgctaagtgactgacacttttttgatctcgtattcttattcttatcaaggtgcattttgttttgttcgcggacgacatattcagcgtatgggtaaacaaagcaaaggaggtgctacaaaaagcctaaagtccaatcaatggccgaagatacacacaaatattccccaatccttcgcacaaacaaatcatttgctatttgtgttgtgttatgaatgccttgtgattattcgttacatttagatttggtaataaagaaaattcttgcatctaaaagaaaaggtttatcacttgactcccttattatgtcttcccatatgactagttatctccaagaccctgccaagtgaaaccgaaaaacctaaataggattctctcgaaaggtaagaagtgtgtaaaataagctgcttgcatttcttcttggtcttcctgagttcggagctgaggccatcactatttttggaaagagcaaatgtaaacgcgagaaacacaaacagaagaaaacgttttatcatagaaacagaaaaaacataaggttaatcacttgaccactgaagattgcccgtgctcagcaaccatctctgagtgaggaacgaaaagtcactgccagtgtttattttaaaacaagagaaaataaagcctaagcccactatgtaaaagcccatcgtaatttaaggcccaataagtaacaataaagatcatctcctctatcgatgagaagcgagtaaaccctagcagcggacacacacttaagtccatcgacatctggagagtgagaagagaggaatagccaaagatggtactctcattcatcggttgcttatctttgaattacaataaagaaagagaattgatgatcttccattgttgtttgtgttgcagactttcaagcgaaggaacggtgggaggaacaagcacaacagaggacacgtcaacccaatcagatgctccaactgcggcaaatgctgccctaaggtactctcttcctccttctcttctccaatcaatcaatctccagtaactcctatgtggattttgattagatcttgtggtggtaatataaatttggataggacaaggccattaagaggttcattgtgaggaacattgtggagcaggctgctattagagatgttcaggaagctagcgtctatgagggtatcatttcattcctctcttttatgtttctttgacctttgttataattctacattataaagtttggatttttagactattggcattagatttccagcttgattgaatcatgtaattgacaggatacacattgccgaagctatatgcaaagacgcaatactgtgtctcctgtgctatccactctcacgtcgttagagtccgttcccgcaccaaccgtagggttcgtactcctcctccacgtttcaccagacgcaaggtaatctctctctcattctcaactaaatgataatagttttaagttccatttctctatctttagttaagcgtacttcgttttgtgttaagataataaaggtgcaacttgtttctattatatactaatatctctgtgaaatactaaggaagttttaagtatatctggttattaagacctttacaaagtgtagttgaatcttgcataaccatattttgcagatgtgtgtagatcatttcctgttaccatttgaactataatagttgtttcaaaatagactttcgaggtagattaagcaaaccagtaccttcacttaatcgacctcgaaagtctattttgttttcaatgagactcttctgttttttttcttttgttgttgaaatgatttactcttctgagattttactgaattgttttcgacattatcatcatcaggaggatactcccaagcctggacagccaggacaggcccctcgtccagctggacctggagctgcagctgcaccacgtgtctgaagcctgcaatcagtttaaattgtagtttcatttttcaagatttttgtttttcttatgttggcttcagattttgtttcctagtgaatctccttatgttttttttttttttcaaataaatgtctcgactttgttattattatatataaacctctatagttttgcaatttgcttaagttacatggtaatgtccttcacattcgaaaatttgagattatttgtgaaaaatagttttgagtccgagaattgagaattagaagagaaattgcatgcagtaggcgtttagtttcggttcataatttcagtcttcattttcttgtcaccagagcaagccttgaggctttggaatcagttcttcttgtctaacattcaatttttcattgacattccttcttacgaaagaaggaacccttaagaaagaaagaagcaatggaagtttttcagcagcaaaaggatggtctaagagctcaaccacggtggcccgattcggagggcgccatgccaagcaccgcccaacaaagtctgtggcctccggagagatatcttcgtacagcctgcatgtgttagagcctctcacctgaacaggaatacccccaaacatcctaagaacaatacgtcctagagaccatatatcacgggctggtccgatcagattgtccttcccaacaaacctgtcccgctcaatggcctcaggcgacatgtactcctcaagggttccaggaaacaacaagctagagtccatagtaggctctttgtataaaccgaaaccagcaagcttgagatcccatggctctccacgtgtgttggaagggaagacaagtacatttgatggcttgaggtcgcagtggacaaaaccttcagagcggagagccttgagtccttgtaggatcatacgagtggcacgtctgacactatcttcaggcaatctccctccggcatcagagatcatcttgttgagattccctaaggaagcatactccatgtagatgtaacacacactcatgcttttggtgttagtcgcaaagagaagatgatcgcttgaggctcggacgatgcgaggatgattgtggaaacaaagcatgatcctgagctctttcacgagaatctttatgtgattgaacgaagacgactcttcgcatagagtcggaagttagaatcctgtttgagagagacagagccaaagctccctctgccaagaacagagacatgcttcaatgaagactcgggtacaccaaggggttctctgatcatcttctccgtagtagtagtactctcttttaattagattttgcttcgatattttattttttttgacaaataagaaagccaaaaaactgatggtttaatggagtgcgataccacctatttataagacctacgtaagtcggcactcctgagataaaactagacttatttataagactgagtcaaaggataaagatcaaaaactatatttactccctaaaataatatttcaacaaactatttccattttacaaaatagaaattgtaatctttactgtgaaagattgaactcgtgatcacgtgtaatatcatgatatttatttttattttaaaacttatgaaaggagataatatttcaacaaactatttccattttacaaaatataaattgtaatttttactgtgaaagattaacctcgtgatcacgtgtaatataatgatatctattttattttaaaacttatgaaaggtgataataataagatgcaagacggtgattggagatttgatgaacttgaagatctctagcagttgacaataaagcgaccacgtgagtatccctgaccgttagttcaaatagccgttagtacactaatcaatgattctcaccgtcttttgtgtttccgtcgcagtatttgtcacctgcgtttgcgtttttgaaattattctgtatcaaaaattgtattaggatacattacacgtgattttaattttactaagtgagtatcaacgctacgcgtgggtttgttttgaaaattgttaaaaaaaaattacattgattgttttttatgttaatttctatttactatttgtttatttttgcaatgttaataaaattagatctatagtatgtaattatattttatggttatattcatttgtaactcgaaatatcaatttatatatttcatgtataaagctgattatttataagattttaatattttcacttcatgaatacatataacaacaatatatgatattctgaaaaaattatgagcaactatgttacttgtatgatttaaaatttgcctaactcaattataaaccaaatcttgttttatgtacttcaacaacattgtgataggcttatgattaaaatttggattgacatcaactgaacaagatttgaaaagtattcgtatgaaaaaataaaaagataacaaaaattatatgtcatttaagtcaatatttttttatcttctgtcattacatatatcaatattagagaaatgatcatgtcttaaatgatttgaaaattgtctaacttgattataaataaactatttctggtttgatgtattcacctgatataatattccaacaacagtgttatcgactcatgattaaatatatagaattgatataaactgaataagatttcaaaagtattcatataaaaagaataaaaaaaaaaagcaaaaattaaagcagcatttaagtcaatacttttagatcttctctcagtgctc

SEQ ID NO: 15808 - DNA, 847 bp, Arabidopsis thaliana landsberg
  unsure (1)..(847): unsure at all n locations
ctcgaactcgtcgaactgtttcacccgatcttgtacatgagcatgataggcttctattcgttcgtctcgtgccgtgtactatccgttgaactgattcgcgacgagctaggaggnnnnnnnnnnnnnnnnnnnnntgatcttcagtccccgagctagattaagcccagccacgagtgcttcgtattcggccacgttgttggttgcctcaaaattcagtctgaatgactgctcgagaacctcgcccgtgggtgaggtgagacggagatacacgctcgaaccttattttgatgacgagccgtccacgtgtagttgtcaagttgtatcgagcggattctccctagcttcctttgttcgacgataaagtcggctaggacttgggattttgcacacattttgttccgatactgatgtcatactcgctgagctcgatagcccacttagccagacgaccctattggctcggactacgcaagacatgcgcggagcggcatggatcccattaccacgatggagtgggattggaaatagggtcgcagctttcgagctgacattacgactcgtaacgcaagtttttccatttgcaggtagtgagattctgcgccagtaaatgtttgtgagacgtaaaagatcggcttctattcgcctctgtcatctcagactaaaactccgctgaacgcagaatccgatacagggacatacaaatagagtggttctccgattacagatttcgcgaggatcggtggggtcgcttggtacttcttgagtttctggaaagcctcctcgcatcgggttgtccattcgaactttttgtttccccgaagcacgtcgtaaaaagccaagcatttgt

SEQ ID NO: 15809 - DNA, 1415 bp, Arabidopsis thaliana landsberg
gatagagattacagaactaaggaccctaacagaacaactttctgcagaattataggattttctgaagcaaaaccgataattcattcccatgagttaacgttacaagagcaaacatgacgccgggagatactcagtgggcaattccaataaaagacaaaaactttgagttctaatatctctacttggacagaactcaacatgaacaaatactgtcaaaacatgcccttttacttcaccataaagtttccaaaacataacacagtttacaatggaaactaatagttccaatcttaatgacaaaacagagaattctgaagaagaagaaaaaaacaattcggagcatatgggactcagaattgtccaagaactaaacagatcaatgattagttggaaacagaaagcataagaagcaaacctgagaaaacgggtttagagccgccgtaaaaccaaacaggggaaaccgcttgaagaggttgtgtatgtgttaagtgtactttggaattcacaagtgggggagttgcgacgacgaccaaaccgaaccctcacagaaaaagagaagcttccgacggctaagattatcttataacttttcctttcaggaggaaatcttcaccgttggattcagatgttcatggtttgggcctcaaaggcccggtcaatattaagactataattatccattatgtattcaagcaaacaccaaccaaaaaaggccgagatagtagtacgcaagtcatttgatgccatatgatataaacccagttaaccatgtgcatgcatgtatatatagacgccaggtttaattccatgacctcgcaaacgcaaagctacaaatttggcgattgttcatatacatagagtaaaaactgaacaacagcagtcatgaatgacagtagccagtagctaggtctattctttttttccattagctttcgattttttttttctttttaatgagagtttagggattcgcgacgctagaaaagttatagtcaaaaaaggaagacagcaaaatttagaactttgactaaaaagttcattactctcacaaatttatttttacggactctagtctaattaagtgctatttaatatttctaatatgtgtattagtttcaaatcccgatgcgtgtgggttctgacaatttaatccgtatcagagatatcttgatccgaattttcgaaaaaagcaaaaaatgtaaaaaactcttaaagctacatttataaaatacttgacaactaaaatctaaacatatcactaatgcaggaacaattccctatatatattaatatatatacatataatttaattaagtatgtatatggttcgacgcatacgagattctattattatatgatagcaagcaaaaagaagttcctgcattagtttcgtggaagaagagatgcattctctc

SEQ ID NO: 15810 - DNA, 728 bp, Arabidopsis thaliana landsberg
aaaaatctaaacacttggttatagcaaatcacgattgtgttttctcttaactatcctttaaaaaatgaaaaaaattgaacttcaaatgatctcgactgagtttgttttcttttaagcctcctttgttagagcatatgctcgatggttttgattgcgagagatgaaattgaaagaacatacagaaaagaaattaatagagataggatatcatggagaatcgagtgaagctccttgacgtaaagcttctggttaattgctttgacaaaggtaggagagtcagaagcgaaagagatggacttgatttctgatgcgatggcaatttccacggctgtaagagttgcaattgcttcgacaatcaggggtgagcctgtatcttttacagaggcggatccatcaaaaattagttgttcattttaacctagacagaaacatccaaattgcacagacttgtcagctttccaagaagcatatgtgaatcatttgcattcaacgagaatttggatatggtgggaggaaggttgatgggttgttttaaggtgggaactggagatttgggccgattgccactattttccccaaacaatagctatatgaaatgcttcctcttctttaacttttcttttgttgaagatgagctggttgtgtgaggtccagattgtccaaagtagccttgagaagagaggaccatcgccaattccaatggatgggagacaaataagcttgttggc

SEQ ID NO: 15811 - DNA, 4981 bp, Arabidopsis thaliana landsberg
cttcccaaacagtcttgccaattcgaacactttttatattatttttagcttagtcaccacttttgtttttctcaacggcgaagaaatcgtccgatgtcgcatccacttcaaagaaagtcgcatctccggtgatttcttcgccgtcgatggagtaaacaaaggctgagatttcttcttcactatcggatttgttgaaacgagagagaaatttgagaaagtagattgagaaaaagaaaagtggtgactttactaaagatcatgataagaagtgttaccaattgggtaagactatttgggggaagtgtgatgctactactcttgtgaagccaaagagtttgaagccgaaagttgcgacaaactgagatgggagctaagtggaagagcgaagctcaattaacgtggagtgttggtccgcaattgagttttcagctaacggttgtaagtttgtgttgtttcactcaaagggcacaagtaaaaagagacacaactaattgggttgttgtgtctatttgtttttttttttatataaacttaatattgtattgtcatgtaaatattaacaagtttcagttcaataaaacattttctgttttgttctgttgttgtctctaaggagaagagatattatctcgtacctcttaccttatttcttctttctctcaatattccaaccaggcaacaaagcatagaagaaacaagtgaaggagtttcatgcgatcatgattttgaaatatagggtttatctgatgagcgtcaatctagatggaattcacaaagacgacaacgttgaatctataaagcagaaatgtaaaccatgtcattaattcagtgcaaatctagcaacctacaccatgcacgaagcaaaggaagaaaccatgtcattaattagtccatttacaaaatctatagattgtttcaggcgtagttcttgctttgtttattttgccatgttctttgatgaagattagtaaaaaaaatcttgcattaacagaaccaatcactcaacttattaatttgtttgatcatctttcaggtacaatagtagtactatatatacattggcctcgactagtctacgtacatttgggtcacataacctcggtgctccaatttgttacaaactaaacaaaactgggccaaaaaaacataatctttgtcgagaaatagctcgaaatctattaattatctttgcaaaatttaatctttctcaaagcttgggaattgagagtagtttctttcgtttttcatcaagttttggtaaatgatgtttttagtgtatacaaattttagcatctgaaacataaatttaaaattctaaaaacttgaaatattaaaacagaactacaacatagttgtaatagaaagttggtcgaagttccaaactctatgatctggaccgttcgttttttcctcacgcgctcgatctaccggactgttcaaagggaatcaataaaataaacgaaaaagtctcggcagtgtagtccacgcggcgcgcaacattgcgatcaacttcataactttttagcttctcctcctccgcactgggctcgattgggtgagacgcggaccactgcacaggcatgcaccgtcttcctctctctcgctctctttgtcgcaatctctggaatttgtgtgatttttcggaattgctttttaagtgtcactcgtggttggtttcatctcttagttcgaggagtgttctatttttggggctttattgattccatcttctcccttgccgtttatgggataaaatcaacatcaatgagggtaattcttttccatttaaagttcatcttttgtgttatttggggacactgacataatctctctggtatctatctgcagggctttcatgtgagattttgtgtgtgaattttaattcaaatggtatggaatttggctactttgggaatgttatcttttgttttttgtgttgcatgtttttcataagtttttctggaatcttgcaggctgatatgcgtagacgaaatggaagtggaggttcctctaatcatgaaaggaatgagcagatactgtttccaaaaccagagaccttggactttgatttgccctgcgacacctctttccctcagcagattggtgtatgttttgttaccctttctataccataaaggacataagtggctaagattcttaaacatccactgtgtctacattttactgtttagaacaagtagtggtttagaaaggttcttattgtttcatacttgatgtgcaggacaatgctgctagttcttctggaagtaatgttaagtcattgctgattgagatgggattttgcccaactcttgttcagaaagcaattgacgaaaatggtattcttcagtttcctgtaaaaaactaccatgcatgctaactttcatttggggtatatatgattactgagtttgcctcttcgcatccaggtcaagatgattttgagttgctattagagattctcactaagagtactgaaacagaacctcctggacctagctttcatgggctaatggaacccaaaccggtaaagcgcataatgtgtgatcccacatgtcttgtctttcattctgtgtaatttcttaatgtttcttgcttttctttgacaggaacctgatattgaatacgaaactgaccgtataaggattgcgttactaactatgaagtttccagaaaatcttgttgactttgcactggataggcttggtaatgtattcacaatgtctttggctttgcattcaaaattcaaacatgttacaaagttacacctttttgtccgtgtctattcatggtttaacatattagaatttcttcttttcaggttattttttgagtgattagacctcgtgtacattgcaagaccaatttctcactattgcacgatattttttctttgtcttcttatagattaaccatctcttcatactggaacttctgattgtatgacatttaatataggcaaactaaggaggcttatagtatattataactctctgaaaagagaaataacatttatgaagctgttgtttattaatgttaaagtggaaaatccattccctgtgaccgtattagaaacttgtaaatagtttctaaaaaattgatacttatactattcaaagctatatagaaacttagcatgcagatagcagctatcatttggcctatccccaaatcctttcttcatgattgtttgttctgtgtgataggtaaagacacaccaattgatgagatggtggacttcattgttgctgctcaattagctgaaaagtatgcggaggaatccgaagattcacttgatggtgctgagatcaatgaagaagatgaagatgtcactccagttactgctcgaggacctgaggtctttggtgcttttttgacattagctgttgattctattgtcaatgcttttgtagattccactacctttcttttgtgttcattctgtgttgttcatgttgttattacctttattaccttttacttttgttttgtgttttaaattcaggttgccagtgaacaattgtttgaaacaatggacaagactttgcgtttactggaaatgggattctctaatgatgaaatttcaatggcaattgagaagataggtgagcaactgaggcacttatctgttcatcccatgactgttatatgtctgaaagaaaaaaatgtagacatgaaacgtatcttgtttatgttgtcgggggtgattatgatacttttagggtgaaagaaatcctatcatttgttttgcagcccgtcctgttgtactggtatataatctattttgcacctcttcaggtacaaaaggtcagatttctgtccttgctgagtcaattgttactggtgaatttcctgcggaatgccatgatgaccttgaagatatagaaaaggtatgtacactaatgtttttaattaatttttactcgacctccaatgatgcacttgtaaagtgaagtgctgaaactagagcttttgctgctgctactgcacctaaaccatctcacactcttctcttaattaaactaagatattgttggagtttaactcaatgatatttggtgtcactgtagaaagtttcagcggctgctcctgcagtgaatcgtacatgtctttcaaagagttggagatttgttggggttggtgctcagaaagaggatggtggtgggggttcgtcgagtggcactgctaatataaaaccagatcctggtattgagtcttttcctttccctgccactgacaatgtgggagagacctcgagaggtaagcgaccaaaagatgaggatgagaatgcctatccagaagaatacactggctacgatgacagaggaaaacggttaaggcccgaagatatgggtgactcaagttcgtttatggaaaccccatggatgcaagatgagtggaaagataacacatatgaatttcccagtgtaatgcagccacgtttgtcccagagtcttggtccaaaagtagccagacgaccttatttcttctatggacagttaggtgaactttctcctagctggtggtcgaagatctcgggtttcttgttcggaattcaccccgaacatgtagatactcggttgtgttcagcgctccgtaggacagaagggtacctgcacaatcttcccactgttaacaggtttaataccctcccgaaccctcgattaactatacaagacgcaatgccacacatgaggagttggtggccacaatgggatatcagaaagcatttcaatagcggcacgtgttctaatatgaaagatacaactcttctctgtgaacgaattggtcgccgtatagctgaatgcaagggaaagcctactcaacaagaccagactttaatacttcgacattgtcacacctccaatctcatttggatagcaccaaacatcctctcacccttggagcctgaacaattagagtacattatgggatatccaatgaaccacacaaacatcggtggtggaaggtggatgaaaga

SEQ ID NO: 15812 - DNA, 501 bp, Arabidopsis thaliana landsberg
cgttgaattacattttgagatcaccaaagcggtttctcattgtgtttcctctgtgtagtgactgtgaaggatttgcatgataaaatgcttaattctgtaaatgtcaagagatcaatgcctccaaatgcgtggttgtggctgttgattgagaactgtcagaatcaggatgatattcatcttctctttgacgttcttcagaatctacggagatttgtgagtactatattgccctctctatttacatgctctctctgtttcagttgagattcttatgatcaatcaattcttaaaaaattttgtttctggattgcagagattatctaatcttcgtattcatgacaacttcaattgcaatctatgccaacaagttgctaagacttgtgtacgtgttggggctattgactctggtactcccaattttgattttgagtagttttttttttcttaatccaatcgaacaagctgttaaatatcctttctatagctgttacatggatctga

SEQ ID NO: 15813 - DNA, 1345 bp, Arabidopsis thaliana landsberg
tccattgttcttgcagagattcattccagttcttaatacagtgaagagatcttttctaacccttctctcctttgctgtgtttatgctttcatactcaattatgttgtttgtttcattcaaaatgtttgaagagtctgcttgttaggaataaggtttctcattagggattcatacggtttagtagattgcaccctttgctaggttatctgtagaattcttcatctttaattatgcttaatgctagatctagagtaattaactagatcttgaatccagacaatagatatgcccgccacaggtatctgtagttggatctattatttgatgagtctggttaataggtgtgtaataagaatcagcctatctactaaggtaaacaatcgaactcgttaagaatgcatatttaggttgatagtttctcggcttcttcggttattattagctatagatatagggagttcacggcacgccaccggttattccataattagagtttgagtgtaagaatggttcaataacaacttagctttcattagatctactaaccaatagtttcctgagaattccctgttcctagctctctatataatctcgacattcaactcattgtttgaacaaaagaactttgtggaaatcgatccttaaatactgcaattgatctcttatttgagagagtagttcttagggtaatttgaatcgtatcaaatttcgcgtcgttgccaaagttcttgggaatcacaattgagtttagtttagagatttcgtctagtttttacttttattttgttactcacgcgtttcttgttttcttcttttctgtgtttcaggtgtatgtctaggcaaacaaggagcaaacaacagaaggagctgatcaacttttctgttttggacttgagaaaacttgaacgcaccaaccgaaaaacccaaagattagcaatggctgacagaatcattcgagctgatgcaaaaggagttttgagagatgagtatgggcaagcctacaatgaggctggacagagattggatgatcatggactcatcctacctaaggacgcattagggctcggtgtcgagcgacaccaactaggtgtcgatcgacaccttcgggagcagaatgcagatgcgattggtgtcgagcgacacaacagaggtgtcgatcgacaccaaccccagattatgcagctattcctccagctacggaaccacgtcgtactcttggggatttcaacaggcctggcttgttctatgctaatcgatcagatatcgtacccccacccttccagaggaacgattatgagctgaagcctggctatcgagtgctatgaggaccttgttctgagcatca

SEQ ID NO: 15814 - DNA, 898 bp, Arabidopsis thaliana landsberg
atgacagttctcgaacagatgatgcacgtcctccaataatcccagctgggctaaagtcttttagcacggataccgcgttcccagaagtcattcatctcaaagaatctgatatactcctccactgtaacctcgtcgggtttgttcagcagcttcgtctccttgcgccatgactctggctcatactcagtttcgatatcctcatcaatcagttcatatctacttgacatcgccctctttcctctgcgatttcagcttttctctgattacgtcggaatacagagcgttcgaattcatctctgaagctctggtaaacatgttgctctctcggtctagcggaccaggactcagcttcacccacattgtaatcagggtccatagaggattctccactgtagttactcatgatgaaacctgaaaacaaacgaaactcaaagataaacgttaatacgttagtaacagcaaaccaaaaacacaaaccaatcaagtgaaccggtcgagtgtaccaaaaaaaaacatttcttctttttttttcggtttggtgaactcgcggtcgagtgatgttgttttggtggtgaatctaatgagcttgaggaagtcgagtgataaatgtgagcttgaaaggcggatgtgctcttgccgtgaagtcgagtgaatggagtaaagcggtgaagttgatgatgatttgaaatcgagtacttggtgataatcggagtgagcgatgatgagagagatgcattgaatcgagtgaagtggctatgaatgagaggtagtgaagtgtgactgtggtcgagtgaagtatgggctagagagatgcagcggccaaagtggtgctgcttggacggaggagaagggtggtgcaccggtcgagtgcgtttgttgattcagtgactcgggtatg

SEQ ID NO: 15815 - DNA, 345 bp, Arabidopsis thaliana landsberg
  unsure (1)..(345): unsure at all n locations
gactcacggtatctaaaacacacggctgaatcggcagaggtaaacgcgacctaaatctctctcttgtgaaatcaaaacagactaagaaagtacggccgtatccgcgcctctctctagcaaaccagtatgtatttcccttgagagacacgccacgaatataagaatctatcttccagtctggagacacatcaagaaccttccatgaatcagagttgatattgtagattttgaactcagaacaagtgggagaaaaatcaataaatctcaagattttgtagctgcggcttgatttgctgctcttcttgatccnagagcatacntatacatgtccaatttgtggaaata

SEQ ID NO: 15816 - DNA, 591 bp, Arabidopsis thaliana landsberg
catgtatagataacggactttagaatcgatcacgttgccaaactttgaaaatatatccgtaagttcttttttatcggtgtcctgatcaagaccacgaacaaagcaagtgtattcaacatttgtagccattgtttgaaagagatatatcaaagataaagtataggttctaccgagcccaaaaaatgcaaaaatataggttctaccgagaattgaactcgggttactggattcagagtccaatgtcctaaccgctagaccatagaaccaattgatacgtatctaacttattatttatttatacttgttttatttcatcttctccgagccgttgctttgctctatctcttttccattttactactttctccgttcactgtaaaaccatctctctcaattctctccgacaacgttgctctaatgcttctccactgcaacgttagctactacacctcaacgttttccttcatctcctcatctctccgccgtcaagacaacgccaacgattcacaagatacagtaatccgtcgtcgtcacaatgctagatccatttctctatacatccgccataatcgagacctaaagctcaacaaa

SEQ ID NO: 15817 - DNA, 3304 bp, Arabidopsis thaliana landsberg
attatcctaaaattgtgttaaggttaggatttctactaaattttttacttttaaggaaaaagtttctcttaatagaaaaaaataagtatggattctcttacattacaggatcagagtataaaaccagtttaagtaaacaatgtttcaaaaaacagtatgatatctgaaattttaattataaaaccaaaaatccaaagtcaaatatacgttttccaagtgagaaaggacccataaacaattaacaaccattgatgatcaccaaatcataatcaacggtcgaaatgaatgaaaaataaaagtctgaaacggtggagagtttcgtcgttttgagtggttataaaaagagaaggcgtatatctcctctgcaacagaagctcgctttctctctctctctctcgtgtgtgtgtgtgtgatcgagtggtgaaacgacagagaggggcgtcgttttgttgatttcttctgggtgaagatgtcaggtctcgaagatatcaagaacgagaccgttgatctggtattatttcgattctcttctcgcttaaattcttcgagtttttaatttcatttttttagtgtttattcatcatgcccacaaagtgttcgatgatttgcttgaatgagaaatagatctgtttcgttgttgttccttgcatggtttcacgtttgattcttttacccttttttcttcaaatcattttccgatgattctactccttttttctttgatcgaaaactgaatcttaattcctcaagaacccgaaaaatccgcaaaaaaaaaaaaaaccgatttttccccccaattgtatctgcctcattttcgatgattctatcatggatcctatacaaaacccaaatcaagattccaactttattaattttggtctaaaattagggtaaaataacagatgtcttttaaaggttttaggtattaagccaaaaataagtagattttgatactgttcatcagaaaaagtagatctacccaaaaactacacacatgtgaaacgctgaataaaaagataagtctttttagtggtggagctaagcttaagctacgtctcaacaaaagtctctttcacatatttattaaaagagaaaaaaatcgcaaaaagtttgattttgcttgtgatatataactttctttctctaaaaaaaatcatcttttttttgtaaagataacgtttttgatgttaaagcagttcataatattcttctatcttccacccatgaaaaataccagagtttttaataaatttaagttttcaacttttttttaaattgttgttgatgttcgaatttttttgaggtacctttccgtagtacgttttttttttttttgaacttctttgtccttttgtaaaacatctatcagtagaagcaacttgtgaattcctctattgtaattgattttgtttagtgaaattgttttatgaccgaaatacccttaaccggactttggctttcacgccggaaagtagccacctttcatggagggaatcccgcaggcgcgtgtgttacacgttccataacacgtgcattgaagtagtagtagtagtggtggtggtggtggtggtccctctatcctccactgccagattcttttcacctttcattgtcacaacttgagtcaacgccactcttcatcttccgagtcgccgagttggatcgtttctgacatttgtaaaaagatttcaaaactagaaaagtttttgtcttttttacccttttgttcttgtttgatgtttgagttactattgtttgggttctgatcaaaacttttgctttgattctcaggaaaaaattccgattgaggaagttttccagcagctaaaatgtacaagggaaggattgacaacgcaggaaggggaagacaggattgtgatatttggccccaacaagctcgaagagaagaaggtttgagtttgacttagcattgttgttttatcatcattgaaagctttggttttgtttaactcacgaggttgatctttcgtaaaaaaatatcaggaaagcaaaattctgaagtttctggggttcatgtggaatccgctttcatgggttatggaagctgcagctctcatggccattgctttggctaatggtgataatcgacctccggattggcaagattttgtgggtattatctgtctgcttgttatcaactccacaatcagtttcattgaagaaaacaacgccggaaatgctgcagctgctctcatggctggtcttgctcctaaaaccaaggtaatatgttggtggatgctgtgacattactgtacaagatatttcgagacttctagagagcttaacctgtttctctgttttcaggttcttagggatggaaaatggagtgaacaagaggctgctatccttgtcccaggtgatattgttagcattaaacttggagacattatcccagccgatgcccgtcttcttgaaggagatcctttaaaggttgatcagtctgctctaactggagagtcccttcctgtgaccaagcaccctggtcaagaagttttctctggttcaacttgtaaacaaggagaaatcgaagcggttgttatagccactggagttcacaccttctttggtaaagctgctcaccttgtggacagcactaaccaagttgggcacttccagaaagttcttacatccattggaaacttctgtatctgttctattgctattggtatagcgattgaaatagtcgtcatgtaccctatccaacaccgaaagtacagagatggaattgacaatctcttggtcctcttgatcggtggtatccccattgctatgcccacggtcttgtctgtgactatggctatcgggtctcacaggttgtctcagcaaggtgctatcaccaaacgtatgacagccattgaagaaatggcgggaatggatgtcctttgcagtgacaaaaccgggacactaacccttaataaattgagtgtggataaaaacttggttgaggttttctgcaagggtgtggagaaagatcaagttctactatttgcagctatggcttctagggtggagaaccaggacgctattgatgcagccatggttggaatgcttgctgatccgaaagaggtataactctaatcattttgaattacttctttagtttagtgaaaggtcgagaaaacaagttcttaatttcttatgtttcacttggattttcataggcccgagctggaatcagagaggttcacttccttccattcaaccctgtggataagagaacaactttgacttacatcgactctgatggtaactggcacagagtcagcaaaggtgctcccgagca

SEQ ID NO: 15818 - DNA, 440 bp, Arabidopsis thaliana landsberg
atccgtctaagaactttcaaccataaatccccacaccacagctgctctgttgattgatccatgagaaaaccaacattgcatttaaggaagcttgatggaagatatctccacttggaggttgaagactgaagatatataatgataagatcgatttcttcttattgggcttctattgggcttattggataatacctcaaactaatctaattaggcctgcttatgaattgagtttgtatttaagttgttcttctacttttggaaacactatcgattaagaacccaaagaatgtttatctccttcatctcctttctttttccttttcttctctgattcttcttttctcaatcttattcttctgttttctcatcaccttctgttactcaacttgataagtgatatctgaccttatcaattggtgctttacattgggaaaatcatg

SEQ ID NO: 15819 - DNA, 626 bp, Arabidopsis thaliana landsberg
ccgagatttttttttataaaagcctcaaaagtaatgtcgtgatttggtatatatgtggatactattcttcgtattttatctttaacgattcttgatttcaaatgtgcgatgagataaataaaccgataaggattcctgtatggtgagttattctctgatccaattctctgtctggtgaatgaggagtgtagttgccatattaaccatcgtatgatatatggtttggtacttagaagcatctaatagttttatccaatcatgatatgttttcttaccttaaaagattttttaaaatttatgggtatctgagtggtgtggtagtttgttggtttggagcaacgatgcaagatccgtatttcttggttttggtctgaaatgttaacaatgtagtttattaactgtttgttgtaacattagtctttaattctttcgcagaaaatggaaccacaccacacaagttacagaagctgagtgcttgtgtaccatctgtggaaaatggaagaacattaggtgcaccccgaactcctccaatgcctgcttctgaggtgcaaggaacaacttgcaagccacaagttaaagaagttagaattaatggttttactgtctctggagaaaagcataaagtc

SEQ ID NO: 15820 - DNA, 870 bp, Arabidopsis thaliana landsberg
  unsure (1)..(870): unsure at all n locations
ttcacggtcacgggtcaacgtggtacgctctggtggcacgcacatgttctctggctccgagctacggttcatggtgccatcgtgattctgcctaaactgggtctaccttacccgttccctaaaccacatagagaagaagtcatcatactcggtactaattacaatgacataattatgataaacgttaatttttaaaattgtggttttaacaatttgaatttcccggtttaatgtttaataggtgagtggtggaaatcagataccgaaacggtagtaaatgaagcattaaaatccggtttagcaccaaatgtctcagatgctcacgtcattaacggtcatcccggtctcgtccagaattgtccgtcgcaaggtgaaatactaaattcgattttaaaactaaacttcactataatcattatttccttaatttgtattattatatgatctgattataatttttgtccttttttataaataaaggtaattttaaattagcggtagagagcgggaaaacatacatgctacgactaataaacgcagcattgaacgaagaactcttcttcaagatcgccggccaccgtttcaccgttgtggaagtcgacgccgtatatgtcaaacccttcaacaccgacacaatcctaatcgcccccggtcaaaccaccaccgccttagtctccgccgcacgtccttccggtcaatatctaatcgccgctgctcctttccaagactccgccgtcgtcgccgtcgataatcgcaccgccaccgctaccgttcatnnnnnnnnnnnnnnnnnnnncacacccaccaaaaccacatcaccaccgcctcaaaacgccacctctgtcgcaaatacaatcgaaaaatccctca

SEQ ID NO: 15821 - DNA, 2039 bp, Arabidopsis thaliana landsberg
tctcgaattgttaggataaacgaaccctagaattaggtatacgaatagagaagtttcccagagaagaagcacaaaggaagagctatagagaagaagctattaaaacacagtcacataagagatgataaactctggagaaaattcacgctaagagttttgacaaactttgatttgaaaaatcaaacacgcttctaaaaatctcaccggagaatctaatccttcgaaatcgaattcaaacagaaactggaaaaaagagtctgaaattcgtaacgtttatttgggattatcggaagttttgtatcggagttaaaagagagaaaacggattctggtgatgatagatcgtaattgagaagacggagaaggtcggcgaggtaaaggaaagacgatcaccggagagcgagttttggttttggatgggatcgtcggctgcgagagaaggcgagaggtcttggggagattttgaagtgagagaaaaaaaaagcgtttggagaaaagagagatgggtttgggtgaattaggtgtataaccaaaattaaaagtttaattaagaatataatattatgtacgtataaattaataaagtagtatgtaagggttgagaaaagcaattttagtgtggagtagtctgtgagagatgatttagtaacacatttagtttttactcatttgtatatttttgttatatatcttttctaaaaaatagattctaattatgagatttattaaataaaaaattatgtttttttctacatacaacatagcttgaaatgctaaaataggatttaaatttataaaatagtagatagtgtttgtaagtaaaaatatgttgcactatttaggatgtataggagtaatatggtgtactatactattttcatatatcattcgtaaatcaattttaattttattatagagatggtgtagtggtggtgttagttataatggtgatggttgttggcggtcaccacggtggcggtggtggtggtgagagtgacaaggagatggaggctagttgtgaggcctatgtctcttttttgttcaacaaaggttgcttccttttttcctataagatttttaattgtttttaattagagaaaactaaaccttaagatggtatataaaaaacccaagcaacaaaatttataagttttatgatgaatttttggttcttatttgtggaattaatgaaattatcaataatggtgagattaaacagaagatgtttgtagattatgaaataacatggagcaataaagaggaagattgaagacttgtttatatatgtgttaaattttctgaaaaaactataccctaagagatattatatagggaacccaaaagttaaatttaaacagaagtcaaataagtaacgttttattctaaacgatacaataaataagatttaaaaatattgagttaaatgcacgtcaaaaaaaggactatatatcataaaaatacaaggaaattgttttgtaaacttgtttacggataattaaaatataattaaatattcttgacataatttttaattttctataatcaaatagaatattcacagttatgaaaaaaacatgcaatcttgtaattagtttttaatcaaaataatagtgtagttcatgataatcttagttacatatgtatttagtgttaaatttgtttgtaagaattccaaatcaaataaaatcctattgattacatcgctaattccataacgataacagtatagtacattcacgttatttagctggtttggaaacccaatcgagataaaagaaatgaagcactcaaggtggtaaggagaagtagagaattgacttttgaggcacatgtatcagcaagggtaaatatgtatatattaccataaaatatcactgcttcttttttaatggttagttgtttaattataaagttttttgatggttatacaatacaattttcctactattattacttgattttttttccatagaacattacttatattaatttaaaaagtctttacataatagttcattgagggggatcctctagagccct

SEQ ID NO: 15822 - DNA, 356 bp, Arabidopsis thaliana landsberg
gtctctgtccttgttcgacgcacgatggataatccgaggatcgtgcgagtctcccgagcttttggaggcaaagatagacacagcaaagtgtgcacagttcgtggtctccgagacaggaggataaggttgtcggtgatgacagcgatccaagtctacgaccttcaagacgattagggctgagtcagcctagcatagtcattgattggctcttagaagttgccaaaaacgacgtcgatttggcttcctcctcttgcaattcccacctggttttcaccaacttaaccctaatctaaccggcttggagaatcttttccggggtcttcgatcttgaaagacacagagagaagctttgaatc

SEQ ID NO: 15823 - DNA, 3306 bp, Arabidopsis thaliana landsberg
cgactcgcagatggaccaagctgagattgttccatttgtgtatatgttcatctgtagagcttataatgtaactaatgtattatgtatatctgttttatattgatttgatcatctgtgaattttgtattcttgatttttttttcagacaggaaaaagagttgtgaatctgtgaattgttgtggctttttgaccattgtttacaaagagactatcaagtacagaaacgacgtcgtttggaagtttttgcttttggttctcctatttgtataagtttatcgttgtcttcgtccctgaagagagagagatggcaacggcgtcgtttaggtggatcttgcagcttcacagagacgtaccaaaagcggctcgattctacgagaaaggtctcgatttttccgtcaatgtcgtcaccttacgttgggctgaacttcactctggtcctctcaagctagctcttatgcaagctcccaggtattgactaaatgcctataacctgttcgatcatttgcctcaatgaaactttttttccccatggagagttgtttttacttggttgtcttcagttcactgtcctgtctgattgaaaatgtggaacttatagagattctgtgttaaattataaagccatcattgtttttgatgcagcgagcatgtgatgagtgagaagggatactcttcgttactatcgttcactgtagcagacattaatacaacaatctctaaacttatggaattaggagctgaactcgatggctctatcaaatatgaagtccatggcaaggtaaaaacgcaaccacttcctgcaaatgctttcttttgataacaattcaaagctttctttttcttgataaccaggttgcttctgtgagatgtcttgatggtcatgtgctcggactctatgaaccttcatgatttttctattcagttcggattatgtggatttgattttgtttttttcgatccgattttggttgaataatgtttcaaaattttgctaatcggatgtttggtaaggacttagctctaagacaaatgtaaatctatatatccggcgtaaaaaagtcgtttatcgattgttcaactaatcgtctagactttcgatcaatcaaaggcaggggagatatgttttacaaatttaaaagcaaagatgatgagaaacaaaaacaaaaatcaaggtgctgctgcatttctgcatttcttattctgaaatctgaacaaaatactcgttaaacaatgtggtttgaaatcccatttccaattgctcaaaaacaagcaagacaaatagggattttacaaaaaacagaaagggatttttcaattgttcttcctagcaagcttggtccattcggtgtggtacgcaccaggacgatcggttctctcataagtatgagctccaaagagatctctctgcgcctgaaccagattcgccggcaatctagcgcgtctataagtatcgaaatacgcaagactcgcacacattccaggcgtgctaataccagcagaaacagccaaacccacaactcttctccaagcagcttgtctctgaaccatctctttagcaaactcaggatcaaccacaagactagccaaatccgggttcctctggtaagctttcttgatcctatccaagaaaaccgctcttataatacaaccacctttccaaatcctagccaattcaccaaaattcaagttccaactcttctctaaactcttagctctaagcaaattcatcccttgagcataactacaaatcttggaagcatacaaagcttgcctaacatcatcaaccaatctcttcttatcgattccactcgacgcagaaccaatctcgtctttcaatccatcttccctcaacactttcgctgcattctccctctcatctttcaacccactcaaatacctacaatccaacgaagcatgaatcggctgtagctgcaacagacagctccgccgcttgctgcaccgtccatttcccagtacctttcataccagtcttatccagaatcttatcaactaactctccatcaccaaactcatccttaaccctaaatatatcagaagttatctcaaccaagaaactctcaagctcacctgaattccactcagtgaaaatctcagcaagctcctcgttgcttaatccaccaacgttcttcaacacatcataagcttcagagatcaattgcatatctccatattcaatcccattatgaaccattttcacaaaattcccagatccaccttctccaatgtatgtaacacaaggaccatcttcgacttgagcagcaactttctcaagaatatctttaacattgttatacgcagtgaaagatccaccaggcataagagaaggaccattacgagctccttcttcaccaccggagactcccatacctaaataaagcaatcctttcttctcagcttcaacgattcgtcgctctgtgttctgataccactcatttccaccgtcgatgatacaatcaccaggctccatgtattcagagagagcagagatggtttggtcaacgggagcaccggctttgacaaggatgataacggatctaggccgttggatcgagagaacgaaatcgcgaggcgagtattgaccagcgactgggagttttccttcgttggaggcacgatctaaggtttcgtcgactttggaagtggttcgattgtagacggagattgggaatcctttatcggcgatgtttaaggcgaggttttgtcccatgactgcgagaccggcgagaccgatgcgagatagagcgacggactccattgttgcgatatgaagagagagagagagagagatagtggtttagggttttgacggaggttggtggtgatgggggagagagagtgtcggtacatatttatacggtgaaagtgccggactcgtcgatggagccaagagacaatcaaaaggctgacttaacaaactggtgaagagtttttgttaggtgaagatgacgctctttatttacgacgccgttttcgtttctttagttatataattatgtaactttcggtttggaattttgattaaccgagtcgaattggtccgaaccaaagtaaaccagtttaaaatacggtaaaattagaaaaaacatagcagagccaggtttcgatcctgggacctgtgggttatgggcccaccacgctgtccgtgcgccactctgctttgttgatacctttttcttatttatgaaatataaatacatacaaaagggaaaatgtaaaagaaaaaatccattttggtaataatcagtgttttgggtgggaaaatctaatagaagaagaaaacgacca

SEQ ID NO: 15824 - DNA, 4868 bp, Arabidopsis thaliana landsberg
gtggtgtattttaatacaaggtaccgatttcttcaagaggcagaagtatcctgagcccataaaacattacaccgaagcaatcaaaaggaacccaaatgaccataaagtaagggcacttcatcatatttatatgttcttaaggtcttctacaatgattttctattccgactgtttgagcaactcgtactttttttgcacctatgttaggcatatagcaaccgagctgctagttacactaagctaggtgcaatgcctgaaggactaaaggatgcagaaaagtgtattgagctcgatccaaccttctctaaaggatacagcagaaaagctgcagtccaattcttcctcaaagagtacgacaatgcgatggaaacataccaagcgggtctcgagcatgatcctagtaatcaggaacttcttggcggtgttaaaaggtatatacacagatacacagagattattaacttttctatctattgccatgaatttgtttaatgtggtgcaaatctattctgcagatgtgtacaacaaatcaacaaggctaatcgcggagaccttactcctgaggaattgtatgagagacaggttagttacattctgatgattctcatgttttctccccccatttgtgattgaaagaaaacccgggaagctaacttggatttctccttttcttttgtgtaggcaaagggaatgcaagacccagaaatccagaacatcctcacagatcctgtaatgagacaggtaaataaacaaactctgtcgtaaattgtgattgtatgagtatgatgcaatttttgtttgaatcgagtttcttattaccaatgttactctgttgtgagatgtctagatagatctaactatgtttttacgtgttggttcgagtttgcatgtgataatacctcttaacattctaaaacctttcttccaaacaggtactgtctgatcttcaagagaatccaagcgcagcacagaagcacatgcaaaatccaatggttatgaacaagattcaaaagcttattagcgctgggatcgtccagatgaaataaactcagaagagttgaaacatcgaatatccgttttggcagattcattttttctcttatatctttgcaatctgcaacaattctagatttgtgaccggctgatttcccatgtttactgacgttgtgttccgaacaaattgcaatcatattttcttctgatataacatttactgcgatccttaaagttatgttgctttacatctctataccatttggagcataagagagcaaatggctaaatacacaacgactttgtcattcacaaaatttgaatcatttcattgcttcagctctacaaattgctaccgcacataactaacttgccattcaggtccaaagaacttgaaaaaaggtaagaaacggagtcttgtggcttcgttgtcccattcaaccctttcaagccattcttcctcttggtacttaatgacaagttcttcatcccttatggcaatttcagaatccaatggaagctttctcagctcaggacacttcgttatgtgaattgtcttcagacatggaaaagacagaggttgccagtagatgctcctcaacatcgctagattgtgtaggcgtagactctctagtttctggaaaggaatgataccactcatagtcatagctttctcttggtttattattccttctactagttccgagtccagaacctcgagactagtgaggttaggagcgaacaacaaccacgtcaaatccttcagaccatcacagctacttatatgcacagtggagaggttatggaggaattgagttttgggacttctgttcgacgataatgataaagttgtcctctctatctttatctcacacattccacacttccttatgatgactttattgagattatccatatctggcaaagtcaatactccggatgattcttcctgaactcctctaagtactaagatttgaagacatttcaccaacctgggagcatttaacaacttctccactaccaagcttgacttgatacttatgtttagaacttctaaatgttctaatagctgcaactcctccactaagctcatgtctagcgacattttagactgtaaaagttgcaatttcctcaaacttgatatatttgatatccctgaaatactcttaagtctcttcatgtaatccaatctcaaatatctgagctttttcaactcttgtagaccgacaggtagccgcttcatgtatgtccacgacaagtcaagataacgcaaggagactaactttcatatttggtttggcaatttccggagacttgaattccctgatagatccaaaacaactagcattgggatacaccgaaagaattcatccgagatatgtagcaatgaatcatttttctgaaggaacagagttgtaagttccaggcattcgggactgccagataaaatttcaatctcattttccatcagcgacatccttctcacagaactccagttcttgactttcggtacctcacgtaatccaacaccgacttgcacaatacatctttctttatgttccccaagatcagatgcaatccatagagccatctcccgaaccacatcatgcattttaacttgttctttattgatagcttcctccaacaacaaacatgctcggacaaggataccaatgatctcataaccttggcttaatgctctttctctactttcattttcatctatgaatccctcacatatccaatagtctatcaacctctctttttccatacgataatcttcaggaaacagagagcaatataggaagcccaatttgatttcaccattctttaagctatcataactgaacttcaaaatgggaagaattctttcttccatacctggaaacttgtggccaggcgaattcagaacattaatcgcatgatgccattcttgtacagtctctttacatgccatggcttccccaatgacattgagtgcaagtggcaagccatgacattttgcagcaactattcttgcaagtgcgggaatatcttcatggctgcttaatatgatatctccaacagtaattcgaaacaattcccacgcttcatctggtgacaaacagtcaacttttatctgcatgtcagctttcatgtgcttgcaaacttcctttgaacgtttggtgaaaacaatcttcgatccattttctcgagttggaggtggaactcctatcttaattagatctacttcactccagagatcatccaacaacaacacaaatttctttctctcaaggttattgtatatgagagaggctttcttactttctgtttctctttcccattccttgtcaggacgtaatcttcccagaatctgatcttgaatgccctccaactgaaagtctttagataccacaacccatatcactacatcaaattcactctccagttcaacaaatttgttgttgagactttctaagagggtggtttttcctattccccccataccataaagacccaaggttcttatttcatcgtctatgaggctttcccatgctattccaaccattgtatccaaaccaactgtggtttgtatatgcttcttctccaccttatgtataatttcctgcgcgaccattctaaaatcttttttagatagaagttctttaacttcttccaacatcttcgataccttttcaccataattgtagcttgatatgcaatcctcagagcaatatccaaacaaacacaatcttccggtttcgattgacatagcctcaagcagatgcttgaattcggattcaacaatttgaaccctggaaagccatccattgacttgagcaagccggttcaaacctttatcttcttctatggaaactcttcctaacaggtcatctcgtccattcttaagttcttccatacttttctgcagagcatcgagatttgactccatcaagtgaatgtagtttctatcgcttagaaagcagccacatgcagcagtgaagatttgattccagggtattacaagccagcccagcattttgcacaaactttaagaaagaacccccccgggattactgccaagtaatgcaagaaacaacacgatcgaagagggtgaatgggggagagaaagaggaatacaaccgtactgtatcaagaaattaaaagtcaagaccacaatttctattagtttattgagagtagtagcttccaagaaactgcaaccgtcaccaataattgtttaaatgagattaaccagtttattaaaagtagtgatagctagcttcaataaaagtcagaagtttgatatccacaaagtgaaatatactactaagcgataaaataagaagagcaaaattctctctttcgactaatgcaatcttctgttccttccggtagtctaatcacacgtaacaaattcaggacatagagcacacacaatgtaacacacatggcatacattagtcaaatgcaacattcagaacacgtaaaactgtatacagattttctcaccaagtacaagtaggaaccaagcgtacctgcagacatcaagaaaatgtcgcattttgaagaaaaaagtctgcttaaacttagatgtcactgcactagtgcctaactgctgcatcacactagacggagagggacgaggacggattccaaaggtaagtaaacagattcctacttctccggcgatgcagtaaacggattcgaaaggcatgtagcagagtgcaggaatccggagatcttcgttcgctcgattttgataaatcttaaaatcgagcaatcaaacacgaaatcgatttcttacgaaacgattttgcgacctagggcaaaactggaatttccataaactaatatcacattccgacataccggttaacccagaaaataat

SEQ ID NO: 15825 - DNA, 473 bp, Arabidopsis thaliana landsberg
ggaaaaagtcatcttacccgccgcagtttggtctttatccaaggcagagaagaagattttttgtaggcttttttttgagttcataggcccagacgggtactgctccaatatatccagaggcgtctcattagaagaatgcaagatcacaagactgaaatcacatgattatcatgtgattatgcagcagtttcttcccattgctcttagaggtttgctgcctaaaggtcgtagggtagcaattgtacgcttatgctcgtatttcaacaagttgtgtcaacgagtaattgatagggagcaaatattggctatggaggctgagattgttgaaactctctgcatgtttgaaagatatttccctccaagtttctttgatataatggtacacttgacggttcatctaggaagggaagctcgtcttggaggaccgattcattttagatggatgtatctgttcgagaggtacatgaaaggtc

SEQ ID NO: 15826 - DNA, 846 bp, Arabidopsis thaliana landsberg
  unsure (1)..(846): unsure at all n locations
cttagattcgagtatcgatttgagtttctaatagaactgaacttgagtattcacttgttcttgatgattcacttagatttgagtattgattggagtttctaatagaactnnnnnnnnnnnnnnnnntacaagattggtcgcattccacttggacctaatgttgcggctgtgattgtgaagacagtggaagacaccacaacatctttgtggaggcctacaccatctgtttacacacttggtgaagctttggggaacaagattgcttggccttttgatatgatcatcttggacagtgaagtagcttccccttctgagaatcagactgcaggatcttcggtaattttcttcccatgtcacttgtcaattatctagtaagatcactcactgctcacttataatttatgcaccattctttaggctaaaaatgcaccatcagttaagatcaagataattgattggaatatggctgattctgtggttggtgagggtcgattgtgttcaacagaccgaaaagaacttgtgaacaatatgcctcttggtccttctgctgcaattgttaaggttgaaaaggtgtttaacaaagccgcgtatttgtggagaccaagtccaggaaagtttgttatgggagatgtactaaatgagaacattgcatggccacttcatagtatacaatatgtgaattcatctcctccactgtatgaaacaacatcaccagataaaagaccagcacctcctctggtaaccccctgcactttaacttacagcgtagaaaagaccatcacctgaatgcttggtattatttttgattcttatagaccctgagtatcagtactaaagcaccatggt

SEQ ID NO: 15827 - DNA, 2234 bp, Arabidopsis thaliana landsberg
ctggactagtgtcggacgacctcgaggtagctggacgagtgacggacgaactgggcggttatgggcgaagagatacaactcttcggaaaggtgcaactcttcggaaaggtgcaaggaacggatgtgttgatttgggaagcatccattcgccccctatataaggaagggcgcccaggaccattccacacacacaacacaccgaaaacacaagaaaactcaccattaaaactctctccctcttgggagaataaatagtcttaggattcggtagccgggctgtggccggcaataaagaaggaaggtcggatcgacctaacctcgagaaggaaggtaagggatcctagactttgagtctaagggttctaggatgtgaattagtagtcggatccttgaaaggaccgactagagggctgagtagtatccgggtcatgtgcatcctacacaagactcggtccgggtaggaatcggctgatgcgggtacgcggctcggcggaggaccggcgggtcttaactgacctgccgagaatcggccgggctgatgcgcgatcttcccgtctttgaattctctccacggatccgagtagtgtatggcatatagagcattgcatggacttgcatatgattaagtaaatgagattacttatggctctatgactttcaggaacgaatggtgatcgtgggaacgacttggcttaggcgcgagagactcaaggccgggatgatgggtggtgatagttcggatagtctagggatcgattacatgacttgtaatagcttatatgcaaactcataggttgtatcgaatcctttgcttaatcaataaagtatccgattgtttgtttactctattcgtctcatatattgaatcacgaaatcatatggaacggattagactaggaaagaacctcataaacggttagggccgagtcacttagtggcttgggtcgagagaactcgtccggactttaggcagtccggatcggggcctttcaacccacctgttgattaaacaactgcagagtcaagctattgactataaacaagtgctaagtgggattttaacttaggatttttggttttataggattctattcacacaaaaaaaaaaaatcgtttccaccaaacgcgatggggtcgatcaacaccatcggattgtcgatcgacaccctcattttccaggtaagtcgatttaacctaaacttcatcttcttcatttcagttttttttcaaaccgccgaaatcactcttttctctctagattctcggattcttcaccgattcttgtgattttaggctctaatctcattagaatttcatcctacatctaccccaagtgtcaatttaatcaatctgcaacatggctgagcagaaaaagaagacaaggaagagcgttcctccaccttcctcctctggcgctcatcctcgccggaacttctccaccaccgctggcctccgcccttcacaactggaaccaccagctgtagcgcctcaacctcccatccatcgatttccatggccaaagccaccaaatgagaaaattccttctcaaagagtttgggaaaaggatgtcaacagagaattcactaaaggtgactatatcaatcgccttttttctccagattgggatgattattatactctgttctataatgcctggatgagtgtagaaattttgactactcgggttgcgaatttcggtttgatgtagcgtttgcagatagagaaatcttgtttaggactgctagatgatgtaggtttgggaaccatctgttgtaggcagtacgatttgtatcctgagctagttagacaaatcatggcttctgctagggtctactatgtgaatgacaggaaacgcaatgctcaggaaggagctcttatcttcttcatccgcggtgttagatatagtctaccactgagagagagttgtgtgacatctatagtttagacaatgatctcactagagttgctctacctggacagtttaaggatgctcagattttctggagcaggtttggcaatggaatttacgattccaaggacgcagtacactcagagattcgtcaccatgttctgagatatttggttaggctgattagtagcacactgttgtgcaagatggaacctggcaagatgagacattctgagttgttgttgttctatcatgctgttcatgatttctttccagacagctttggatcttgaggaggttgaccgtgatgtcaactttggcgaag

SEQ ID NO: 15828 - DNA, 1522 bp, Arabidopsis thaliana landsberg
ggccaccccaggatagggacgggacccttttctaacttacatgttcttctccagggtcataaacgacattttctccaagattgatgaacatattgagaaggaaacgctgataacagaattgaacctgagtgctcttcctgatctgtatggccagttcgttcggctaatcgaatatttggtacttactgtagcattaccatgatgaatttctctgctgagtttagcatgaatttaaggaaataactgaggttggtctacttgcaacagctagaaaacagggaggaggacaaggatcaaattgtaattgtcttgctgaacatgttagaattggcgactagagacatcatggaagaagaagtcccaaggtgagaccatttctatgagccgtcttctaagtgatcgatcattttggtttgaagcatactcatttaaagttttctttttttatcatgctagagtcaactcacaatggatcttatgttttgtatgacgtagggacccctcttcatcaacagcgcaaatatttcagccaacttcgattcccagtgtactctcagacagaagcctggaaagaaaaagcaagtctcctctttaaaattcatctatttgcttcatttatgcttctgcaatactggtgcatttgatctcttttgcctgagggccttctaagttatctatctccttacgtttttattgtgcagatcaagaggcttcatcttttacttactgtcaaagagtcggctatggatgtgccatccaacttggaagctcgaaggcgacttacattcttttcaaattcattattcatggaaatgcctgatgcccccaaaatccgcaacatgctttccttttcgtaagttccattccttttcaatttgcaagaaactccattgcagttatatgataaatctttttatttgcctcttaattccttctttcctacaagcagtgaggatgtacaaattctaatagctatacatttttttgcttttccatagggtcctaacaccatactattcagaggatgttctattctccatttttggtttggagaagcaaaatgaagatggagtctctatactcttttacttgcagaagatctttccaggtttcactttttcttctgtctccaaatggtcttgtgccactactattgtcctctgaatttctattccataaactgactcggtggtttacctcagatgagtggacaaactttttggaacgcgtgaaatgtggcagcgaagaagaactcagagcaagagaagagttggaagaggaacttcgtctgtgggcatcttacagaggccaaacactgaccaaaactggtatgtggcttttcatttcctttctcaaagaaacactctgcttcacgttttagctgtaggatttttctgattttaatcaaccagtgcgaggcatgatgtattaccgaaaggctttggagctccaggccttccttgatatggcaaaggatgaaggtgcttaccaggcattgatatgatttctttatttatagaaa

SEQ ID NO: 15829 - DNA, 675 bp, Arabidopsis thaliana landsberg
agccgatgttgtacttcccattccagccataccaacggctcctttagcgagtcctttaagaagagacgttgatccgcaactgaatattagattggggattttaacgaaccgacccggattggatccgttagtggactggatagacacaacgtctaaagcaaattcgcccgaggttgcccatccggtgatggagttatctggaaaagcgccgcaagtgttgttactacagccaggtctcggaggagagaagcatgtgccgcaggcgatggagccggcgcgtgagcagacagcggagttgcagcgaggagagcggtaagtggtggagacgtagccttggtcacagtcgacccagaattctcgaccaccgaggtcgaatacgacggaagcggggacgagaggtgtgcgttggttgatgacggttgtgtactggagggtagatgggtcttttgttactgggagaaggagagctttggggcggaaagatggttgggcagatgatgagagtgagaagatggagagaagaagaacggagaagatgatgattcgagaagacgccattgttagagatgaatgaggaatgatgagttttatgaagaggattggtgtgtgtgtgagtgttattatttatagagaagattttgtgtctcgctaatttgaataattggataatggtgt

SEQ ID NO: 15830 - DNA, 4258 bp, Arabidopsis thaliana landsberg
atagtttattgaataaacataattaataacttagctaggtctactttgaatttaaatgtggtctagttgaaacttaaaatgtcgaaatcaatgtaagttcgttttaacttggtttggtgtctctagacttctgaaaacgtttttctttctggtatattttactatatagtacaattaggttcctatcaaattaagtaaattgacctatcactatataccattttcaactgatcaaatcacatgcagttacatatgcattcaagactcaatctaacttgttgttttgactttaggcattgttatttttaatacagtacttaactaattgacacaccggaagtgctgataacaagcataaatggtcaaatcttttgaataattgttcgatctttttaaaccccttgattttttaattctttttgataaaataaaaccccttgaatttccaaagctttttaggaacagacgacatatataagattttgaacgagtctttagtccctaatagtgttggacaaaaatagcagccaattcaaagtttttgatttacaactgaaacaaatagcaaaccccaacttgaagaaagaaatccaaaaacgacataactgaggaaaacagtaactgaatacaagatgtatgctacatatcaaactttacataacataccaggcccgaccatgagtgtattactgggtctaaaaaaacaaaacaaataacaaaaacataattgtaagaaagaaaaagtcaattgatggcaaaaaaaaaaaaaaaaaaagaaagaaaaagtcaaaaaaaaaaattgtaaaatttgagaccataaaaactaaaagagtagtaactactaaacattcaaaagaattttactaaaaaatgttttgtcttcaattttaaatacattttgaggtttactagtttgatgggttttaggcatgtacctgacttgttacacacatgatacacccaatcgaaaaaaatcaacaaatagaacggaaccggaaaacgatatcacatagtataagactacatagcttagttttggttttaaaaaactctgataaaaaaaaaaccggtagttcgacttctttgcatgtgaaactaaacttccttagataatacttagcttgttcaactttagttatggtcattaattaattatctctttacttagaaaacaaaaagtcctatagtctgtaattaggttggtgccaagctgttcctctttaggaagatggaacttgaagttgaaattatcgtacctataaaaattattactttgaaagacatattacctaggtttgcctaacacagctccactaaatcagactcgattacgcaaaataaacataaacttcgaaaatacaaattttcttctgttgctaattcatatcaaattatgtattaagatctcaaatataacgaacgatccataaacatataatttaaaaggtcctcttctttgtctctttatatatatatacacgtaaatatgggtgaccttacatgttttgatcttcatattcatctaccttcggcgaaggaagacatcgaaatggagttcctcgagtactcctcaacgatgctatcatcatgtccagccgctccacgtccactacttcttctactcttaaaactgtttggttcgcttccgtttaatccaaaagttcttgaaccggctcctgtaccggtcccggtacttgtatagccgcctcctctacgaccttggagtccaggccgacccggtttaggcaatcgtctctgttgtgatgttgattggtaggtagtcctctcttgtgatgttgattagtagcttaaatgtaaaaccaaacaattttcgtgggtcaataaaagcaaaaatgaaaaaaaatattcgatctcttagtccggcccatgatcagtttcaggcccaattcaatccgtcgcattattaaaaatctctgaaatcgacttttaacttgtgaaaccgtcacagtcgccgggaaaaaatcacagatttcttcgacgccgccgatgaggttccggtacgcaatggtttgttcgtcgaatcagaaccggagcatggaagctcacgctcttcttaagagacaaggactcgacgttgcttcgtacgggactgggtcacatgtaaaactacctggaccatctctgagagagccaaacgtttacgactttggaactccttacaagcagatgttcgatgagctcaggcgcaaagatcctgaactgtatcctcttaatccgttcctttcttttgttgcttacggatcatgatttttcgaatccctaagtttgctttggtcactgaatcagtctcagtctccttctaattcgataatttgcttactttcttaggctagaacaacaattatgctatttaatttccttgaaattgtttcctaattcacatttaagtttcttggtttgatttaaggtattgattctgggaaaaagtatgttttcttctctccaaatgactgaagaaaaagtgtgtgcgttttagtaaatatacgaaatttcttgcttgtagctattgtgaagcatgttcattgggttgtatagggagatttgtaagcttgaagtttgatgcacttaactgttttcatcagatacaagcggaatggtattttgcagatgattaagaggaatttatccgtgaaacttgctcctcaaagatggcaagataatgctggtgatggtgtgtttgatgtggttatgacttttgaagaaaaggttttcgattcagtccttgaaggtaattgaaaaatcctccctattttacagttagatactttgtttgaaaattgcttcatcctgattgctcactacgtacatattgatcacaaactcttctaacattggaagaaaaaaatcctggtatcagtagatttgttcatcaacttatcccatttgaagaaaatcgaaatgttgacactttgatcttctacatgcattgtttccgaacaatcttctcatttggtaaattatgttaaactagttaggttagatgtttacatatgtgaattgatgaagtctaagtcatgtgaaactcaaaagttctgcttagtgattgccgtttcctgtaacttagtttacttttttaccttgctgtaattgttagctgaaaacccgattgcaatcatggtatgatagaactgtcggttttcttgctgcgtgaaacattcctgtgtcttaatatctttatctcatcaagttagatttgtccccaatctgcagatctcaacaacagagaacaatcacttacgaaaacaatacttgtgatgaacttggaggttaaagataaccacgaagaagcagctataggtggccgacttgccttggaactctgtcaagagattgaagggaatgaaacatgggaagatacgatcgatgacattgttgcgggttttgaaaaacaacacaggcggaaactggtctacagcatctcattctactgaagataccatcatcagtcgcattaacggtcagattatgtagagtgttcttctgtgaccccagtcttgagatgttgaacaaattatttttagttcatcggttttatatgttttagggttaaatacttgagagtgtagaagaaattgcatgttagaaactgagaattcgtcttccaaacacattctcttgtgttgtttctcattacttgaaagttgaaacagagccttgtcaaaaaaagtaataaaaatataaaagataggtgacacacgacatgtcttaaccaagcattacttcatgtttaatgtcacaatctaagttaacgtgtttatataaaacccaagtcgtgtaccaattgaattaaccctacccctaaaatcctgtacaagtcaattcaatgtttctagttaaatccaaagcccgtgagatcagatatttaaagacacccaatgacgaaaagtctctttaaaattcataaccttgactatataacgtcccacggttctaattgttagtttcagcagactcacaaaataatgaaaaagagccaagaaacgcaagaagactctcttcaacaagaaagtcgtcatcaacttcaccaaatcgtcatatccaagatattaagatctcatagattcttccaaaacctcgtcttgtattcgtttcttatcggtttcggattcggactcggcttcatactcaacgtccatataagaaacgtctctttcaatcctcaactctttcgtctatcttcactctccccatcatccttctctacaccaccgcttcaaccgcagccagaaatacttag

SEQ ID NO: 15831 - DNA, 4339 bp, Arabidopsis thaliana landsberg
cggcacacatcctgctttggtgattaagaaaatagcaggaacggtaggatttctggaatgacttttttttctttgtcacagctccgcattgcatattctcctagctcgacatttatttctttaaccgcgtccattgttatgttctattgcactctctgccagtgacttactctattacctcaatttcggttcttaaaaaaaagaaacgggagttgatgtcctcatgcaatcttttcagcactgacttgtcctatactcacaaaattcattctcctcaaacaggtctctgacttttacaaacgtccaacactagaaagcccttcaaaacttgctctagaggaaaatgcgttcttgtttgaaaaccatggtgctcagttgcttggccagattaagcgtggttgctgtcgagctcgggcaattttgttcaaagttctagctgatactgtaggacttgaaagtcggctggtggtggtaagcctcagtttctcatatttcaatttttttctttacctacatttatgatctagatgattggatcttatgctatttgtctcttacaaatcaacttggtttcccttttgattcacatgtgcagggtttgcctagtgatgggactgtgaattgcatggactctaacaaacacatgtctgttatagttgtgctgaattccgttgaactactagtcgatcttattcggtttcctggtcagttggtaccgcgatcagccaaggcaattttcatgtcacacatctcgcctgctggagagagtgattctgcagaaaacgactcttgtgactcacctttggagccaaatagtcctttatatgagagaagagatcctgagaggtcggcttccgttgtgtgatttttctttctaaagcatattacagtaagatcattctaaaacaactcttgtgataagcgtcccctagagtgatatcgtttcctctgctacagtacagaaaaagatgaaaatcttcaattttatcggaagttagaaggatatccaaatgcatctggttcatcactgcgtagtttgatgctcagaccttctacagctattgaaaggaaattgaggtaaatattacatatatatttctgacaagttgtataatggaatcagtacaatgattggtataatagaaatgtgcttttcttccttcagcaacacctcgcatagtgaaccaaatgttgctactgtattctggaggcgtagccgcagaaaagtaattgctgaacagagaacagctagctcaaggtttttccgtaccctttctggcttgtattatagttaatgaaaaagaaaataatacattggcacgacctcttgttgtctttagatacagtaatgagatggaacatataaaattatgtttctcttctttttgctgattctatatttaaatctcttgattagcgattctgttatctgaagtgtgcctttcaagagctaccctttttttctctatacctaactgatgatagttggccatttgttacatttgcagcccagaacacccatctatgcgacgtggacgatcaatgttgagcactggtaggaattcttttagggattacactggtgaagcatcatctccttcaaggtaactcatttttacattagtgcatgcgaaaattttcagtatgccgctcctatcatatacattccagtattagttaagttgcttatacaagtctgcatgtatatatttgattggctgtgcaagcaattttttaatattctctagctttcaaacagttcatccacatcagaaattcgtaaaactagacggcgaagttttaggatcacaccagaaattggcgatgacattgcaaggttggtattctcatccatgtgcattgtttctactttcatcgtttagcagtttttttctatcattttcaccttgcatttaaagagctctatattggagtttattctgtaaatctagttggtaaggtatttttaaaatctacaatcatctgagcagctgctagatcacatgaaagtatggcatgagtcatctcgaatgcaaaactgctatctccaaacttctagatgcttaggttaggtgtctgtaagatggttatatgataaacatggaactatatatttactttgatagtcatagaagctgtaagccatttgatggtactccttttaattttgtaataatgatactgagattcgtgagaactaattaagaacagtgattttgtgatttgcttgtgtattgactctgatgttacaaattattgaagcgctgtacgagaaatgtatgagaaatcaaagcaaaaccgtctcttgcagggtcgagaggatgaaaacagctcagttatcgataacaacgtaagttttggctctgttagtaagagtgattgttttgttgtgttagttcctttctcattgtataaccagtctaaaagttctgagtttcttctgaagttcactgctctattagctcttacctctaaatttcttgtgatttttgtttgtgctttctcaggtgtctggtctccatcttgatgatgagttaaattctaagaagacaatgtcattgccctcatctccccatgcttacaggtgtcaaacatttggacgaagagggccttcagaatttgccgtgaaggatacatggaataaagtggttgagtcttccacattgcagaatcagcctttattaccctatcaagaatgggacattgacttctcagagctgactgttggaactcgggtggggattggtaagctgctctaaatttactactcggtgcaaatcttcttttaatcacggacgcatgatccttctgagaccttactatagataaatgagctatgaggcttatttagtatgccatatcgaacgtcttttgcaaattcaagaacgtctctgttatgttgatattctgtttttccatgttgactaaactcaaaacttttatgtaaagatacattggcttatattttgtatctaggtttttttggtgaagtttttcgtggagtatggaatgggacagatgttgcaatcaaattgtttctggagcaagatcttactgccgaaaacatggaagatttctgcaatgagatatcaattctcaggtatcttgttaccaaattcttggtcattcttagatcatacctgtgtacctctactaatggttttgcatgtttcctcgggcatctgcggttctctcttcagccgtgttcgccacccaaatggtaattttcttttttttctctcgccttttctcttgtcatttttatcaagtaatttgcggagacatgtctgatattgttatctttatttacttttgtcagataattcgtgacttgtaatctatgtatttgcagttgtactatttttgggtgcatgcacaaaacctccacgcttatccatgatcacggagtacatggagctgggatcgttgtattatttgatccacatgagtggtcagaagaagaaacttagctggcacagaaggctcaggatgcttagagacatctgcaggtatttaagctaccctgcatagctcccttgattatatgttttaagctacatatgcttatctcatgctgttttgtatttcttatgggatgcataaggggtttgatgtgcatacaccggatgaagatagtccaccgcgacctaaagagtgccaactgtctagtggacaaacattggacagtcaagatctgtgattttgggctgtcaagaataatgactgatgaaaacatgaaggacacttcatctgctgggacaccagagtggatggctccagagctcattcgcaacaggccttttacagagaaatgtgatatctttagtcttggggtcataatgtgggaactttcaactttacgtaaaccatgggaaggagttccacctgagaaggtataatatgctgtgccatgatttctctagagatgtgatatctttagtcttgtgattacacttaatgaaatttgcttcttaggttgtctttgctgttgcacatgaagggtcacgtttggagattcctgatggtccactcagcaaactaattgcaggtttagtgttgttgaataccatgtttcttgaacttttttgtttattctcttatatttctcaactgcttcagtctgagttaaagttaaccacaatttctgtgcagattgttgggcagagcctgaagaacgcccaaattgtgaagagatacttagaggcttactcgattgtgagtacacactgtgctaacaacacttctctttcggggggatatgagccggaagatgttttagctcagaaaacatcccagcttcttttaaatccggctcttaattatcaacctagtcgtagag

SEQ ID NO: 15832 - DNA, 494 bp, Arabidopsis thaliana landsberg
ttttgtgttccaatcagctccatcatttgttaatttaaagtaacttaaaatttataaaatcttttgggtgctctattcgaatgagtggaaaaatatcacaattttgtcaaaactttatcaaaagcgttacaaaaagttttactctcagttttttctatagttctttctaacaactttgcattattccgataaaactaatagctaaaaagcttgtttagcttttggttaccaatcagatccatcatttgttaatttaaagtaacttaaaatttataaaattttttgggtgctctattcgaatgagtggaaaaatatcatggatagaagatttttcatattttttatttctggtatattagattttcaaagcctatataattagaagaaactaagtttgtaaaattggttatatcagactaatgaaaaaaaaaagaaaaggaaactaggttaaactcaaaacgcctcaagaaactttggttctttttaacgatttc

SEQ ID NO: 15833 - DNA, 100 bp, Arabidopsis thaliana landsberg
aatcacttctaagtctctcatacacagctctgtcaaacctctacccctaacaccatgcgggtgacccatatattctgttgcccatccttgatataatcaa

SEQ ID NO: 15834 - DNA, 570 bp, Arabidopsis thaliana landsberg
  unsure (1)..(570): unsure at all n locations
aaaagggtataggtttttttggcctgaaggaggcaaccttggagatgttattttaaggctgggaaaaaaccattcccagatggtttgttgtatcgtttacttaaatgtgatccatgtggaggaggagcgtctcatgcaaacgaagctgatctttgaccatccttccttttaagagagactgatcaatccgattcttgtaacggtaatataactttttcttaacctgatcaatttccttttcttcgcataacattaaaaaaaaaaaaaagattcaaataaattacccttgatgtatattgttgttacgcagtaagaaagatatgatatgttgtaacggtaattatgtaatgtaacaagagcaaacttttcttattttcaatggagccgttgcttataaatacgctccctcatcatatcttcttcttcttcttcttctttggtgatcaatcataaaacacaaagccatctttcatctntttcttcttctttccttttcaagacctgcaaatatttctcgtctcgatcaaagctttgcgactgatcactgatgtgctttcgatctctcgtgac

SEQ ID NO: 15835 - DNA, 1188 bp, Arabidopsis thaliana landsberg
caaaacaaaaataaaaaagggtaagagatagagtcaaaccacaaagttgaagaaaaagacgattaaacttaaaaggctgacatatgaatatgtaattttaaataggtaaaaacaaaaaatataaataatatcaagaattttaaaagggtacaattgcaaatatagaattctagagagaccagctgacctccttgaatcgacgatggggctgcctatgcggcggacccagaaagactggggacaggatcaaaatctaacttcaaaataataagtaactaaaaaaaattaaaaaactcaaaaaaacttcattaaaaaaacaatatatagatggttcaatgtttatgggtgaataaaaaaagaaggaaaaaacatgtaagaagaaaaatacgataaaacttaaaaggtttacatatgaatttgtaattttaaaagggtaaaaacaaaaaaaaatataaataatatcatgaattttaaagggttacaatgcaaatatagaattctagagagaccagctgacctcctttaatcttttttgggtctgcctatgcggcggacccataaatattttttacagtatgaaagtctaacttcaaaataattagtaactgaaaaaattaaaaaactcaaaaaaacttcatttagaaaaaaaaacaaagcaaaacatatatggttcaatgtttatgggtgaatcaaacaaaaaagtaaaaaacatgtaagaaatagtatcaaaccacaaaatagaagaaaaatacgataaaacttaaaaggattacatatgaatttgtaattttaatagggtaaaaacaaaagtaaaacaaataatatcatgaattttaaagggttacaatgcaaatatagaattttagggggtcagttgaccccctttaatgaggcccccttttatattcatgaggcctttaaaccttaaatcctaaccccctaccttataaacccaaattagtttttcaattttgtctaaatgtataacactaaaccctatctctaccttgtaaacacaacccaatatttaacttcgctacacgtatatcactataccctaactcatactttttaaacccaacccgatatttatcttggtctaaatgtaaaacactataccctaacccctttcaaataaacataaacactgtatgtaagtcacaaataaatttaaatgtgatctaatga

SEQ ID NO: 15836 - DNA, 3535 bp, Arabidopsis thaliana landsberg
cccatcaatctcaccagttagatccatcatcagctccggtcgctcagatttgtgcaggcatgtcatgcatttaatctgtgtagtattcaacattaaaatgtcaataattgggattacaacaaaaaaagctccaaatggtactaaagccaatacacagttcctaataatattataaccttggagtgaagatatccaccaaacgtaaggcctactaaagtagtttcttcagcaaacggaccagctgcaggagcctctttgagaaaaacagattgcattgtatcaacagcacacctggcattcttatgaaagaacaatgtaaatcacctttgcaaaaatatttaactttgaaaaaccgatagaagctactaaaagcaaaacccatatgattcaccttaaaaactcgtgcgcgtcttcttcttttccagggccaagatgcttcccaatcttttgtaattttgataagatcttgataggtgaaagaggagattctcctccccttgcctttaaaattaagtgttcaaactcacaaacaaaacaccaactcttctttctacctgaaaatccaatttcaagataagattccacatagttacaaacttaaaataagagcagtgaaaattgttttggtgtgcagcttacatgttttagagtgtaatcccctaataaggtatgatatcagtggccgagtgaatgccaagcactgaaggacagcaatagcataacaactacaaaagtaataatataagtgacaaacacaaatatattagcacattagatcatcaattcatgccaaaagcaagaaacgtgttaaagatagatacgtacctgttccctaagttcacaaggccaaatggctgtagttctactctatcacaataaagtttcacaaacaactcatacgagaagctcatctgcacaaaaaatacagcaacgtcactatgggatcatggcagtagatataatcaaggtacaaaccaatcatatatcgtaataacctcatcaatagaactggaaggttgagactttttggacgactgtggaggtctaaaatgctgaacaactttctgcaccgatgttttcaatccactacttgaagcttgtgacacttttggcttactgttagcttttgaaggtaggagaagagttgaagacgaagacattgcagcagaagcactagatggttcagatgtaattctttcatgtttaagtgcattcatttcttcttcaaacccaactgacaaaaattgatctgaaattgacatattagccgaatcacctgacctacgtgaattttgattgccaagtttccgcagctttgcatcagtctttcctttggaataattactggctgactcaaccttgtctgtacgattacgtgatttcttcctacttagtggcctggtctcatagagattatcctttatgtttaaagaagtagtgaaatccacagcttcagatctaggttgcactttatgaatactaggcctacttgtagacatatcacaggcaacatcaacagacacattagatgatgattcatacgcagtcccacgagatggaaaatccacattagactctttagcatctgcagagagctttcagtcatcaaaatcacaaaccaccaaatgtgaaaacctttataaatcaaaagctaaaatctcaagtgttaccataatcagattgaacatactcctccttttcttcatcataatcaggcgatcgacattcttccttatgacctcgtcgacagtgaagaatttgacacttgcttgaactaccaaaaaaaggtaacaataaatgatctttttaagaaacagaaccaattaaaaatctaaacttttcctcgtgatcagattcttaaactagtcatcctcggatttgaattgagaggagacgaacgaaccagttacgaacagatttgcactgagagcaacgagtagtggtagggtatagacaaacggcgcagcggtaaacatcagaaaccgagtctccgccgtaatcaacagtggcgggacgaacttcctccgccaaataagattcctcggtggctaaagcaatgagacgaatcacctcttctcttctcacagaagcagatctccattgccggcgaatcagaagaaaaaccaacatcatacacccaatcaatagacaacgaaaccctaaggtttcactttcaagagaaaccggcattataatctcaaacgtgagaagccagaatcaatctggaagagacgaatcgtggaaaggtgattaacattggtgatgcagaggaggacgaagacggtgatggtgagagtaagagtaaatgtggaaggtaagacggcggagaagatggtggcgattagagaagcgacggcgggtaaaggatttgggcatctggagagattaaagctagagagagagaaaagaagaagaagaagaaatcagaaagaatggtgtgttgttagagagagaaagtgaatagagaagaaaggagggaatcaacgtgcacttgttttttgtcgtttacctttcttttttttgtcgtctactattttcatatatgatgaactgagcccaattacaaaatcttaaagcccatttagcccaatagcattacaacaaatctctttagtttttaagacagacaagactaactattcaccatggagcaaactttattttcatgtaaaattattcatatattttagtttacttgtataattaccaagcaaatcagcaagtagtcgctttggccgagtggttaaggcgctcgcctgctaagtgagtgggattttcccgcgagagttcgaatctctcaggcgacgaatatttttatacttaaagttaacgagagaacgactaaactcggttcgttgcaaacaacaacttgagaaaaatgcgagagtctcttttcttctatttttttcaacctttttttataacatacatgtaaaattatgtacaattaccaagcaaatcagcaagtagtcgctttggccgagtggttaaggcgctcgcctgctaagtgagtgggattttcccgcgagagttcgaatctctcaggcgacgaatatttttatacttaaagttaacgagagaacgactaaactcggttcgttgcaaacaacaacttgagaaaaatgcgagagtctcttttcttctatttttttcaacctttttttataacatacatgtacagttaaactctatgtttactcccgcgccttcttttaactacatttgcttggttcaaagaatagaaacttggcaatggccataccataccaatgaaccaaacaagaaccagattcttcaccggctcacaatctctggtactagtagttgtatcccccttctctgtaatccgtagaatctttgcatagcatagacctgagttccatcatcgatcttggtggctccaagtgctcgggcttcaaaccgtttccaagcaagctttgcatttgtgtcgcaaagatttcatcaaaacctaaagttacaaagaataagataagaaaaatggcaaccaacatttttttattcagctcccaaagag

SEQ ID NO: 15837 - DNA, 5009 bp, Arabidopsis thaliana landsberg
  unsure (1)..(5009): unsure at all n locations
aactccgcggaaaaataaaagcaccgtcttggcggaaatatttttgccattaccggaaaaagatccaaacattttaaaaatcccactgacttagccaaagatggtcactttttctctctcccccttgtctctctgagcaccagaatctagggtttcttcacagtgaatcttttttttttttttttgcttcctcctcaataatcgccttctcgtaagttaatcactctccctctcgtcacttctgctccctatgttaaaaagatcattcatttctgcttttctagggtttttttttgggatttcaaagactacattgttcttctttgttctacttacactctgtatcttttctctttatcactctgcctctcttttgggtttctctgtttttttctttaaagggaggaccatttacatggtcatgtatttctatctgcgtggagatatttcgtaggctttaaagttttgtgcttgtttgtttatatgttctttactttaaagttctactctgttagtactctgtctgcggaattagattactggtagggatgtaaaaaaccttgaggaaaatggtagagattctgattagaagctatatatcatttgcttattccatagtggattgatttagcttgtttaaattccagttctttttgtgatagtccctttcttatttcattggtgataaatttgtctttaggtacttgtgtgaaagctcccttctttgtggagaaatggcaactgagaatcctattaggatatctggaagcaatgaaagatggtctaattctaggaaggtttctgttcctaatcgaagtggcagtgcgccaccgaacatggaggggtcttttctagctgtggataatctattgtcacgacagggcggctcagtttacaataacttgatgctaccgcgttacgggtttgaggagcccgtgaccactcatccttcttctaaacatagccttaaccgcataccttctccaccgatttattaccctactgagtatcagttcatagacaatcgtgtaggtagatttagaagtaaccagggattgaataaagttaattctcccattcatttgtcccaaggcaaactttctactcataaggaagtttctgaggatgaaagctcccaacagttatctgttaatagtgtttcaaataggacagatggattggacattcgtctttcacctggttctcaaagtttggccgatttcaggcaggttaggctttgctttctttcccctctctggttgtgagtagtgaaatgtcattgcttagccctataagaattgattttttttttttttggtggcaggatgatacttcttctgggcagacccctcaacatagtcggtctaactcttcaaatggtgacgtgaacacagcagatgagagtggtaacttctcagagttgtcagatgatgtcgtggttaaagataatgctgcttcaacggcaagagcttccattggcaatgagaagagtcctgatgaatcgactatcatctccaaaatgaagagtactaacatatccggacctggaacggataaataccctggagaaccaaggtatggacagccagaaaggcagccgcatcaacagcaaaataatgcaacttggattcaaggtggcagcaatatgggttctcatggtgtaaacgatgcagttatcggggccggacagtttcattatggacaaccttacaagttctcgggtgatggtcagcccgtacttcagtcttccggttttacaccgcctatgctttacactgctacccaaacggcttatatgacttcaccagctcatgtctataacatgcagtctcctgctgtttattctcctcagtatggttatggaccatacaccaacatgatccctcagtttatgcctggatacccttcccatggttctgttcctgttgttgtcagtccagatttcattcctcagttatctgggccaagtgcaggaagtgtggtccatggaggtgaaatgcagtatgcggagaagctctatgttccaccaggacaaccttcttttccagatcctatgtatatgcagtactgtcaacagtcatttgggcagatggaaccactggctcctaggaaccacaccaatgctcccgagtctcagaaagatgatccaaagttccttcgacaaattagagggccaagtaactctaatatggcaagaccgggaatgggtgttaattactatggaatccagccaaatatgggcattatggtgcagtatctgcctacacatctcggccctcctctttcaccaggtcatgttccttatgtcgaggcatatcctggatggcagccacaagggagcttagaaggtgccaatggccctcgattgtgcaattttcttgaagagctgaaatctgggaaaggtaggaggtttgatctatctgacatcacaggacacattgttgaattcaggcaagtttttatcttttctttcagaagtctcgtctcgtcttaggtttcttcccaattatatgataacaaacttgagtaaaatcttgtttcctttcagtgcggatcaacatgggagccgatttattcagcaaaagcttgagaattgtaaaccagaagaaaaagcagctgtctttagggaaattcttcctcatgcttgcaaactcatgacagatgtctttggaaattatgtcattcagaaggtacaagctgtagctttctaaatcacttcaacacatcgctagatgtgtcagtttactcatttgttgttctggttatgttctagttttttgaacatggtacaaccaagcagagaaaagaactcgctgaacaagtaacaggccacgttttggctctttctctacaaatgtacggctgcagggttatccaaaaggtgctcagtttaaagacattgttttgatccgattacttattattagtggtaagggttttacagacaaaggtgtttgacttttctgagcgtgtctctatcttgtttctgtgatatggatacaggcgttagaggtggttgaattggagcagcaagctcgaatggtgaaagagcttgatgggtctgtcatgaaatgcgttcatgaccagaacggtaatcatgtgatccagaagtgtatagagcgtcttcctcaggattggatacagttcatcatttcctcattctacggaaaagttttagctctttcaacacacccttatggatgccgtgtaatccaggttctcgatataatacatctcaccctataggttcttgatcataggatccaagttccaattttttttgtcaactgttaacgatacttatattctacttctttcgaatcgcatcagagggtactggagcatattgatgatatagaaacccaacggatcattatggaggaaatcatggattcagtctgtactctagcacaagatcaatacggaaattatgttatccaggtaagattctgaagcttaattgacgtttctgcttcatgaaaatggacacactgataaagattaatcctgtttccggctgtagcatatcatacaacatggtaaacctcatgaacggtcagaaattatcaataagcttgctggacagattgtgaagatgagtcagcaaaagtttgcttctaatgttgttgaaaagtgcctaacatttggcggtccagaggaacgtcaggttctagtgaatgagatgcttggttatactgatgaaaacgagcctcttcaggtctgcaatctaactccctcatgtctttctgcaatgtctcgaaaaaagtcccactaaagttggaacaatttgcaggcgatgatgaaggacccatttgggaactatgtagtgcagaaggttcttgaaacatgtgatgatcaaagtcttgcactcattctttctcgcatcaaagtacacttgaatgccttgaagagatacacatatggnnnnnnnnnnnnnnnnnnnnnnnnnnnnnnnnnnnnnnnnggaggtaaacatttcttctctctgtacaacatcacagttcatgatcatgatcatgaatcactcttcttctttctgcagagagaagaatcggacctcgtcatctcttgccgcgaacaccactccataaccatctctgagtaagtaaaacctcaagcttcttaacttataacacaacctgagaagaggtacaagttgatgagccgggagctatttgtacagcctaactaagcaaagcatctcaagatggttcctgttatatatattttgctaataatttgtaaataaaatagagggttttagatttaagtcagtaaataaatgtattttggatcccaactggcttaaatcaaaaatctccttttggttgtgtaaaaggtgaagccttgctgttttatttatgtaaagcaatggcttacttttaggtcttattcttcacattacgatgtaaatatcttgcggctttgctccccaagaattgctatattttttattttaaaagctctaaagttttacactgaacattttacacccaccaaaatgtagcaaatactgaatctgttaacagtttgaaaaactcgtcgatattcatttttagccaaagaccaaacccatcaaagacaaacatcaacatctataccaaaaactatgtaatgtattaaccaacactatctcatacaagtgaacctgcttgttcttcatccttgtggtgataatatgtaatgatcttatttccaaatgatatcgcccaagaagcgcagagcagggacacctctgatctccatatcaaccagcggagcctccatcagtgtcaaagcagagagttctgaatcctcccggatcatatcaagagcccgcatttggtcctgcatgttcatttttcaggttttagatgcatgttcataccacagaacaaaacaagaacagaagcacattgtggtttgaggagtaggcaagaccggtctttggtttaaagagactatcagttcatgagaagcttgtgtttgtgtttgtgtgtatacctttctcttaatagagcaaaatttgc

SEQ ID NO: 15838 - DNA, 1007 bp, Arabidopsis thaliana landsberg
ttgattcaaaatctttcttgttctctaattagtatcagaataatcattgattgatataataccacggtaaccctcattagagctagtttgatattctcataaaacaaaatcgaatcgatacagagatcattaggaaaattcaccatgtccattggttgcaaaagaaaaactttctaaacctacaaaataaggttttggattttagtagttttagaaagtcaaagtcacaatcaaaaaaaaataatttctcgtttcgacagtcaaatagattgatttatttccatgtattgtaaattataatatataagacacattccgaatcataattcttatcaaaaatgatatataattcatattttaaaattagtaaatttgtaaacttccaaggaaacaatataaatttaggcatgaatctacaactttgaatactaacatagactaaatacatgcattatacgttacatgatgtttagtcctctcactgttaaatatatttacaatttgttacatctataaatagagaacttataagttttatctaaccacactcctacataatttacttaaccatggctttcacaagtaaacctcattttataatgttgtgtatgatctattctactcttattctttttgtgtctgcattagttctttctgatgctccagcggaagcaccaacttcgggcggcgatggcttgttacctctaagcgaaaaacatgttgtaatccgcaacaagttaaaaaatagagaaattttgaatgtacattgtagatctagtgaagatgattttgggcttaaacatattccttggaatggtgcatggggtttcagattttatgttaacttttttaaaactacgaaatttcgttgtcattttacgtggcataatggtggatctcattatttttatatatttaaagcatcaagagatgatagtccagttggagaacttccgatttgaaaaaatgtatatgggaagtaggacaagacgatgtaacccctattt

SEQ ID NO: 15839 - DNA, 959 bp, Arabidopsis thaliana landsberg
aggatcccttatttatttagtgagaaggattattcttgaggacaaatgtactagaaaatagattgatgactattgagaaaactatgagctttgtaggaaaatgcgtatagtgtgtttgcccaaaaatgcgtgtccctttacatggcctttgacccataatttatacccaaagaatacattaaattcccatttacacaaaattattctatcttaaatgtattcatttcagtcttcgaattatctattcaaacgttcgaatttgaattgactccagacttcctgggcttcacctgtcggcccattcgacacttcactccgggtaactttgaccttgattctgtatccacttcccaggtaaacacctcgcttgtactatcaactcggggtatcctatgggcttctcttcttttgggcctctcttgcttatgtggcaatctttgactggtctcgagccatggtgcgggatccgacaccaacaattagcccccaagtctttcgaagtgaaactctaattcggaagactttaacgcctttaatggacaaagattgcgctggataattttctgatttcccgccaaaatcacgctactcctttgattccggcattgcccatatttactcgtatgacatttgtcacaattatgaccacatcttaattatttactattaaagcgggaacccttccacttccccctcgacccccgaggcggttccgtcatcatcaccagcttgcatgaggtaaattcattttatccctttcttactttttacgctttatctctcttagaacaaagattttctctgttttcctctatcaatcttttcctcttcaaacaccggatttttccatcttcttcgatgaatctcgacactgaaagacccgaatcccccttttttgacgagggcggttcttgtaatgacctatgcccctcccttaatgatatcggtgggccacatta

SEQ ID NO: 15840 - DNA, 712 bp, Arabidopsis thaliana landsberg
ccaaagcggctacaaagggtataacaacttcaaaacaaccaaccccaacctctcctaccgcagcaccaacgttgctaatccttaagatcatctgtatcctccacagcaacaacaaggtcagaacaaaccttttgttccttacaatgaaggttttgttcccaagcagcaattccaggggaactaccagccgcaaccaccacctgggtttgcaccggagcaaaaccaaggtcatgctgctcctaatgctgaaatgaaacagatggtacaacagctgctacagggacaagcatctagctccatggaaattgctaagaaattatctgaattgcaccataagctggactgcagctacaatgacctgaatgccaaagtggaggcattgaataccaaagtcagatacttggagggaaattctgcatctacttccgcttaaaaacagataagccaacttccaggaaaagcaattcagaatccaaaagaatatgctcatgatattactctacgcagtggaaaagctcttccctcaagagaagatcctaagacagtcactgaggtcaatgtaaatcaacatggggaagatttcagtctcagtaaagatcaagctaacaaggaacttgagcagccactggaccagtcactcgagcagccactcgaccagtcactcgagcagccactcgatcatgtactcgaccacccttcccaatgacatctt

SEQ ID NO: 15841 - DNA, 983 bp, Arabidopsis thaliana landsberg
gaatgggtgtattggttctagcggactcttcaatctattagctaactaacaaactcaatcaagctatccctattctctagattcaaaaccagatcaatccactttcatgacaatgatcctcataactttatcacttcctaatctcaattttctttgatgaaacattacaaaacaggctttaaacaccaatctatttaagtcaataagcagcctaaacatccaaggtcttgggctagaatctacaaatctctgaaattagttggttaagacatttcatcaaacacttgttaggtggagaaagtctgaaatcaattttcaattgatcagaaagaaaatagcattaaaaactcctaaaacagaagggaatcatgtatataaacacttagctagctaaagaacagagcaatccacctaaacctaacccatcctcaagaactctaaagaagactactcaagaacaatgaaaaacgtcatagaacaaaactcaaaaaaatcataaaacccagaaatcattataaacttagcaaatgatagatctcaataagataaacaagtttgcagaaaaagtcaaatccaaattctcaacacaacaaccagaaaatgcaaaagaaatctagaaaaccctaatatccatcagacaaaactaagatcctctgggcaaaaatataagaggtctatttataggcaatactaggatgccctaattgggaaaaagacaaaatagaaaagtcggcgcttcaccactcgggtcttggccgagtaagaaagtcgagcagcctcctttggtcacatcactctggtctaggccaagtaacttggtcgagcagcttcccttcttcctcatgtgcaccactcgagcttcagccgagtgtcttggccgagtatagtccttgcttctcccttgtgtgctctactcgatttccagccgagtagaaaagtcgagtatactccaagtcccttctttgatcccacgaactcgagct

SEQ ID NO: 15842 - DNA, 4203 bp, Arabidopsis thaliana landsberg
cttcatattatctattggcagtttccacacatatgtaaagactgttgacaaagttcttgtccctcttaaatcactaagagatatatcctactaaaagtagatctgtagaatgttgatcacttctggtttctctgctatgagatcaaagaactcaggtccaatacatcttcaatgaataacgctcttgatgataggctaaatatgtttgttgtccatgccattgtaagtgatatccaacaagaaacaagaatttgctcaaaaattgacttgcatctatctctcttgattgataatatacttgtattgcacaattctgtacctgcgcttatattattcatttctttatttagtccttacacactgtctaacgagttagaattttagactgaaaagatatggtaggggctgcgcgaacgcaaacccccgctgccacaaataatgacgtaggctcttcctctagggaagaccttaagcatagcaccctcccggtatgtgcaatgggagtcactagcctaggccactcgtcttcttgatcgcgagttgaccccgtccaggtaagtgatttgctcaaagtcatgactctcttatttataccctgttcccggagcttctcttgtttcttattaccgatgtgggactttttgctaaactccacattttcgtcgttctaactttttgaacatgcacagcgtgtcgtttttatattcgctttctgaatagcttgtcggaaaggtttaatgaaacgctttagttagattctctactgggccggtctccttggtggcccaaagtcaatcatttactcagataatatcacgaatcctacgaccctcatggactgggaaatccgccacgtcacagaagacgcttgttttaccacctgcaaggtaggtttcacaaaaaggtttcgtttcttgttaccaagttccacactttccgccgttctcactttgtaaaagtgcacaagtccttttagttttgtttttctgaactgagtgacgggtaggcttacgctaatttatggtgggccggtggcccaaactcaattactactcggataaaggccacagttcgtatccaacttgataagctttttcatatataattcaactgttcttgtctttgttgcacacagtactgcatagtagtaacagtcgaacataaaaagttaaacttcttttttaatgaaaattaatcgcacttgtatcatcatgtacaatgctaaaagtaatgattgaggatcttaacaaaagaaattgaattttctaacaaatctagacaattgaagcaagtgggtttagtggagccctagactcaaccaatggggttgtcttgtgtctagaatcatcttaactacatcttctacaaatgaatcaaaacaagaatagcaacaccctttcatcaggctactaccactactgctactgctgctgctgccaggtgtcatatgatggtgagtacacgtcactggtggcggaacaagatggacttcactgctctcgtgttcaagcccacaagctgccagtatcgtgtgtattgagcacgtggaaatctcgtcgaaagtggtttgacctgaataaagcagaggaagagtacccaaaacactacaatcagagggcagacaagagttgaatctataatgtaactggaaactggaaacaagactataacgggttaaaccaagagcgtgaagagagaattggattatgtgtacctaagtcgttttgactggacaagtttttgagatgggctttaactctttcttgcagtcgttctcctgccatggaagacattgtgtttggcatgtggctgtgtagacgttgttgattactaaccaagggatcaccctgagccagtccatgatggaatcctaaatcgataggtcgctcaccaagaaatgtattattagacaaacgtctgaatgcttcttcacttccaaattcatctaactttggagacaaaagctcagggtcatgggcagaaatcaatgaattgttgttgggtagtctttcctcagagattgcatacaacgatatccctgtttcttggctcgctacaggctgagatgggtcgattgttctgccatgacctatttgtgtagtcacgaaaccatcactcgatgttccaccagttctagcacccatattaataagtctatcaccgttgataatattttgtatgtgtctgtgaagcgtccttcttctggataatgtggttgcccctaagccggatggagaagaaccttgagcatcaccattaggaatccttggagaaaataggttctctccattgaaaaatggtgtacgtggggagactattaaagacacatcttgatattgccctgaaactacaagaggtgacggtctactgtaaaagccactacccctttgttgctcggatataatatgcgtttgggaactagctgatccaagtgcaacgggtctacaaccttcacagtaccactttccttcaggtactttcctcccgagaccaacacagtacgtatggtcagatgaatcacaaacatcacaaagcaacataagcccatcatcatcaccttggagacattccgtgcatattatattttcatagggatcgagataactccacaactcttcttcagtaggttgatagacctgcacacagtaaaatcccatataagaaattttatcacacaagaagtgacatgaaacacatcacaaccacaacataggttaacaaaagtcgataaggtctcatctatcatgcatctaaagcgtctaagtgagaacactgatgttactggcaactattatgtactgacattttaaaccgtgacaagaaggaatgtctattaggacctcaaatatggagtgttgaaggacatactggacgcatttggaaagaaaaccaaaaccagcattcatgaggaaaccagtataagtgatagatcaactaaagacactataggcgtaaaccaagaatagtcaaaacaaacctgatcacgttcaggtacaggtatcacaacttctctcaaatctactccaggtgtagatcatgcaggcttactgattgttatgaaccgctgcttgcagagtgggcagcgagattctactttcgaccactccattatgcaagtgaaacaaaagtaatggctacagcagtccaatgttcccttcaatctcagcatgtcttcctcagacagacaaatcccacaaacgttttttatcacatctcttttcactagctctaccttcttttcacctttcttcacaggagacttacgaagctgtggcaaatccttattgaccgtggtttgtcttatagatgatgcatggttcacactacttttcaacaaactaccggcttctcttatctgctctctttcctcctccgagattgtatactcatagtcggattctccagacgatgcaacgtctgaatctgatggaacggtacaccgacgccttggccttggccttgatgactttgtcttcgccttctttcttgcaggtaagcagtcatctacaaaatcatcatcatcttcatcaactcctttctttgtgtttctcacacgtctctttcttccccttgttaaacgggtttttgcaacagagcatttcttccttcttttacgcccttctccagatcttcgctttcgcttgtttcccttacaaaccttcagtgcatttttgttacatgcaatgatttcttcctcctcttcctcatctaatgagacatcttcatctgcggtaaaatcttcatcgccatcatcatcctcatcctcatcctcataatctccatcatcttccttttctgtctcgtgtgacacattgtcctgctcttccaatgccatcttcccgtcttcaccatcatgcaaagaatttgaatccacattttccacattcctctcttcctcttcatcaccatcctcctctggatagtctccatcttcatcctctatctcatagaaaactctccttcgctttcctaaacctatcctttggtgtttctctccatccaaagacccacttttcccaacagcattccttgaattccttatctcatcatcttcatcatccgcatcatcgagatccacatcctcgttgtcagacacaaccacctggttagtctttcttgacttacatcccgtgatttttcgattaccacgaggaccagtcttcacttttggccattcaacattcctcagcatcacaactgaga

SEQ ID NO: 15843 - DNA, 661 bp, Arabidopsis thaliana landsberg
gactgtcattgtaatgagtctgtttttccaacattagagggataaataaacagtaagaaaaagatatactttggaatgaattatcaatgtcttatcttgatcctcggactaaagagtgtgaattagaagtccaaaagttaattcatttacagagcttagcaaatcagttgccctatgcatttactgacccaaaagtgtgatcaaatcacatataccggttgcaaatgatccaataagaataaatatctcctaaggacaaaaacacgtttaaagcgtggttacctattggctcaaaaataaaaatccttaaaaaagaaaagggacagaaattggcataggtaaaatagaaaaaataattacaaatgaggaatctcccgaagagactttagacatgacacagaaagaaattcagttacctgacaattaagagatctcaactggttatgtcatgtctagaagaaaatagaactgaaagcaaatcgacgtcgatgatattttgcttgcaacatagcagttgatgttatggatgaggatcatgaaccaacatctattgaagagtgtacacaaagaagtgatttgccagaatggaatgaagcaatagatgcagaattaaaatttcttgcacagagagaagtgtttggaccagtagtctgtacacccg

SEQ ID NO: 15844 - DNA, 1019 bp, Arabidopsis thaliana landsberg
gaggcccaaaagtacacgattctaaaatacatactttgagttttacaaaagaacactgaaaaactactccgggttccctagcgttcaccgctccctctaatcgcctctaaggttacctgcaaaacaagtagaatcatgagtaatctagctttactcaatgagtttgggttcccaaggaaatgttagtctaaccccacccataatccccacaaacataacataaacaatcagactacgcagagaaggtagtaaacaacacataaaacaatcaagacatataatgttttcttaaagttttactagcgcctgatgcactgccttcctccacacaccgtgaacacccgagttataaccacaaaggcatataaccggaacatcaccttggctacaccgtcgtgtaaaagacccggcccttgggtagctggcccagtctcttctggtccttcgatccccatgatgcctattgcatctcatcaagcaaacctcacaaacgaacggaatcacaaggcaaggccagctacatcccacttgaccgtagcatgcttatggatcaacttggataactttcacaagctccacacactatgatactcaatcaacactatgaaacatgtggttcgttcttaacacacataatcatagtgttctcatactttaactatcgaatactagcgagcgttgtctagacaacgcaaccatccctctcaattgaatggtgcttcttgtaatataacgactcctttagggcaaatggtgattcggtcgcaacctctcctaggtattcgataacacaacctcaacaaactcaaagagaacatcaacaaaactaagagaaaggagaatcaagaacatgcaagaaagaaatcaaacatgcaagaaccaaaaccggaactcacaatcaccggcgaatcctcctaacttggtcgacgatctctaactcaagatctctctctctctcttaaattatactaagggttcggactatctctagctcgaacgctctctctctctctctctct

SEQ ID NO: 15845 - DNA, 1882 bp, Arabidopsis thaliana landsberg
  unsure (1)..(1882): unsure at all n locations
taaatgtcatgcaactaattgatcactctgtttttgtggaattcatttaaaaaaaaaacaaatttttttgtttttttctatgacttagatgatatgcagactcaaatgatattcacaaaaaaaagtcaaatacgtcttgaaccctcccccaaacttaaattacacagtcccttgtgtaatcaaaatttgtgaaagaattcaagataaacacagaaacaaaaacaaaagcggtatttacaaagggttttggtgtgttacctcagtagaatgtcctggagatgtagtcatccatatctgcttgagtgtacctcgcaagcatgaccggttcctgatgtggctccgccatctcttcgtcattttgctcgatcgcaaccccaacaggttgtggagcacgacgctcatgtgttctctggcccgacattatccgaccctttgcttgatgaatgtacatttctagcattcttcctcctgtgttccattggctcatgagacaagtgccttgcgggaacttgaggaacggtgtgggccctctgttaataggtgnaattgccttggcagagcaatgtcatggtggctggatgacatgtcttcaggcgggttgtcattgaagtcatgtcgggcgttttcacttctccttgcgattgagtggtttgggcaattccactaggagaccacttgatcacaccattgccatgttgcgatcgagtagtatgacattgtcgttgagaatgatgttgtcccaaaaccactagatcgcacactcgagcttttactctcgtcttgcgatagagtgattcatcaaaaatttgaaattttttatttgaacactcagttgcatccctgttgttgctccagctgttattcatttcctgagaatcaaaaacaaaaccaaaacaaatcaaaagtaacaaaaataaaaactatatacaaggataggcatgggacttcctcccaagtgagcttgttttaagtctctagcttgactcctcacactcattaggctcaaggagggtaatagagtagaattgacgtctcctctccttccttagtagatacaacatcaaattcagcatgctctcgtgacaagtctgtaagtgagtactcaatggccctttcttggtaagctcctttttcatcatcttgatagtcgtcttttctggactgttttgatgtgaattcacatccttcttttctaaccataggaataacttcatcatttgggacgtccttgatgtcgagtggagcttggttggctttcccatggagctctttgacttgatccttcaactctttcacattgtgtgttagctctattatagctttgtcgtgccattttgacctctccttgagttctaaccaatcatttgatgccctcacgcttgactctagctgtttggttgagcattctagtcgagtatcagttgagccttcctcgttcaatgtaacatcctctgtttctgacgcaatgtcacctttaaatatctctgatcctggtacttcgttgtgtgagtctaatgacatctcatagctcaaggtctcactggagagaaatccagtttcactacttttggttaaagtagtttgaaggtgatctctgtcaacaatctcctctagcagttcattacctagctgatccatttcctcaactaagaaggtttgtccttctattgttggcttcttcatagcgtccctgatgtcaaacttcattttgacatcctctcccagattaagattaatttttccctacttaacatctattactgctccaactgaagccaagaaaggtcttcctaagatcagaggatccttagatttttcatccatctcaagcacaacaaaatcagtaggcacctctactccattaatcattacttacacgtcc

SEQ ID NO: 15846 - DNA, 973 bp, Arabidopsis thaliana landsberg
ataaatttctgggtgtgacaggatttatgtggtaaagcatcgaccttttttcacatctctcttaggcttttctggtcaattgtacgtttggctcttccaagtaaaagacgtgtcaggattcagagaaattaataggctttttttttcttccatttctgcgtagttcttgattttgagcagcacaaagctcttttgatgcttttctctttatagataagacatagaatagcaagctggacactgtttagaccttctcctttaaaaaattgttctcctacatcaaaaatcttagattctttacctgctccatttgattttggatactaataccaaaaaaaaaaaaccactttattggtttaactctggcaggaagtcttggattaatggagctaatggtgtagtttttggattggtaatagctaatgctgctgtatttacaatgtggcgggttttaggcaaggacaatatgtggatggtgaagaattttatggtctgacctcatcaaattctaacaacttttttaaaaataaaaaatctacatgtattattaaccatatggtatttggacagttatcaaggtacagttttatgactggacgtatacacacgctgatcacttcgggtttcagtcatgttggagccactcatatcatcttgaatatgatggggctttgctacttcggagccagagtaagattttttccttgtttccatatattaattttcgtaaacgaaatgagaaatgctttcatttgtttcctatgaagtatgaaccggctacttacacttaatctggctcatctaaggaccgtccttagttcgtttaaaaagaaaaacttgctacctattgatctttatatcgaatcccatttgttcttagattgcaagaagctttgggccgcgctaccttttgaagctctactttgctggagcacttggtggctctgttttcttcttgagtagtcatgctctc

SEQ ID NO: 15847 - DNA, 503 bp, Arabidopsis thaliana landsberg
  unsure (1)..(503): unsure at all n locations
catattgaaacgagtctaggaagattcttggatccccacggttccagcgcgttctgctaagagtcttcttgacataagggatcctcatctctatgttaacgatttaattgatcaaaatacaaaaatgtggaaactggaccggctccaagccttgattgaccccattgatattccactcattttaggaatccgacctagtcgtacctatttaagtgatggatttagctagtcgtacactaaatctggaaattatactgtcaagtcaggatattaggccgcgcgagatttatgtcgtcctacttgtgacccccattttcagggacctcgtgtcttggcacttcaggcacatgtatgaaagcttaaaactacgcgaaagcttattcatttcgcgtggcaatgtatctccggctgtttagccacgtcttaacgactaacatatcgtcatatgggtacggataaagaatgtnctcgatgcggagcgtctgaggaatcaatcaaccatc

SEQ ID NO: 15848 - DNA, 760 bp, Arabidopsis thaliana landsberg
cctacttcgccagtgccaaccgccacgcaagacaagcctatggacaccaagccaataaagactatggaagaaccattggatttgggaaatcgagctgggtcgccaaggcaaacaccttgttcaccagtaacacctattgctcaggtctagattgcgagtaataaattacatacacaatctgagatacaaatattttacctagcttgtatgttttgatcccaggttatacccgactcttctattgttgctgtttcacctgcttattttgtgaaagagagaaccaatatacgccagccagtgccgggtaagcgtgttccaatacgttcttgcttcctcgacacaactaagtatagcgtagatcctaggatcagtgctctttttaagagcagaaccaaggaacctgcatacacacctctcccaaagttggatgatggagagttccagacatttaaaaagctgcttgaagatgatccacagaggtttgatccttgttaatctcagttttattagaaaaagacacaatgttttttaaatctaacatccaagctaaacagcgagtacactatctgcactgggcacacagtgactaacaaccacttcttggacattgcaacgaaggagacatgggtaaacactgaggtattatgagcaaaaactaataatatttcatgcgttcgtagctaaattgggtttggtgacatgacttactctattatgagttgcagcatatgcagctaattacaggaatgctgatgagaca

SEQ ID NO: 15849 - DNA, 1498 bp, Arabidopsis thaliana landsberg
atatattcgaattatagataaatttagttataaaaaataataactttataaaatagatatgactttattacttacacattaacacacacacaaaaatgaacatcaaaatcaacaaaagaccataatcatatattctgacaattttaaaaacaaaaactcatgcgtagcataagtttcatctagaataacaaattaactaataataacaaatatgtaggtacgtaattttataaatattgtatatataaagatcataagtttatatattatctatatgtggtgtaatcatatatatgaaaattggcaaactctcttcatatgaatgacacatcatcacttagcttttaatttgccacatatccacttaataattaatgtaagttaatggtttatagtgatttattatttaattgtatatattataaaattttaaataattaattgtataaataataattttcttttattttgtatgtctttttcttatattaaattatttaattgattttctcatactcttaaatatttttccctaatttttataattttaagttaaaatatgattaaataattgtatagtggattagctaatagttttcgtaggttattcttttttctatataatatattaaaaatggtgagaagtacttgagaactctagcatcaaattcttggactcaaatcctctagcattttgtcttatttgtttggtttaaggttaacacaaatgaaatttttttatgaaaataatgtttactgagaaaatattttgttagaaatctaaatgcaaaatgcaaaaacaaattgttgatttatggagcttagtatcaaataggaattttgtcttcttgcctattaaaaaatcaacctaaattttacatttaaatacttttaaattacgaaatataaagtgaaagtccgtacgtaatgcgggtactcatctaatttatataatactgtataacaaaggtgcctccattgtgacggtgataaacacatgaaccattgatagattgatctcggtgatgattttgtcaccagaatcgacgctcgaacggttattgacatgtggctaggatggagtccaacaaaaatttctataacaacaagcggtgatatattgggctctttttgagcctttaatgtttctggggctttatgtatagcccatgtaagatttggttatggttaataacttaataatatctactcttgtgacaaaccctaaatccaatctacagtctttttttttctttctttttttgtatgtacataattttttttaatttaatcctaatttacacataataattaaattaaccgacatttttttcttttgaatatcaagaggttctgggccaaagcttttaatcctccaggcccgaaacaagagcatgtaaactccagaaactatcagatttaattatacgcaatttatgcgattatgatgaacgaacccataaacaactccacgatgtgcaactctctccgtaacatt

SEQ ID NO: 15850 - DNA, 3714 bp, Arabidopsis thaliana landsberg
tgtccccaaacagatattgttttagtgcacgactttttgatttttagttaagtaaattaggaacaatctcttttacgttatgtctccaaatctaaactgatctccgaaacacttggtaaatggtttagctggaaatattctccttttcaaatttatttttagagggcaaaatatatataattcaattatcattagttttcaagtatcaccgatttctcttagttgagttattgctcaaatctgtttgtacacctttagtactatccgagttgataattcataatacactattaacggtataaattctcctatattcgtttgttacgaactaattattgctactaacacgtcattaactaatacatatatattccgatgtaattattatttcaatccataatataatgttaccgtggattatcttttatggataggttaataaattggtttctcttttataccataactaggtcagtacccgtgttacacacggtatccttggtatttgtatgtaaatatgaaattgtatataaatatgtagttgtatatcatgtattattggtatcaactaaatatatttagtctcgtcaaaccatattttatttattatatgtagtttcctcggtttgtagcatgaaaaatatatatatatagttggtatgtacgttcggaacgtaattgtatatttggtatatgtaggtttacacatagtagctttatacgttttcgtgtatgtcattaacatgtaagtgaattataaaatttgacaaataataattggaaaatgtctttcttcatatttcaaactcataatgtattaaaaaaataaacgaaagaaaaaagaatagactacataattctccactggtattaaaaaaacttgcattaagaaaatggaaaaacgaaatgctttaataattattccaacctgcaaatataaaaacgactaagttaacatgttatataattttgtacaatgatatttagtttataataatcaaaataaataaatcatacctgaagaaataatctactaaaggttttggaatatttctttgaaaacaacatttgttgtttcattcttctgttttcctttactgtctgtaataagaaccttcagtcctgcctttgatttcactctagacataacgacatataactgtgcatgtgagaaaacaggcttcggtaaatatataccaacattgcctaatgactggccttggctcttattgatcgtcatcgcaaatgcaacagataaaggaaactacctccttttcattttaaatggcaatctacgatccaaaggagttaggagcatcctgggaataatgaccagtttaccaattcctgtacctgttaatatacgtccttgcactagtttatctccaactcttacaatctgaagtcttgtaccattcatcaaacctccatgcggatcaatattacgcaacaacataactgggcaaccaacttttaaccgaagtaaatggttaggtaatccagaaatcttgattttattgagaaaatcaggcgtatatacggggtttttatctacacgtgtgtcagaaggatcaatagaatcagaacttcgataaatcctttcttcacctgcaaagagtagtagttcattgtcatctactctattataagtaacaaccgataaagttatatgtataattttgagtaatatccaaagttaattcactaacctgttagcttggaaagcatatgatcgttaattgagttaacatcatcattggtgggacacaaaatagctctatcttggaaaaactttggatctctctcttgaacaaaggttgtaccatagactgccttaatgattgattctatagggttgttcccttcaggtataagaatatcatctagtatttgtatctgagttactccgtcgttcggctcatttagttttccctcgccgactgcaaggatccatttcaaaaattcttcaatctcacgtgcctcatttatgtctatatcttggagaagcctcatgttcttcgtcaactttaaaactttgcaatgctgccaaagataagacgaattgagtgacgatttgacaatcagttccctaccggctgcagggatggcaggaagaatttgcctaaaatcacctttgaaaagaataacttttccaccaaacggcttatcttctggagtcgatagaatatcttttaaactcttatctaatgactcaaaacagtacttactcatcataggagcttcatcccaaatgatcaacttagttgctgttactaattcaacaagattagtaccacgttctatgttgcatgttgaggtctcatgaggagttagaggaataccaaacctagaatgtgcagttcggccaccttctaataacggagatgcaatgccactttatgcaacatttaaacaaatatctcctttagatcttatcgctacggataaaaccttctacaaaaaggtttttcatgttcctccaaaaccatataagaacaaaacacctcctttgtcattaaggacaacatccattatttcatcatataccttcttatgttccgcagttaacatctttaaccaattatcatgttttgttttcaatgactcacagttgtagttgcgctcatcgaggatcaactgattaaaggcaggttcatcgcctggttcaagctgaggcaacatcttatacctccaaagatctgttccatgcctttttaatattttttgcagctcttgtaaacataatcgaatcctgtcttcgtcaggcaatatgtattctacatataaattaatataagattgaatgtactaaaatatttctaaaaacatctataaaattgtatatttaatttaaaaataataatttaactaacctgcacgttctaactgatttcttagcttcctcttaaaatcttcagacagtatcttccaagtgtgttcccatataatggctggggaactcaagctttcggaaataagcattataacaaacaactttcaaacatagttagaagaacaccaaaaattagcctcctcaatacagtggatatattcttagtcatcattcagcaaacctacagcataacatgcatctctgtatgttgcatgaacaacaccctcgacggttttgatatcagtaaaactgactggtcctttttgttgttaatcaggatccgaagatgatatgcatcatctatccctgcaggtacataatttattcttctaacagcaaaacttggcttcaaccttctgcgaaactccttatctttcccattccacgtatagaaattaggtatttgttcatataaaaattttgctgcttcaggataacgcttattaagctccaaccatgccataaactgtgtgtcatcatgttcactttatacaaaacagattcagtagtctcaccgtccttgacataaaaacaggctgcttgcctttctcattgaacataagtttagttactgatgtttgtcggtaatctataggatagcctttaatcgtccacatcgcttcacatgcagatacgtatcggtaaaacgattttttgagttatttttcattaagtgtcatcttaaaaatagtctcctaagtatgtttaccataaactgaaataaaataatgaaaaatacctgcaatcaaaataatcatgaacttgatttcgttcttgtggatctttatttgtttctcctacattgttttgctcgggggggg

SEQ ID NO: 15851 - DNA, 457 bp, Arabidopsis thaliana landsberg
attttgtggtttaatgtcgaaatgtactatccttgttttgcagctatggtgcaggtactctttaccttgagcaactcctaaagcaattctatatagtgccgtccaatccatattcacggaggtcttgcctaatataaacttatcaagtgacccattttccaaaaactcatatataattgcccttttggaaccttcagagcagaaaccaagcaaggaaacaatgttgagatgagaagttctgctcatggtcgcaacttcattgatgaagtcttcaccattaccttttgtgtctttcaagaccttcaccgcaaccacccggccatcactaagtgttcctttataaacaattccaaatcctcctctcccaacaacttccgcaaatgactttgtaattctcttcacttgtgcataagtatagtgttctagtggaataagagccttcagcttcttgtgtctc

SEQ ID NO: 15852 - DNA, 3665 bp, Arabidopsis thaliana landsberg
caggtcgactctagaggatccgctctacatgtttacgtggcggatgattattgtatgagtgataataatcaacgtggcaatataagggagtgtgataaaattacgtcattaccctcatccattgtttcgtcttcttccctgagaaacactgagaaactggagaaaagaaagaatgagagtctcaggtcagagtatcatagccgtatctctattcacactctcactctacatccatcgtgttcaagcccgtcccttcgttctcgttctctccaacgaagatctcaacggcgggtttgatgataacggcgcctacgaatcctccgatttcgatgagtttggtgaatccgaacccaaatccgaagaggagcttgatcccggttcatggcgtcgaatcttcgagacaaatgattccaccgtccacgcctctgcgtcgccgcagtattactccggactccacaaaattctctcggctgcgagtgaaggaaacactacattgatggaggaagcggtttcagagatagattcgtctgcctcgtcaggagatccacacgcacaatcagtgatggggttcgtatacgggattgggatgatgcgtgagacgagccgaagcaaatcgattttgcatcatcatttcgcggctgcgggaggaaatatgcagtctaaaatggcacttgcttttagatatctaagacaaaatgtaagcaagcaacactgaacatttcaattggaacttatctaattttgaagttttttggtttcttgtgatccttttcacagatgtatgataaagctgttgagttatatgctgaactagcagagacagcagtgaatagctttttgatatccaaggattctccaatggctgagccagttagaatccacattggaacagaggagaataaagatgcactaaggaagtcacgaggggaggaagatgaggattttcagatattggaataccaggcagagaaagggaattctgtagcaatgcacaaaattagactgttttattactttggtttgagaggattaaggcgtgatcacgctaaggcgttgtattggttttcgaaggcgggagagaaaggagagcctatgtcaatggaacttttaggggagatttatgctagaggagctggtgttgagagagattatgataaggcacgtgaatgtcttacacttgcggtaaaacaaggtctctattcggcgtttaatggccttggttacttgtatgtcaaaggctatggagtagataagagaaactacactaaggtaacttttgcttcatacttactaggcttgcttctttatctgacttgaagaatttagttttacttagaaacaatgatgatggaattgagacatgggatagatttttgactgtatgtaaaacattctaaattagtcttaacaattaaagtaccaaactgaagcacatctcatctttagtggtgatcaggacatataaagagtcgcttagtggcactctgaaaccatcgtagatgcagtttttgttttgacttttccttcaatatattttatgacctaaagatatcccgttgatatttcccttcaagtgcaggcgagagaatactttgagatggctgctaataatgaagatcctagcgggcattataaccttggagtgttgtatcttaaaggcattggagtcaagaaggatgtgaggcatgcaaccaaatatttctttgttgctgccaatgctggtcaaccaaaggctttttatcaactcgccaagatgttccatacaggcgttggacttacaaagaacttggaaatggtaactatcttccgtaccatgaatgtcatatacaaatagtttttatatctatgcagttctgttaaaatgaaactccaacttttgttaacttttaaacttcagaagattaattgactggagctcattggcaatatttcaagattcttgcacaatcttacaagaattttctttttactatttgaggttggggtggtgtaatttgctaaaacgtataaccaattacagaaatctctgttaagttttcactgtgtcatgcttttatttctatttccatcaatttaaggtgtgtttgtagttttgctctgagcactatgaatacttcattgatggattttgtacttcaaattccttgttgtaggcgacaactttttataagctagtagcagaaagaggaccatggagttctctctctagatgggctcttgaagcttacttgaaaggtgatgtgggaaaggcttttatattgtattcgagaatgtcagagctcggttatgaagtagcacaaagtaatgctgcctggatcgtcgataaatacggggaaagaagcatgtgcatgggagtgtatgggttttgcacagataaggagaggcacgatcgggctcattctttgtggtggcgtgcctctgaacagggaaacgaacatgctgcattgcttattggagatgcatattactacggtcgggtaagtctacttacgcttgaagtttatgaattgtgaacatacggacaatggatataattgtcacttatctcatcccattcacatttgatttttccaagagaacatatttctcattcatgaaatctagacgttaactgattctatgaggctcatactcatgttcacagggtacagagagggatttcgtgcgtgcagcagaggcgtacatgtatgctaaatctcaatcaaatgcgcaagcaatgttcaacctcggttacatgcatgagcatggagaaggtcttccttttgatctccatcatgctaaacgttactacgatcaggccctccagagcgatactgctgccaaattgcccgtcacgcttgctcttgcgagtgtatgggtccgcagaaactatgctgatactgccctggtgagagagagggaaggagagtgatgatttatctgttaatggaattgtccgagtgaaaatggatgaccaaggtcacgttttatggatgcaggtgcaagtactgaattccttaccagaagtgcatcaaaaggtggtggaatgggtagagaatgggatgttggaagaaggtaatgcgaccatactaactcttttcctttgtctaataaccgttatatatctccgggggagacaacgtagacaagtggttttggatcccgttggtgctaacgtggcacagcccctcgctgccccagtagcatttccccagtaatggctgaaccagatgaatcaagagagcacacaatcaccagagagcccagaaattttctgtacaggttccaacttagttccatactcatgacacacttacttaaccatagcagagtgtaaggagaggcgagaaactttcaagttttgcccatttttattcccttatttagtttaaagcaatagctatatcagaactgaactgtaggtttctctgtagagcatttcaaaattacatttacccgcttgtaatgaagttttgagagtagaataatggtaatggaacatatattatgacaatttgaagtgagagtaatgaagaatacctcaagaattttttcaggtctgttttaaaaagccggtattttataagatcacacaaattctttccataacttgtggatttaattagttcggtgaaacttatgtttaaactttaatccctgtattattattttacccgaatgaaagc

SEQ ID NO: 15853 - DNA, 579 bp, Arabidopsis thaliana landsberg
aatcctaaatgcaagcactctatatacaatcctaaaatgatatgcaatctacattacactttgtttttgtgaaatcattttcagaaaaaatttcaaatttttatggtttttttttatgccttagatgatgcaaaatttgaaataagaaaagagaacacaaagttaaacatgtcttgaaccctcccccaaacttaaattacacagtcccttgtgtaataaaaatctgaaagagaattcaagaccaaaacacaaaacacacaaagaaaaataaaaagatgctatggtatatacaatggttgaggtggtgttacctcagtgatcaggtgaagtaggaggagacgaaatcgtccatactctcctttgtgtaactccaaggaacgggttgtgctgaacttggattcgctggatgctcgattctttgctcgggttgttgatcgagtggctcctcaagtggtgcagtagagtggcttgctcaagcgtcttatttccttgttcttcttcgctttttcaacgtgctcctctttgccttggtagtgaaggagcagcacggtgttcccttggctcatatgatgactgtct

SEQ ID NO: 15854 - DNA, 4767 bp, Arabidopsis thaliana landsberg
gggaagcaaaaatgtttgggtttatggtggagcgattgggggaaaactggtggagaaggagagaaatgaaagtgttggctcaaataaaggtactagggttttcgctatgtgtgctctcttcttctaacgatgccgttttggattaatcctgtaacgctttttcttaattgcgttacttttgtactccagtatgggccgaagaagggaagctgtttcagaattgtggccactaaacatttacccttaaccgggcccatataagcccacgtcaagtggcgcttatacgctctccgtaagagagccaacatttggtatgtaatgttgcaaattattcttcaagacaataaattcaaatataattcaatattgtccaaatatagtgatgtacttcagttgtgcacatagaaactccactaaaccaacttttagatagatgcattcacaaattttcaacaatgtcgcgaaagtctaatccatcaccagattctaacattttaattattatatttaactatacatactcaaatcagcatgagtcaaacgtgtacaatagcccaagcatataataagaccaaagtcaaactcaaataaatgtctccaaactcaaaacttgaaaaagacctaattattacatggtagatatgactttgtcgacaagtaaaccaactaatcctcgaagctaccttctcttcccagttattatgtgtgatcgatttataaatctcttcttctaataacacctatatttttcttatgatgtgaataaatataaaacttttaactttaaaacatatttatccgaaatattgcacttagatttcaaatagataaataatagtactatctaactgatattgaaaagacctaacacggaaaacagttttataaaaaatcccaaatgtgggtaattatcttgatttcttgggggaaacagaaaatggattaagattaatcggagtcgtgtcaagcagctcgttaataactgtagcaagttgactgagtaagcatcaacgtgtcatctccgtaaagcccattatttctagtctcgccgcgtcttctcttccacgtagcacttcactttttctctccttttgtttcctttggaacacaaacgtttctatttataggaataattacgtcgtccgtatctgtgtcggaacatagatccaaattaaaagcaacttacttaattacatatcgttcgtgtttttttcttcaaaaaatggcgtcaaagcaactgagcagagaagagcttgatgagaaggcgaagcaaggagagaccgtcgtcccaggtggcaccggtggccacagcctcgaagctcaagagcatcttgctgaaggtattgccgtaaattacaacttttccacactctttttattttctttagttcgtaagtaatggttttataaggctagaaacattagatcttaatatcttaagataagattaatctacttattacgaacctaaagtttactctatgatctccatgtttcatggaatgcatgtatgtacacttgttaggaaggagcaagggagggcagacgaggaaggagcagctaggacatgaaggttatcaggagatcggtcacaaaggtggagaggcgaggaaggagcagttagggcacgagggttatcaggagatgggtcacaaaggtggagaggcgaggaaggagcagctagggcacgagggttatcaggagatgggacacaaaggaggagaggcgaggaaggagcagctagggcacgagggttataaggagatgggacgtaaaggaggactcagtacgatggaaaaatctggtggagagcgtgcggaggaagaagggattgagatcgatgagtcaaagttcaccaacaagtgatagtagttacgagctactagtgtccgctgcaacagtctgttatatatcatctaataagtaacctgcttgtaggttccgtgtttggcagcgtggattttaactagggtctaatgtagcgcgtttaggttttttgtgttttatatgtgtgtgatataactatgtatggcttgtactaacggcagtgttgtaccgttcaaatggtatgcggttatgttatgtaatgcggttgccggttggttttacttcgtgtcttacttgtgatagtatgttgtgtccaacaacgtgagacttgatatgttaagattgcagcatatcaaatggctgtagaatagaaaaaaatcaggtagtaataacacagtttcaagttgttaaataacatatgtatagtctagtctttgtagtttctcaaattaattgtatgaagttagttgggttactagctagttgttagatttagattataaaaagtttgaggaagtatcatttttgtatattactgtttttatgtggatacatgtttagaatcaatacaaaaagtgatgaaaatagtttaaatccactacagaaaacaaaaacattctgaaagcagagaagtgacagaactaacataaaccccaatcctcgatatgagcaggaaatgcaaaaatggagcgcaaatacggtaacatcaattacaatttctcagccgttttgctaaattgatacaacaggagttgtttctagtaataacggtacatacattttacaaaatcttttaaactagttgatgccatcacttgcccacatttgatgtgtcaacacctctgctttcgacaaaaccccatcaaaatacgcctttttcagtgttgcgatgctaatgccgttacaaatattccgagcaccaagaatggctgcgcgcttgcctgtaatcaagatgagtgtttcaagcaacttctgattaagagacctctcaaagatatttcaaaagaacacaaacatgtgtactaagttgacttacctggtacttgacgtcgtatttgacagggtccttgagaaagtatttaaactgcagtttatagaagcgagtgtagcaatcagacgagtgacaagaatttgattaattataatgtgagactgttaacgtctttacctggaacacaatctgaggaatgatcaaagcaaccaacgccaacgcataataaggtttcccagatgctaatagatatcctgcaaccaaaatagacatatactaatgatgatctctacctttgatttggttctataacaatgattgtgtaactcatccactagtaaaagtacaaatgaagatataagttctgttatttcatgacactgttgaaaatacttgttttagaagcatgaaatgaaaatccatcaatcacactaatgaaacataaaagtagatgcctcctcttcattagctcatttcattagaatgtacttttatgttttgcctttgttgattcagcttcattaatttgtgctttaccattggtgaatatccagttgataagatcaaggaaaagaaatagaagccacagctgcacaaaaacagtggatagtacataccggcaacagaaagctgagtaatgtctatagcaccaacgcatatccattttgcagtttcggtgccaaaagctactgggagagactgaagtcctaatgctctatctgcttcaacacttttgaagtccgtaacaatggcttttcctaactgcattatcacaaaggtacaacatgaagcaagagcatatttcaactgataacgaaaaaagcaacataaaaggtttgccaaaagagtaccccagctatgctgtacaagagtgttagaacaacaacatctggcgtaagagtgccaaacaatgcttggccagcccacctatcagtcaagtgagcaagaaacaaatcaatgagatgagaacaacgccatatattattgatacacgagatatcttaccatggcaaactaatatagcttgctccaagtgcaaaatttccaacccatccattttgttttagctgcaatgagatcagttcagatatcgatattcaaaactccaaaacttggatggagtgtcttatcactagagagtggaagttaggaataaaacttaccttaagaggtggagcagagtatatataagatagcaatgatcctcccaaagcaagatagaagacagtgggagtggtatgccctgcctgataagggaagattttagcaaatctgatgtgccctttaactgtactagttaatgtcagaagggccaacttacccacacatctaatattccagcaataccaagacctcccaataatagcacccagacttgtgtaataacctgcattttaaggagtaaggagaaatcagaatcacaaaagagataaaagctcacaatgttctgtctcagttacctctggctctgatattgctccagatggaattggacgatatggctcattaattgcgtcgatatctctatcataccagtcgttgattgtctggaaatcgacaagtctaggttattgtagcaccaagcaaatgcactagaataagaacaagtcagctttttgttgtgtaaaaccagacctgtgtatagccagtaagacaaggaccagacatcatcatgcaaagaatcgacttagcaacatcctctggggtccaatgaaagttccctgccagaagaaacaattggaaggaaaatgaaaaaactttctgtacagtattgcatgatccaaaagaggttcgtatgattacctgaagcagcagcaccacagacgactccccaaaccagtggaggccaagtgactggttttgtaagctgaagacgaatcttccatttattctgaatacagaatataacaacaaactctttttagctaacaaacaacattttcacatca

SEQ ID NO: 15855 - DNA, 3870 bp, Arabidopsis thaliana landsberg
gcttcatttactggtaatgaatagatacagaacatttttctttgtttttttgaatctgttaaatgcagactatttcttgataatgatgatgtttgattcctgcaggtctttctccagatgaactttggaaacgacgtaactcgatcgaaacaatcagtgagctattgcgtctattagacatcaacagggagcattctgaaactgctctcgttccttacacaatgaatagccagattgtactctttggtggtggcgctggagcaattgtgcctgtaactcctgttaaaaaaccacgcccacgaccaaaggttgatctagacgatgagacagacagagtgtggaaactgctattggagaatattaatagcgaaggtgttgacggatcagacgagcagaaggcgaaatggtgggaggaagaacgtaatgtgtttcgaggacgagctgactcatttattgcaaggatgcaccttatacaaggttatacaccacacttgtccttttatgtgtttctgttctaaccacatggtttcaattagtatgtctcagctactgcttcttgttatggtctttggtttctaacaggggatcgacgttttacgccttggaagggatccgtcgtggattctgttgttggagtatttctcactcaaaatgtttcagaccatctctcaaggtacaagctcttacataattctatgtcaaactaaatccaagacagcaaaaagtcacaaaactaacttgctttgatgttttttgctccttgtagttcggctttcatgtcgttggcttcccagttccctgtcccttttgtaccgagcagtaactttgacgctggaacaagctcgatgccttctattcaaataacgtacttggactcagaggaaacgatgtcaagcccacccgatcacaatcacagttctgttactttgaaaaatacacagcctgatgaggagaaggattatgtacctagcaatgaaacctccagaagcagtagtgagattgccatctcagcccatgaatcagttgacaaaaccacggattcaaaggagtatgttgattcagatcgaaaaggctcaagtgtagaggttgataagacggatgagaagtgtcgtgtcctgaacctgtttccatctgaagattctgcacttacatgtcaacattcgatggtgtctgatgctcctcaaaatacagagagagcaggatcaagctcagagatcgacttagaaggagagtatcgtacttcctttatgaagctcctacagggggtacaagtctctctagaagattccaatcaagtatcaccaaatatgtctccgggtgattgtagctcagaaattaagggtttccagtcaatgaaagagcccacaaaatcctctgttgatagtagtgaacctggttgttgctctcagcaagatggggatgttttgagttgtcagaaacctaccttaaaagaaaaagggaaaaaggttttgaaggaggaaaaaaaagcgtttgactgggattgtttaagaagagaagcccaagctagagcaggaattagagaaaaaacaagaagtacaatggacaccgtggattggaaggcaatacgagcagcagatgttaaggaagttgctgaaacaatcaagagtcgcgggatgaaccataaacttgcagaacgtatacaggtaaaaatttagtggctaaatttcgtgataacattcattttaagtatttgactctgaacatgaaaatcatgcagggcttccttgatcgactggtaaatgaccatggaagtatcgatcttgaatggttgagagatgttccaccagataaagcaaagtaagtttgaaagacgaagcattttatttcttctttattaacctatacaaagattactactttggcagttttagtgacttaataatgaattatgtactctcgtatattaaaaaaccctgcagagaatatcttctgagctttaacggattgggactgaaaagtgtggagtgtgtgcggcttctaacactgcaccatcttgcctttccagtaagcaaggatcaaacttttgtttctgtccctataaaaagtgaattatatgatgcatgaacttaatttattgacaggttgatacaaatgttgggcgcatagccgtcagacttggatgggtgccccttcagccgctcccagagtcacttcagttgcatcttctggaaatgtaagcacttttcaaaatggtcctacttggaaattgtaatttgttacttaatacatctgaggtttggtttgtctaggtatcctatgcttgaatctattcaaaagtatctttggccccgtctctgcaaactcgaccaaaaaacattgtaagaatgatgtttatcactaactttttttttttcatgcctcagtctaatacacttattcattagtttaataccctattatctcacaggtatgagttgcactaccagatgattacttttggaaaggtatgtattaaagaaatacatatatacgtatgtcaaaatcagctcacatgatgaggtttgtaatctgcttgattattgtatcaggtcttttgcacaaagagcaaacctaattgcaatgcatgtccgatgaaaggagaatgcagacattttgccagtgcgtttgcaaggtgctacaacatgttctcttaaacctttagtaccactatgactctatgaggaaagtccttgttaaaatataacccagttaaatgagaattggtctgtatctaaacgaagctctgaatcatcattacagaaaatttagtaacattcatttgttttacagtgcaaggcttgctttaccaagtacagagaaaggtatggggacacctgataaaaaccctttgcctctacacctgccagagccattccagagagagcaagggtctgaagtagtacagcactcagaaccagcaaaaaaggtcacatgttgtgaaccaatcatcgaagagcctgcttcaccggagccagaaaccgcagaagtatcaatagctgacatagaggaggcgttttttgaggatccagaagaaattcctaccatcaggctaaacatggatgcatttaccagtaacttgaagaagataatggaacacaacaaggaacttcaagacggaaacatgtccagcgctttagttgcacttactgctgaaactgcttctcttccaatgcctaagctcaagaatatcagccagttaaggacagaacaccgagtgtaagaatccatttttctctgtttttcttcgttcttaggttaaaaatgaaatcagaaacacatttttcaaaattattaaagcttgaacagagtagaatatttaagtgattgaccaagcatgaactcgtaagttggaaagcagacaaacttcccaataattacaggctatgccataacttgtttcttttcccgtatcttgcagttacgaacttccagacgagcatcctcttctagctcaggtatgtgagctaactggataaggacacatgccgtatagagtgctgtctatattgtaaaatctgactagctgtttgtgatttcttgtggcagttggaaaagagagaacctgatgatccatgttcttatttgcttgctatatggacgccaggtaatttaatgatttgcatatcttttaatcatgaaatcaaatcggtatctttaatcgatgtgttatctcaacaggtgagacggctgattctattcaaccgtctgttagtacgtgcatattccaagcaaatggtatgctgtgtgacgaggagacttgtttctcctgcaacagcatcaaggagactagatctcaaattgtgagagggacaattttggtagtagttgcatcaatctccttatgcggcttactacacttatgttttctac

SEQ ID NO: 15856 - DNA, 261 bp, Arabidopsis thaliana landsberg
ccaaaacaaatcgcttccggtgtccagagccaccaggaaccaagtggccggtgttcccacagagacattggcgtagtgcaagctgaagtcacctggatataccaatcagattcaataagcaataaagcatgaaacgaattgttatgtataaggatgagaagaggcattacaatcccagaaggtcgattgaaatcgtgcgatttccccgcatgaaagtaataggggtttcttcgttgttggaggcaagacctcgacctctga

SEQ ID NO: 15857 - DNA, 3669 bp, Arabidopsis thaliana landsberg
gcctcttgtctgctatgactaaacagagagatgatctttgtgtaggatggtgagttcggatcccatttcttgatgattgattccgcggcctcaacggtttcctccatcatcgactgagaaaaagtctggttgagaggagaagccgggagagaagtgaatgaaggaaaagaagaaaggagtgatttaggagaagaggtagagaaatgaacagactttgtttttttcgccattgataaggttttactacttactactcttctttctgaatatgtttaatggagtcacttgtgtcttctagtctcttgattgtctttgtaaggtacactttaacattatatagagagatagtttctcaatgtatgaaaccaatggccaatacaaagttttgactgactttctctattcatgcaagtttttaatattcaatatataagtaatgtttcatgtagtttcatactggtgtaattgttgaccttatacattagttttcttttgtgtcttaatcatttcgattcttaatacttcaaaattttcatcaagtcattagatggaagaatatattatagttatagtggctttgagtctattgacttagcaagaatttcgaaattccggtgatttatgtttatcttaagtaggatatgatgtagatgattgacggttagagtgttactaaattatgtggtgttgaacaattcaaatgttttttttacttggaaatattgaaaccatcattatatataaactattaagctattgtttgaccaacaagatcaaagatacgcactacctcagatattatgtattttacacatgtatatatataatgacacgatgacaaggtttgaaaatgaaatctacgcatacataaatatacaaatattttgcagacacgagttcattgaaaaagaaaactgtttcttgctcaccaaagtcaattgtgtatcgatgtaagcaagttctgcaataacgctgaccagcaataagctattctacgtatagcaacgaacacacacttcataaccaaacctgaccaaactaagtgcatagaaaaagttgttatgtttgaaaaatgcaaaggtttggtcacttggatttcggctcatatgcttatctgtgtgacgaatttgaagaatattcatcctatgaattgaattaattcatttgttttcaaagttacagaaccaaaagaactaaaagggaacattcaaatgaatagagagtgtgtgaaaacaatttggcacaagagattttgcaaaagtcaactcttgccctataagacaagtaatcataaagttaaatttctcaaaattttgtctttttctcacaaataaataataaaacaactgatgtttagctatgttcaaagttcaaacacgattacttaacaaaactacgatagtctctgatatattgcggatatatatcgccagcccccacctcttcatcttggtctaacaaattttagtgaccaacaaagggattcacacaagaggacatattttggtgtatcaattcttcttcttctttttggtcaaaatggttatatatcaattcttcaaaatctcagattttttacctactgattctctattggtgtgtaggtttcatatctgtcaactttatcttgcaaatcaccgcatcactttcgtttctttcaatatgattttttctcgggtcaaacatatgtacgcaattcaaagttttctaagaaagaatcacattggctagagaccactggttgagtaatatgctagagagagtcatgtcgctgcgatccagttgggtttagttgataagcagtgaactgaaggcaagatcgagttggagtgaagagtaatgtatagagatcactaccctaacaagctaaccctcaactgagtaatatagattaagatgctatgatctaataatataacaatactgttttcctgaatcaatctttcattaagatgagctttcaatatctttaacaaggaaggaaaacaaagcaaaaactcacacaagagctcaaattcaaacacaaaattgatgtgatcaagataaaagcttacaccttaatagcatacttccttattggaaagtacatttctttcttcttctccctctcggtcttcaatgatgcctatacaaatcagccagcaatgattcattcagtacaataaaacacaggatttgttcatcacttctcaatatcaatctgaatcacatacctggtgcttagtgagtctcctcctgatagctctagtcttcttaggacgaagatcaagaggcaaaagcttcttgttcttgtatgcctctctcaaagcagacttttgtttctgtgagatcacagtcaacacctgagcaatcgacttcctcaccaccttgctgaaatcaacataaagcataacccatttgagatcaatgtgattaaaaaccagtgaccgaacaatccaacagtaaaatcactaagccaagtaagctactttatctatctatagaggataataataggacctaggatacaaaaattacaaaagtgaaagcaagactaaacaacttgcacaacataagcagtacttaggtaataatatatgtctatatttaacaacacataaacataattaaacctagctaaatatgattactacataaccctaattaatcactaacaccagcaagatcataaacaaagctatgtagaattcagaatccaaaaaaaaaaaaagagttaaccaatatcagaaaaatgtaacatttgatcacacaaagtgtatatagaggaaacacatacatcttagagagcttattaggagcacctccagtgaccttagcgacacgaaggagagcaagctctgccttgaattccttcaactgacccgaaagatcagcttttgatttctccctcagctcatgaaccttgattctcgctgttcagattccatttcacaatattaaatcaaatctcataaccaaaacgtacgaaattgtatgttaacagaggaaaaagtttggcttacccattgcgtcttcgagctctctctagcttccctttactcttttggatggtgttgttataagagattagaaaccctagagaaaaatgaagaagaagacggctaagagttaataatcagattttaggttatatttgggctttgactgtgagtataaaacccaacacacatctaatgggctgagttttatatcttatgggcccaggattataaaatcctactagtgaaatcttctaccaaaatcatattaatgcaaaaaaaatactaaaagtgaaaagagaattgtataagtcgagaaattagacacgcggggattgaactgttattttttgtttttgaaggagaattatttgatttcaaatataataataacataatttagcttttcagattaaatttcttctcttttctttttctttttgacatgtctaattagattgtgaatgaaggagtaatcttaaaagaagttttgattaaagacgttatcgtaatcaataatgtgatggaaaagtgtaattatgagtcgcgtaatgaaccaaccatacatttgtcaacaagttgatacaaagacataaatgcatgtttatccatccccaagttcaattttcaaagactaaattatgagcatttcataatgactcaatttgccatttggtcaaatgaaaaaacc

SEQ ID NO: 15858 - DNA, 1802 bp, Arabidopsis thaliana landsberg
aatgagacaatggcatattgactcaaagaataaagtttatcactttagaatggttagatgcttacgcgtaccactgagagttgctctggagtttcacggcatgagtgataagaaacaattccatgatctttgttaaactgagtgaactgtaactccttagcattatctgatctaacacctttaacctttgacgcgtattgtttctcaacttgagtgatgaacgcagggaagtactaaaaacatcatttttgttctttagcagataaatccaagttgctctggagtgatcatcaactaaagtcaagaagtacttaaaaccttcaacagtttccactgaaaatggcccccaaatgtctatatgtaataactcaagagttgaattacaaatgttgttttcagaagggaaagacagcttcttctgtttagctaagtgacaagtatgacaaaaagcattcttcttattcttatgacgagtagttccaagaacttctgatataacatccagtcttgagaaagatggatgaccgagtctcttgtgccacataccaatgtccaccactgcattcacagaaacggatggagattctgtatctaacacatagagattcataatacggtgacccttaccaatcatcaaccccctgataggatcctgtatttcacaacaagatggatcaaaaaccactcgtgaaccaatatcagaagtcaatgaactgatactgatgagatttagtcgaaactcaggtataaataagacattctgaagaagaatatctttatttaaccgaaccaatccaactccactaattctcactttaggaccagtaggcaagttcacaaaattcaccacagaagagtccagagaaacaaacagatttctgtcatggcacacatggtgagtagcaccagaatcaatcacccatgtgttacttgacagtgtgtgttgagagactgccagaatgccaacaaaagaataagtggagttatagaaagagataccagtatgatccagagctgactgagaagtgctagcaccaagaggagattgagttgtcagttgagatgtgaagtgagcaatgatattctggagctgatcattagataaagttccctgtaaacgtgcactgttgccttgaggagcaggtgaagcagacagggtaacttgagcagccactggagacggtttctgagctttattagtgggtttccctttaggtgtgaagcccggagggaatccatgtttcttgtaacacctttcagcaatatgaccaaccctgttgcagtaggaacaaattggccttcccttgtttggaccattttggacatacattacatcaggaaccacagaatcatcatgagtaggtgttgcttgagagatcagaaaacctgagggtggagtagcaacagtgaatactttctgactgtcatcttgatccagaatattatagacttcaaccagtgatggcaaaactttcttagcaatgatctgacgacgaacaatcgcataagattcattcaagccagctaaaaacttcacagtcttagctctctctgccttcagttgcagacgagcagattttccacaaacacaaggatcatcaggttcttctgagctgtccagatggttccacaatgtcttcaaacgagtatagtattcagataaagtcatagaaccctgacgaagatcctgaatctcctgagtaaggttgtaggtgcgaggtaagttagtaagatgaaatcgaccgcagagatcacgccaaatatcagaagcatcatccattcgcaagatgctacgatagatc

SEQ ID NO: 15859 - DNA, 538 bp, Arabidopsis thaliana landsberg
gggcctaccgtttaaccaactaccgagctatatcagagattgttgtgcttgctttgtaaatattggttctagaataacaggtagttgatgctaacgctttctgctccagtatctctgtttttttcctgtgtaacacgccaatttgggtatgacacaggatgcgaaggggctccccttcttcctgtaatgtttgtcatgatgaacatggcttataacatctctcttctacgcctcatcaagatttcatctgcagttgtgtcgtctctggcatccaccgtttcaggtacaaaactttgtctcattgtagccttgccatgctttcatggaaacctacttcttcagcgaattagtaattaccaatgatataccatcatcatctatgtgatatcttataagtcaacaatgctgtaccaatcctataaacaaccaaactttttttggtcataaattttggtggaatggcataggagttagcatcatttataagcagaagagaaacatttgtaatatacagaaccttgtttggctttgtcgatgc

SEQ ID NO: 15860 - DNA, 957 bp, Arabidopsis thaliana landsberg
cctcatggttgcactgttatcccgggtggtctctcaacgaacaggcccttacggagaggtactcaggaaacagcctgagccgcctagagtatcacaagatcatcaatatcatcaggataacagtatcgtatcataaatagtcacatcaagttcattgattaggttgaggcaatagcaaaacgctaactataataacccaacaggtcatcaaggataaggtacagtataaagctagtcaatccttaggtttcaattaagtaatgcgggaaagtgaattataagtgaataggacataatgggtcagaggacacttgccttcaccaaactgctgatcagggacttcttctgtaacttcctcgagaaacacagactgctcgttgtctacgtaaagtaatcattcacactatgcacttgggagaataacaaacaaaaacaatataccaaacatatgcagcagagaggggccacaagttcataacaagaaagggataggcactctaaagttccctaggtctgggggtagaggactacacaaagtggttcattatccactaatcaggtctaagttagtggtgggattaaataattacctggtttaagttcctaaacctaggtgtttaagtccctaaacttaagtaatccaacttttattaaagtctactcatttccaattatcttaaataaggtttcaatagtcttaatcctatcctagtgattacctattaattaatacatggacaccgcagggaaacattgcataaacagatagataattataggatgaacatctagctatttgacccaccttttgggggggttcatttgccaaagtgtaggaattttaccagtttaggggttaaaattataccgtaaggacttattttaaattaaataaaagggccagggacttaactgcgagacaccagggatggcgggcgcaatttccagaaaacaggg

SEQ ID NO: 15861 - DNA, 1018 bp, Arabidopsis thaliana landsberg
cttttgttatttttgtttaaagcctaaattctatactttaagcctcaaattcttaaaataagctagaatagttagtaataacccactggaatttttacagaatttttggaaatttttaaaaccctgttgtagttcaaacctaccctagaaaccctaaatgggaattaaggaaaggaaaatgaataatgtgaatcaaggttatcctaaaacctttgtaatctgtccactaaaatgtctcaaggtaacaccaatccactaggttatcctaaaagaaaacctaagctaaaagggcataagtctatggatatatatgtatgtaccactaggagccccgcgtgactaagaaaaccctaagttacttcctaaacttagtttctttagcttaatgttcttaaatcttgcataatcatgacatacatgttcattgcatttcgatagactgtaatcttgctgacggagagtacatcctcgtgccggagcaaggagctgcccaggagattgcccagacccagcaccagagcctgcaccagaggacctgcctgccactgctttggaaggcaagccccggttttatgcataactgtttatatatgctactttactatacttaatgtttgtaggcttgtaatgtgcacttaagtgtaggagttgcttgaaactcttagttgcatgaaccaggattcctttttgagatggatactagtatgctaggtcgagtagctgcttgctaatcaggacctcggtagaagtcgagtgatttttctagcacccacgagaggtcaggcattgattgtatacatcttgataatgggatcaatgatggtctatggacttggatctatggtggatgccttgtccatgtgataaaaatggaattaaggattaatgtgtggatatttgagtcaagcatttaaaagtactaaacacatgtcgggaaatatggtaaccggtaagcctagtacctgagtgaagccgggcgtggagtttcctcctcacttgtcctaagactaggtatccc

SEQ ID NO: 15862 - DNA, 955 bp, Arabidopsis thaliana landsberg
agcaaggtcgataaccacagggagttggttcagcgattgtattggcgcctcgggctatgctcgtagtagtcggatcgcaagggtcatcttccgccaaatcggaattatctccactcgccgaaagatcgggcacctcaactatatcagaaagaaatctagatgtaggtaactacttaacctgatattaaaaatggatttttaaggatccactcatagtaagcttttctgcaaatagagtctttgaattttgatgagctttaccttgattcccaaaagccagcatacccttgagagtcttttcctttgacgggtaagacttgcgaaagtacactctgtactcagggttttcgaacccatgttgttgtaggtgatgaaacagccaagttctgctgtttctgcttaaaggtggtgccaagcaggaggaagatcactaaacttgtttggggagggtgttttgctcccgataatgtaataataaattccgcactcgaacaccaagttatgcaataagtactctttttatatttttatatgaatgtaaattatgttattgtaatcctttccgctcattctcaactccgattatgtgtaatgtctgcgtgatgggtgaagcgctcttgggcgatatgatgaggatacagataaccgaacttgccgagtcattaggtgcatctgcatgactgtctgaggtccttaggacaaggacatctgtaggtgggcctaatatcttaggaggttccgtgacaggtatgatgttactcgaccgaggtgtttgaccctcatgtgggcttctttttgcgtagggacaccaacgataattagtcgataacttgtgcggtttcggatacctcggtaaaaatacatgcgtcatacacgggaattgcatatctaccttctctttacgttccgcatttatatttagcatttaacttccaatcttatctttctagttaga

SEQ ID NO: 15863 - DNA, 609 bp, Arabidopsis thaliana landsberg
  unsure (1)..(609): unsure at all n locations
ttcctatgctccgggttaagacacctcactcatcacccgccacgaaaaatgacccctactcggaagccaccctgttattgacatgcaaagccggacacgcaaaataaaaggaagaggagtacgacttcatgcaatggaaacaaagtgttcatgcctcagcggccgcagaaagacacacgtgcatccaacagaaactgttccaacggagtcagcgtcgccttgggaaggagccgcgccttcagctccgtccccgccttcagtaaagtccatctcggcttccggcgacggcgcaggagggaggatctccgcctcaaaggtggtcgccagcactgcgctcagacccgcggcgaccgnnnnnnnnnnnnnnnnnnnnnnnnnngcagcttcgtcttcatcaggaagacaatacccctcactaactcgctccaggtccacaatgtagtgggaagcgagcacggcgaaggcccgcctaacgccgtgatgcagcgcctcgcggagtctgttgcgcacatggccgcccaaggcctgcaggcgactctggggggagcttcctgaggggacgtcgtcaagaccaaagacctggcagaaggctgagatagcttcggacat

SEQ ID NO: 15864 - DNA, 1020 bp, Arabidopsis thaliana landsberg
taaagacatgtgatcatgaatagcattaacatcaatatctctacatctatcactaatagacacatgctcaatagtagatgtagacggtttgcaagaattaagttcaacaatcttagcatgaagaatatcatttttatctctaagatcggaaattgtaactttgcaaacatcataatctttagccttatcaattaaatttttattttctactctaaggctagcaagagaaatattcaattcttcaatcctagcaagcaaatcatcattattatctttaggattggaagttgaaacaatgcaaacatgagaatcaaccttagcatttaaactagcattttcattcctaaggttgtcaatcatctcacggcaagtgcttagctcactagataattttgcacatttttctacttctagagcataagcctttttaacctatacatgcttctggttttccttaataaggaagtcctcttggctatccaagagttcatccttctcatgaatagcactaattagttcattcaattttttcttttgtggcacgttaagattggcaaaaagggtacgtaaattatcctcctcatcactagaattgccctcatcactagaggtttcatatttagtggaggattttgattttaccttcttccttttgccgtcctttgccatgaggcacttgtggccgacgttggggaagaggaggcccttggtgacggcgatgttggcggcatcctcgtcggaggagtcggtggagctctcgtcggagtcccactcacggcatacatgggcatcgccgcccttcttcttgtaatacttcttcttctcctttcttctccccttcttgtcgtcgcccctgtcactgtcactagaaattggacatttggcaataaagtgactgggcttaccacacttgtagcaaaccttcttggagcggggcttatagtccttccctctcctttgcttgaggatttgtcaaaagcttttgatgattaaagccatttcctcgttgtcgagcttgga

SEQ ID NO: 15865 - DNA, 766 bp, Arabidopsis thaliana landsberg
tgagtactgaatatataaagagaaatccggattataaaaggtctagaacacaaggtctgcggaaataaaactagataaaaacttcttgtctgcgaaaatgtgaagtacatgctacttatagccaaatattctgaaaccctaatacttaaaacgacgaagtattgggacggattaagaactgtactcgacccatgtggtcgagtgagaggtcgaatgaatagttggagtcttcttttcttccctgtgctcgagtgtctggttgagtgcggaatgaagaaggctctgaagcttgtcatcgagtatgcagtcgagtggtgtgatggtgatactcgacttccgggtagagtgatgaggtcgagtagtggtctggcaatgggatgaagacactcgaccgcgtggtcgagtgacgtgatcgagtggtggtcagaagatggagatgaagtcactcgacctgggggtcgagtgatgtgatcgagtggtggtcagaagatggagatgaagtcactcgacctgggggtcgagtgatgtgattgagtggtggtgtcttctactcggcctgggggtcgagtggtctcttgagatcttgaagctcctactcgacctctaggcgagtggtttgtcatgatcaggtctgcttcttccagttagctggttaacagctccaaatcacctgaaatctacacaaatatgcagaatcatgcaaacttatcctaaacatgtaaagtgatgacaaatgatgagaaatggtatacaacagtgatgatgg

SEQ ID NO: 15866 - DNA, 790 bp, Arabidopsis thaliana landsberg
atgcagggttcttgtctgaccgccatcgtagcaaaatcaaccaaggacctccctacactgaccactcccctactgcccttgcccctttcgggtaaggtagtcttccactagctttcctaattagtcagccaaggcgtcccattaaacccttgtggtggcacgtggttctcaagttaagctctatgttccaattaacattaatgaacttgacatgaacataaatagaataacaagaataattggaacatagatataataaatgattatcccaaaaccatgtaaagtaatagcaaactacccaagtgattcaggggtaaacaaggtaatgagataaacaatctagggtgacctattgggtcccatcaaaattaacctatgcatggataagtgatattaaagaacattattaggtaaaaagtggtcaagggcacaacttgccttcaatgagctcctgctcagctacttcaacctgctgctcaccaggatccccagcaacgtgttcttctactcgccacaatacaaacaagcacagtgtatatagagaaattaacattacatcaaacatatgaattaaatacacagtaataatctacatattaaaataaaatcctagcaacaggaatcataatttttggagttatagaatttaagttatggagtttcaaaggttttatgtgctttaaataggattaagtgataaattaatttcttactgttttcatgacattacagaggctccaggtgatagagtttttaattatttaattataggaactggaatggattaatt

SEQ ID NO: 15867 - DNA, 859 bp, Arabidopsis thaliana landsberg
ttaaaaataccactaaaataaaaatatatcattttcagtcattttatacactatgcattgagatgcagatgcacattgttaaaaaaaaaatcaaacgaacacatctgcattcacatgattcatctagatgcactatcaacttcataaacaaacatcatctaaatggtgtatttgaattgatcttctggatggatcacccaaatgcattacctaactgatcacacgaacaataccatattgaaaggaaatattttggaaatcgaactcaaaacatggttgcattatatgttcaactagaatgtgacccgtggtacactacgagtttagtactttttgtttattttttatttttataaatgaagaatttgttatgtattatgtgtataagtgtttgtgttaagtaaaaaattttttgataagtttatatatggtttttatgaagtcgtaagtttatgatattaataagtttaaaattattttatcttctaggatttgacccgtgatacactataaggtaataaaatatgttttattttataaaattttgtatttaaattacataatttaaactttttatgttgttaaatttagcccgtagaacacatgtaatttaataactttgtattacaattagatatttagatgtgttaaagaagattaacattaaaggcgtcaaagaaaattaactcttattttaatattaatgttgatttttaaaataccaacaaaaagtatatttttctaactaaaaaattaaaactaaaattatatttgttaaatgctactattatctgttttgtgagcgctaaagattatatagtcgggagcacaacaaataaaacatgtgtaccttgcgatc

SEQ ID NO: 15868 - DNA, 3468 bp, Arabidopsis thaliana landsberg
ttttgtttcttcgtaatacatttaactgcaaacaaatattagcttattttctaccattgtttaatacgaattctataaatctggaacagaaaaaatgtaagacaatgatatgagccgaacatgggactttcgtgtactagtagccccactggccagatccgatgtttcagcacattccttcccagtttattattcataacaatctcattgaccacttaaataaataatttcaaatttgatgataaaaatttcacgtgtttttgaaaacacattattgggcccaattgttgcgattcaaagttgggtaatgagatttatccagcatattgttccaaggcccaaataagatgggtcataggcctcagagattagttgacgtgtcatgtttagaatggctctcagaaccttaggggagtgtccgagattacccttactcttttgaggtgaaagtacagtttcgcccctgtcgaaataagaaaataaaaaaacattctaatcaaatctataatggtgaagtaactcctctcctcctttgttctccagatcccaatttacaagaattcaacttcacacaccctaaaaattaaatcccaatctccgattccaatatggcttgcatcaagggggtgggccgatccgcctccgttgccctggctcccgatgctccttacatggccgccggaaccatggccggagccgtcgatctctcctttagctcttccgccaatctcgagatctttaagctcgactttcagtctgacgatcgcgacttgcctctcgtcggggaaatccccagctccgagcggttcaatagactcgcctggggaagaaacggatctggatccgaggaattcgcccttggtcttattgccggcggccttgtcgacggaaatatagatctatggaatcctctttctttgatcgggtgcgtttcctttcctcgccttgctttgctgctattgaatcgccattttcactctgtttttttttataatccgcattaatagagttatgtatgtggtatccaattttcatctgaacgagtctaactcaaacaactgtcacaattttcagttcccagcccagcgaaaatgcactcgttggccatctttcagttcacaaaggccctgtgagttgtgtctctctgcattattttgttgcttaacgctgttttgtttttatcactcctcattttcatgtgtgcgtgcttctttttttcttaggttcgtggtcttgagtttaatgctatcagctcaaatctacttgcttctggggctgatgatggtgaaatttgcatttgggacttattaaagccttcagagccttctcattttccactgctcaaggtataccaccacttcttactagtcaacaaccttggtttttgtattaccttttactctcattattgctttggtataaacccatgagtaactttatgcgagggtcttttgcagggtagtggttctgctacgcaaggtgaaatctcctttatatcgcggaatagaaaagttcaacagatattagcttctacctcatacaatgggactactggtgagacttaggggtttctctctctttctctatctacttgactactacttcacttctgtctactatatttctgcttctgctcatcagtctttattttcattttcttttcccccagtaatttgggacttgaggaagcagaagcctataattaagtaagtattcaatttattaagtgatataattgaggctctcgaaaaacttgttgtcaaatccttgatctcgccattatcattcaacagctttgcagattcagttcgacgccggtgctctgttttacagtggaaccctaacgttactactcagataatggttgcatcagatgacgacagttcacctactttgaaggtaaggaatcatttaacgcgttgcttcatatagttcaattttggttcttttagtgatgtaaggtatctgcaatcagctctgggacatgaggaatataatgtcacctgtgcgcgagtttactggacaccaaagaggtattttcaaatcattgatatcaaaatgcttttctcagtgcttctctctagcttggtatcattttctatggttggtaagtggacagccttgtagatcagacgtcttagtctttaacccactcatattttggtgcctttatattatagtcctgttgtcttcattcttggtgttacaccttggtgaagtgtagtggtgatacttcttatctgtcaggggtaattgcaatggagtggtgcccaagtgacagctcatatcttctcacctgtgctaaggacaaccgaacgatttgctgggatacaaatacagcagaggtagtgtgaaggaatcaataaaagatacagatttgctgggtccgtgaattagttaactattttccattttgactgagtttgatccaaccataacagattgtggctgagttacctgctggcaacaattggaattttgatgttcattggtacccaaagatacctggagttatatcagcatcttcatttgatgggaaaattggcatctataactttcaggtagctctttgcagtttcgctttggtgcttgaaatttgtgttctagatcaagatcaatcatatatggttgtatacaaataatgaaccagtgaattcagcacaagttcatttttcctattcattgttattttaggagttaggttcctgttctgtcatggtactgcttagttctgaagaatacttgtttgtttcccacccataaataaaataaaatgaaagtatgtatctatgtagggttgtagcagctatggtaccgaggtgaacaatttatattcaggtaatgtccttcaagatccctcttgttgaacaatatgcttgaatcattgctttgttgggagcattagaaccaacagcacttcttattccatcttctcgatgcagatcctttaacagcaccaaaatggtggaagcgcccggctggtgcatcttttggatttggaggaaagcttatttcgtttaacaaaaatcctcctgaggcatctgaggtcttgttttagagaggacattgttttattctgttttgctgtttttatatttcttcagttcattgactcttatgtgtgcgtgtcaggtctttctgcatagcttggccacagaaaaaagtttggtgaatcgaatttctaaatttgaagctgcattagaaaatggagagaagacttcccttaggggtttatgcgagaagaaaacagaagaggccgagtaagtcttgctgtgactgaaaatgatcaaataatcatccttatataagtaacagaaacttacaattttcctctttgtgtacattgtttctgaagatctgaggaagagaaggaaacatggggactgctgaaaattatgcttgaagaagatgggaacgcaaagacgaagttgcgtagccatcttggctttagtttaccatttgaggaaa

SEQ ID NO: 15869 - DNA, 986 bp, Arabidopsis thaliana landsberg
  unsure (1)..(986): unsure at all n locations
tatttttaacataatacaacaatgtgcttatatttgataatgagctttacgtacctatacttatattttgtgaatgattccataaatatatagaaattaaaatccatagatttaagtaataataaaaacattttatttacaaaagtcaaatagagatagaaaattaaggaaaataattgaccaagttgttggcttagtagttaggattgcttagcatcattattagaattggaaacaaacaaaaagttgtaagaaaaagaaaaaaaaatcagttctcctagatgagtcggaacattaattagaaagagaaaaggtaggaaattttcaaagtcaatcctctaataaatgagtcattttagttaaccattgctaaagggagttattttagttattttaaaaaaaattagaaaaaacaagtgttaaaattccttaaataaaaaaagttaccatctttgaaagtatcaccacccatggctacaaggttcttatttgttcttcgttttagagttctctcagtcttattagaaaattcagaatcttgttttgataaaagatcatttaaagaatcattttatattctgttctatctccaaagtgacttttttctaatatctttggtttgtttgttggacttgttcgctttactaaatagagattaaaaataagtatcgtaattaacataataaatataatcttaaattttcttctagattagacaggttcacaagttaaagactcaaattaaaagacgacagaaccaacattaattaaccaagccaataaaataatattgctcctatgcacgtgcctatcaaccccaaaaaaagcgcaaagacaatcagactatccgagtcccagaagccagatactctaccccacatgttttgaaggcactgagcaatctgagcagagtggctgtaggcgtaggaggggacgacgagatgataatcagaccgaacagtgctatangaaagcattttgtgaag

SEQ ID NO: 15870 - DNA, 632 bp, Arabidopsis thaliana landsberg
catctcctgacataaggtattgtcagaggtcttcaccgtaagacagtgacagggaaccttatggctcagtgcatctgccacaacattggctttgcatgggtgataatgaatttccagttcatagtccttaataagctcaagccatcgcctttgcctcatattcaactctgactgggtgaggatatacttcaagcttttatgatctgtataaatgtgacagatatttcccagcagatagtgacgccaaatcttcagggcatgaaccacagcagctagctccagatcatgagttgggtaatgctcctcatgtcggtgcaactgccttgaagcatatgcaattactcggccttcttgcattaatacacagccgagcccactgcctgatgcatcacaatatacatcaaagggtttggtgatatccggttgagccaataccggagcagtggtcaataatatcttcaattgttcaaaagcttctttacacttggaagaccaattgaacttaatatcattcttcaataaacttgtgattggctcacaagcttagaaaaatctggtatgaatctgcggtaatacccgccagccaaggaaacttcggcttgatgacagtggttgggggtttcacccaaaat

SEQ ID NO: 15871 - DNA, 971 bp, Arabidopsis thaliana landsberg
ttctttgcttcccattgtccacttgacaaatccaccaaataaactccggcaagcacttcctgaaccttgcctacatgagcaaacagaaatcaaccatgaatatcagtaccatttaattcctagaggagtgtcagatttcacttcactatcacaactcatgcattagtagatgactatacataaatcaaagcattgatatatagtgcaaggaagtccactacataggtacctggctattgcagaaagatggcttggatcttcatctacattcatcaactttgcaagagaaaaaactgtaggcaaaaaaaacagtttgacataaactacaagccattctcaagctcataatcatcaacagagagaaaaagcagaatacctagacaagcaaatccagcagctgaagatgctaagccagcagcagtagggaagttattatgagaagcaatatgtagattcaatttctcccaatctttcttccttatcttgatccccttttccatgtcttcaacatcaccagcacgacttcgtatttccctcaaacaattttggtacctacttccagaaagagatatttcctacactaacatgaaacaacaacaacaacaaaaatctttgtaattcgataattggaatctcagcaaaaggagagagatcgtggtgggaaatgaagcgagtgtaccttgccattgagccacattcgatcccgatcaaaagcaggactaacggcaacagtggtgactgtgcagagatgatcaggatcaagagttacgctaatgctatcgttaacggggagaatccgaacctcatctctctttccccaatacttaatcaccgcaatgttcgtcggagtttgcgccgtcaccatgaacacccatttctccgtcgccatgtgaatctcctaaagagatctgcagcttcaaagtagttgaaaatgaaagcgacggagaatacgacagaataatgatgactca

SEQ ID NO: 15872 - DNA, 2013 bp, Arabidopsis thaliana landsberg
  unsure (1)..(2013): unsure at all n locations
ctacctgtgatctaccaaatgtagatttccatacagcgcagaaccagtcttcaagtccttgccacgaacatgaacagtgacaatgctgcattaggaatcatctatccaagttatttttgtcttttctcaaataccctaggagacctaactatctagagaatgataaaagaaaaacacatgtttgtttcagagatcaatatgagcacctgtgagagcggctacttctttcgttcaaggcagtggagctaacaactcggttttgtagcccaatgctcattaattcaagaacatccgaggtggatgtcacaggatacatgcttgcatcaggtacagcaagaccgttctgttgagttgtagagagaatccctagtgtgtgaaagtcaaggaaaacaacataatggaaacacaaacagaaagttggagaacagagccaaaattcatatggaggaactaaatttgaaagggcaaaagaaaaaaaagtaagtagagcacaaaaaaggatatttcttttgagaactgtcaccagagagtaaatcgcgcacttgttcattgtatatctccaccatctgcaccccaacttcatacgctatgttgcttttacgggattgagagattctgaagaggtcattgagagcacgatagtttactccccactcttcttcgcttgctccatctggaccagtctggacaaaaacaatgataatggtatgaatgtagtggcatcatttgtctggccacttaatcgtgatatactagtgaatgagtaccattgtgtaagttttccctgatcctgtctgaccatatgcaaagatacatacattgtacccgtcaagaactgatcgaataagaggttttatatctgaaaatacctcagctgcaagaattaaaagatacaatgacataagtatattaatttttttgattagtcccaagaacacaccaatccaacaaaaagtatattgaagaaaaattcctcaggcaaacaaaagaacaccttgagtagaggcaggactgtagaccttattgaacctaaattttcgatgagcatccttgccaggttttgttggattgagaactaccaactccccatgatcaccaatgtgttctaccacagtttttgatgcaccttgcccacgcaagaaaggcctcactcgacaatacactctaatgtttcctgcaagccataactagagaacttataggttgcatagaagttgaaacatcaatatgttaatgcatgatccacattacttacctttaagctcctgaagttcattgaagagcttttggttttcagttaggacttcgtgatagtttcgggcagcatctccaaagttcaaaccatttccctccctgaggatcagtatttgtttataaacacccccaaaatttacagagtcacaaatataacatactttgagctatttataagaagcatatgtctgtcctgacttacctaattgactaaactctactgtatacttatcttgaacttttagtatttcttgtttgatagacttagaatagaacctcaactcctggaaaattggcaggtttaggtgactatagaaaaacacgatgactgattctactcaatggcatatgtaaacatacttgtagcgcnnnnnnnnnnnnnnnnntaaagcttctataggaaagttctttctgactccaacttcgattctttaactctgatttttcttccatttctttggctttactcttccagtggacgagattttgttcaagctctcggtttttcgctttaaggcttgtattaacagtcattgtctcttttttagattgttcaagctctcggtttttagcttcaaggcttgtattaacagtcattgtctcttttatagcttgttcaagctctcggttttgagcttcaaggcttgtagtgacggtcattgtctcctggttaaattgttcaagctctcgatttttaccttcaatggcttgtagtgacagttatcgtctcatctttatatttttgaaagctcttcacct

SEQ ID NO: 15873 - DNA, 3407 bp, Arabidopsis thaliana landsberg
gaagttgtcgaagtagtctttttcgcattatctctgtttcggttccctattcttgttccttgataataatgagtgacatcacaaatatttgtgcacgaattaacaggtaatgtaaatagaaagcaatagacaattttctttgattttacaatttggattcggattgcataagcaatgacatcaacagtaatacatagctgagaggctgagaggctgagaggctgagatgcagtgtctctctctcagggaagatgacaaaaagaatctgatatacacgtacatatgttgcgagttacatattgatatgtcacatgtcataagtcacatgctaacgataaactaatgaactaaaacaattatgtcaacatatatcggtgatttgcattatcatcgacctcggtcactgttccgcacatcttggtcgccacggaacatagacaatttttggattgtagtccaattaatgagtcccccaccaaagccgtagtaaaatcgaagtcgttctctaatccaatcatatatatccataacacacaccaacaacacccacacaacaaaaactagagtcagtaacaacacaagattaaaaaaagaagaaaatgagagaaggatctcatcttatcgtcttgcctttcccaggacaaggtcacataactccaatgtcccagttctgcaaacgcttagcctcaaaaggtcttaagctcactctggtcctcgtctccgacaaaccctctcctccatacaaaacagagcacgactcaatcactgtcttccccatctccaacggcttccaagaaggcgaggaaccattacaagacctagatgattacatggaaagagtagaaaccagcatcaaaaacaccttaccgaagttggttgaagacatgaaactgtcgggaaatccacctagggctatcgtgtacgactccaccatgccatggcttcttgatgtagctcatagttatggattgagcgggtgccgtgtttttcacgcaaccttggcttgtcacagctatttactaccatgttttcaagggttcgttctctgtaccgtctacaaagtacggtcactcgacattagcatctttcccttcgttcccgatgctgactgcaaatgatttgccgtctttcctctgcgaatcgtcctcatacccgaatatactgaggattgtggtggatcagctctcaaacattgatcgagtcgacttagtgttgtgcaacactttcgatacattggaggaaaaggtacagaatatatatccatatagaggaacatgtctctgtcttttgtaggaagtgttttaagttttattttctctgcttgtagttgttgaaatgggtccaaagcttgtggccagtcttgaatattgggccaacggttccatcgatatatttagacaaacgactgtctgaagacaagaactacggttttagcctcttcaatgcgaaagtcgttgaatgcatggagtggctaaactcaaaggagcctaattctgttgtctatttatcattcggaagtttggtgattctaaaagaagatcaaatgttggaactcgctgcgggtctgaaacagagcggacgtttctttctgtgggttgtgagagagacagagacacacaaaattccaagaaactatgtagaggaaatcggtgaaaaaggacttattgtaagctggagtcctcagcttgacgtacttgcacataaatcaatcggttgtttcttgacacactgtggatggaactcgacgttagagggattgagtttgggagttccaatgattggtatgccacattggactgatcaggccacgaatgctaagttcatgcaggatgtgtggaaggttggggtaagggttaaggcagaaggtgatgggtttgtgagaagagaagagattgtgagaactgtgggagaagttatggagggagagaaagggaaagagattagaaagaatgctgagaaatggaaagtgttggctcaagaggcagtttctgaaggaggtagttctgacaagagcatcaatgagtttgtttctatgttttgttgaatgatttaaattgatatgttcaaaagtacatcgtcttttgcaagtccagttgtaattcttgttgttgttgtagtaataactaataatatagtttctcatttgtctacagctctctattccaagttccaaatgataacatgtgagttaaaaatccagggtttaataaaatatccaagccggataaaattttgcataactctataaaaattcatctgatttttttttttttataaatggaatatacactacacacctaaagctactttaaatgtgacggccttatgcagtcaaaggtcatatggtaggttgaattatcatcgatgtctatccccacacatcttggtagccacgtttgacctttttggatagtagtcacaagaaaagtcgtaaaattaaagtcgtcctctaacccaaccttataaatacacacacccacacataacagagtcagagtaagaacgaaagacaaaaaaaaaaaagatgagagaaggatctcatgttattgttttgcctttcccagcacaaggccacataactccaatgtcccaattctgtaaacgcttagcctcaaaaagtcttaagatcactcttgtcctcgtctccgacaagccctctccgccgtacaaaacagagcacgacacaatcactgtcgtccccatctccaatggtttccaagaaggccaggaacgatcagaagacctagatgagtacatggaaagagtagaatccagcatcaaaaaccgcttaccgaagttgatagaagacatgaaactatcgggaaatcctcctagggctcttgtgtacgactccaccatgccgtggcttctggatgtagctcatagttatggtttgagcggtgccgtgtttttcacgcagccttggcttgtctcagctatttactatcatgtattcaagggctcgttctctgtaccgtctacaaagtatggtcactcgacgttagcatctttcccttcgttaccgattctgaatgcgaatgatttgccgtctttcctctgtgaatcttcctcttacccatatattctaaggactgtgatcgatcagctctcaaacattgatcgagttgatatagttttgtgcaacactttcgataaattggaagaaaaggtaccgataaatagaaaattttattagatttgatataaacaaaaagaattgtgatactatactaattgacattttttgctcttaaaggtttattatggttaatttgtcttgtgtttcttttttcttttttgctgcttttagttgctgaaatggattaaaagcgtgtggcctgtcctgaacataggaccaactgttccatcaatgtatttagataagcgactggctgaagacaaaacta

SEQ ID NO: 15874 - DNA, 581 bp, Arabidopsis thaliana landsberg
cctaagttgtgttgtccgtgtgcgctatcaatgtggcgtttctgggttgcccttggcttgtccggctatatagcgattcgggggcgttacagtttctatgaggaacaaaggaggatgctgacctaagctaccggcaaaacctatttcacgaaaccttgtcagaaaagaccatccttgccgcgggcggggatgatcttgaaccgagagacaaacgtgagttgtcacctcgcccaggtgaagaattctcttcaattagccaagatgacctaaggagaatccaatccaggatggaaggcgtcgatgatagcagatggaggcttcaaacgcgcattaatcgactagaggataatgacgcgaaagaagatgtggctttggaggacgtgataagaagacaaggtgaagttgaggagaaccaagtcaagaacgttgatgatcaatcaaggatacgggcatcacttaggatagtgacgatggaatcctcaaggaaatacgtggaattgcttgatagaattcttgatttggaccagaaagttgataacctaataacatgcatagaagggcatgaaccaatggagagcgaa

SEQ ID NO: 15875 - DNA, 556 bp, Arabidopsis thaliana landsberg
gctcttttccggtactctaaaggcattcatcatcattgctgcgaaggaaacatttcatgatgaacctacgaaatatcatgagtttatcaagctcttgaatggtgtttgtgatcataggtatgtattcttttcttccctgttatatttggtttggtctttactttcaactgtgaattgattctgatgttactagtctctttttgcagagtcgataaatatagtgtcattgcaagggtggaggaactgatgaaagatcatcaggatcttcttcttggtttcagtgtcttccttccacctgtttctgtagaggattttataaacaagctcaaggtaaacacatgctaaaatgacaaataatccttggagagaaacaccaaaatccttttttgattcctcttttactaactagagcaaatttgtccatctgcagacacggtttcagagccttgatactcatgtagtgggggcaattcgcgggttaatgaagatgtttaaagagggaaagatgtcggtaaaggaggtgcaagaggaggtaatgtttgttcttggtgggcta

SEQ ID NO: 15876 - DNA, 316 bp, Arabidopsis thaliana landsberg
  unsure (1)..(316): unsure at all n locations
tttaccgtactgatgaccggtgaaaatccggttatctccggttnctcaatcgcttgtaactaatccactggttgatttaaagcctgtgtgatccttgagatctttccaaacacgaatgttcttggaatcggatccagtgaataaaagatctccagaagcagccaacgagtagacatgaccgtcttgtctcacgattgtaccgatcaaaccgttgtcggtgtcatcatcaatgtttcgggtctggtagatccaaggagacttgtagtacggagagtaagtttggttccacggtgagggagacatngatggagtgttt

SEQ ID NO: 15877 - DNA, 880 bp, Arabidopsis thaliana landsberg
caatataataaaatcacgattttggcggaaaatttatggaattgttttttcccgccaaaacagtaaaatcataaaattattttttcactgatacaaaaaataacgatttaaggggaaaattgcgttttcccgccaaaaccgtaaaatcggagaattgtgttttctcagcaaaactgtaaaattgtgtttttcgctaatataataaaatcacgattttggctggaaaattgcgttttcccgccaagaccgtaaaatcggagaattgtgttttcccgttaaaactgtaaaattatgttctcgccaatataataaaatcatgattttggtggaaaatttgcggaattacgtttttccgtcaaaatcgtaaaatcggagaattgtatttttcccgtcaaaaccttaaaatctaaaaattgcgtattccaaaaaattgtggaatactatctttccttcaaaaccgtaaataatttaataagaaataatttattaaaatttaaaattttcataaaaatataaacttataaatgtaaaatatgtaatttaaaaattatttagttgtaattgtaattaaaattataaaaatataattaaatgaagacatgtctattgactcaattcatgcccatgggcagcccattatccatatggtcaagctcatattatccgcggacaaaactggtcatatgcctaattagaccatttgttttttggtccagaatgtaacccacacatcacatgcatttggactggacaagtccatgggcggcccgtccaattgacagctctacttagatattagtagtacatacttttcatttttctcaatttattaggtgaaaaaattttaaaattaactataaaataaatttttgaaattaac

SEQ ID NO: 15878 - DNA, 764 bp, Arabidopsis thaliana landsberg
  unsure (1)..(764): unsure at all n locations
acattcgtttctcacaaccaaaaaaagaagaagatccattctaaaaaaggatcaaatgtataaaaagctatattaccaaaaatggaaataaaaatcgaattttaatagctccataaggacacgtcatcatctccctcgacatcaaatttatagttccattgaaccgacggcgacggtaaaagcatcccttcggccatgttatccaacaaactagacatccccaacatcgcctcttcatccatataaaacgcatcttggctctgttccggcgtataaatagcctccaccaagnnnnnnnnnnnnnnnnnnncatgagcatccgtcgtcgtatcacacgtctcatcttgaaaagccaacgccgcttcagcagccgctttttggatatccttggcgcatgttgactccgggattcgtagccgccaagccgagtcagcgaagttgagacatgctgatcggccacggagggctaatgcagcgacgtcgtgagcccaacttgccatctcagcggtttggaaagtcccgagccaaatcctggttttcttgtttggctctctcacttcagaaacccacttaccggagtttctttgacgaactcctctgtaaattgggtgacgagtctcacgaaacttcttacggcccgccggtttcttcgggcaactcgtggccaacgtcggacaataatctccgccttgaggctcgtaatcggagcccaacattaaaaaaaaagctgaaaatgagttcataaaacagagtactctgtttca

SEQ ID NO: 15879 - DNA, 639 bp, Arabidopsis thaliana landsberg
taacaataaatagcagatccgaatctgagaatggatataggatttttcgtcatggcctagcacacacatggaagaaaaagagggagaatttcgtcatggagataggagaattctgggataactggtaacaaatggctgcaaaattagggttatagagattgaagacgattacaaaattaccattataccctttattaaatttcttatgtatacgtatttataatttatagtatacgtacatgtgaacatgtaaatatgttagattatgttttattgtaaaagcggcaaacacaactatttattgagtttctacattagaaatttttggttatttcgtttagatgagatatttttggggattttctcattaataagataaaagttttggagaatatacaagattttaaactaaatccatagacgtacacgataatattgagacacacgtacacgtgtacgacctcttcaagagttacatcttaaaaatatcaaaatcacatacatttaatactatgtacgtacacaaaaatatatatcggaatgtacatggtactacattaaaatgagtgcaaaaaggctctaaccactatctacgaaaaaaattaagggatattttcgacatccaaactaagttatcgt

SEQ ID NO: 15880 - DNA, 689 bp, Arabidopsis thaliana landsberg
  unsure (1)..(689): unsure at all n locations
ccgagagatttaacaagatgcctaatgactttgtggataaccttattgatcgttgttggagacttgggatgcagatggaggctcctatcagtttacaaaacatcgagaatggaaacactttctaatggtagtgctattgaggaattgcttcgatccgtgatagatgaagcttctcgtaagcatggtggggctcgtccaactcttgttctgnnnnnnnnnnnnnnnnnnnnnnnnnnnnataagactctgaaatggatagccgagaccaaacttggtctggtgactcagtgtttcttgactggtcctgccactaaaggaggtgatcagtaccgggcaaatcttgccctcaagatgaacgcaaaggttggtggaagcaatgtcgagcttatggatactttctctttcttcaaaaaagaggatgaggtcatgttcattggtgctgatgtcaatcatcccgctgctcgnnnnnnnnnnnnnnnnnnnnnnnnnnnnnttgtgggaactcttaactggcctgaagcaaatcgctatgcagctagagtcattgcccagcctcaccgcaaagaggaaatacaaggatttggcgacgcttgtttggagcttgtcaaagctcatgttcaggccacagggaaacggcctaacaagattgtgatattccgtgatggtgtcagcgatgctcagttcgatat

SEQ ID NO: 15881 - DNA, 3528 bp, Arabidopsis thaliana landsberg
aggtacaagtcaagcatgatctccacacacactttagatcagccgctttgtactttgtgcattcttccaacatttgactctgttttacattacaagccatagattattagtgtctcattcaaaagattaactcaacatataaacctgaaaaagagagattgagacaaaagttcttacccaaggatgttggttaggaaggatgatgaatcgagcgagaaagacagcagaagcagccaacaaagatggaacaaacttcacacaactataatctaacatacttagttctgacagatagcaacaaagaggctctagctgcaagtttggcactttgaaatcttcttgtgcaacccttatgaaccgtctgcacaaacacaacaaaagatgagaacaaagaaccataagatacaaccaaaagtcagtattattcatcacaattctaaccttagaaaagtatttgtcgtaggccttcctagttcaaactcaagcgcgagaagtatttcctcttccatcttcaacacatcttgtttcgtataagtattagccgtaatgtaacaaaaatcctccactttagggcgacgtttctcttcatacttcctatttatatcaaatgccaaaaaagagaagccactccatatgtaagtttcaacatgacaatgaatagcaaagagagtaatacaagaggatcaaaaacacttacgaagcgataaacattgcagaaactcccacaagctgaagccagtgctcgttaaccatctttaatgacaagaatctatcaatgtaagagacagtgagatagagtgtttcagacacgagttcgaactcttcagcaacttccactaaccaatctaccaaaacacctctcttgcttggtgttatatcttcttgaatcttttcaatgtaatcatgtaaaggtcttagctttggcttcacctgaatattcaccaaaccaaaaacacaaatcttcagaacatatccacaaattctaagtccaaacagagaacaatcatagaaactcttcagataaagtatactaaattgacctattgaaacttgtcaatgttctaagtccaaaaacagagcaagtaggagatcttattacgtacctctaattcacggagatactcgtagatatctgagacataaagtccacacatctgtggatcatcagacctagcgtcaatgtcagagcctgattgaatgttctcttgaaacgcaagtagcttatgtcgaatttccgcccactctaccggggaagcatcttgagggttatggtcggaatgaatctgtttatctttcttagacaccatatttatcgaaaaacaagaacacatcttcgaaagaacaacaataaatcttacactaagtcctatatatagagtagaagactctatcctaaaacaaccaggtttcagaattcagatgagagatgagacagactaaaaaaaaaaggaaaattaaaccaaagcccaaaacaataacttgttgaacacgaaatcccaagtaattaaaaaaaggaaattaaaaaaaaaatcgttccaaaacgtgttaatttagagaaattacctttttttacttgattaaaaatctcaaaaagtaattacatataattatctttttttaatctaaaacttgtaattttactttggagaaaattgtaaagtagaaccctaattataatttcgatttgatttgcttattccgctgagttaggcctaaacgacaacgctacaacttgtgaagtttttgattttgcaaccaacacttggaggtacgttgtcctgcatccccttatctggtttctcacacccaagatcctgtgtatgttgatggctcacttcactggttcacacgagggtgaaagttgaaaccatggatttgtctttggatcttcacaccgaaacttttcaagtcatcgctaaagctcccttgtttgttgtttctcaagtttaatctctctttaggaaacttgattatcaatctcatagacaatctgttcttttcttttgttcttgagattttattagtttctttaaataacaacatgtcttctagagttttagccctctaggattttcattaagttaaacataccgttgtaggctcaatgcttaaacaaaataagatcatgtcacataaatacttatatcatattgcataattgtataaaattatattattccgaatttcacactaaaattttgtaaataaaaaagaagagatttcaataatacatcacacatcttcacataacgcagacttatttgctcctgccttcacttctatatttcttactcttctagcttcacttgaagatctgtgtccattatactatttgaaacaagattcggtaatccagctccgtaacatttgcttaagatagcataacctcagatcaaatggtaacatcctcccaaaaggtaaccggcagctctggtgaaacaggcatggtcgcaacgcattggaactgtaccgagaagaagcaacattaagtatcaagaaagctttgcttattcaaatgattttatcaatgtgtaatgtttaagtaccttatggtgcttatatttctctctaacagcttgtaaagcacctcctcttctgctcaaatacaagtcatgtatgattccaacacacacttgtagatcagccgctttgtactttgtgtactcttctaacatttggttctgtttacatattcacaaccataaatcattagtgtctcattctaaacaatgaccacagcagactaaaacctgaaagagactgagacaaatatgcttacccaaggatgttgtttcggacggatgatgaaccgagcgagaaaaacagcagaagcagccaacagagacggcacaaacttcacagtcttataatctaatatactcaattctgacaaatagcaacaaagaggctctagctgcaaatgtggaactttgaaatcgtcttgtgcaactctagtaaaccgtctacacaaacaccaacacacagaatcagaccaatgaaactaagacgatccaataagtaatcatcagcaatacacacaaatctaacctcataaaagtattaatcgttggtcttcccaactcaaactgaagagcaagaagtatatcagcttccatcttcacaacatcttgtttcgaaaacgtattatccgtaatgtaacaaaaatcatccactttaggaggacttatctcttcatacttcctacaacatttcaatacttccattagcttccatacataaacaatgacaacaaacacaagagaggaagaatcataaaacacttacgaagcaataagcatagcagaaactccaacaagctgtagcttttgcttgttaacagtctttaaagacaagaatctatcaatatgtgagacagtgagataaagtgtttcagatccaagtttatactcttcagcaacttccactaaccaatcaaccaaaacacctctcatacttggtgttacatctttctgaactttctctatgtaatctggtaaaggtctctgcttgaacttcaccggattcttt

SEQ ID NO: 15882 - DNA, 495 bp, Arabidopsis thaliana landsberg
atggttaagcccttcgtccagttgatgagagtgccagaggataaagatagctgcttaaccggaaatgagaaagtgaaacctagttcccgttgtctaccaggtgggagatgaaagtcctcgccttctgtagcgacaaacttggcaagaacatcaacgataaaatcgaataattcctgccaaaatgtaaccaatacacaaagatatagaccaaccatgaagactaatcataacaataaggaataaaagtttagtgagaaaactgacatgtgacttcccggtcatcaaatgaggaggaatagattcttctttgaattctcgtttaacaacacggtcgtgcttcccaccaagaagcacacgcataacacggaagtttgttccgcctagatccaacgcatagaataaaccagtctcatccctgtcaaattgataccaagcattaaaaccaatcacacaactcagattgtacaacggatttagcatcagaactcaaaaaac

SEQ ID NO: 15883 - DNA, 656 bp, Arabidopsis thaliana landsberg
tgtcctccatgaagctatgagttacctgctgcaagatgatgatggacaaatcattgaaccacactccatcagtgcagggtaagtgaaattctctattcagatccggtaaccataataagtctactcagttagccacggctgcatgaacatggtttgattttctcttacagattggactaccctggagtcggacccgagcacagtttctttaaagacatgggacgggctgaatactatagcataaccgacgaagaagcgttggaaggtaatgtaccgatgcatagtctttagttctgtatttgaaaatctgttctttgtttcataacttacctttgcattccctttggtttgtggtctgtagcgttcaagagagtgtcgcggttagagggaatcattccagcactggagacctcacacgcactagcttacctcgagaagctatgtcccacattatcagacgggacgagagtggtcttgaacttcagcggaagaggagataaagatgttcagacagtggctaaatatcttgatgtttgaagagagaaacacttatgtttgtttttcagttattcagacagaatgaaatccttttgtacttgtaatctgtttgtactttacttctctctggtcagtacgtttccaacaaaattggaaat

SEQ ID NO: 15884 - DNA, 908 bp, Arabidopsis thaliana landsberg
  unsure (1)..(908): unsure at all n locations
aatattaatttctccatataaatacggctattggagtttgattacattcttagcgttttctgtttatttatgatgaacggcataaagtcttcaccgtttaatatgccttaccttcctgatgatttactattgaacatcataggccgtgtctcgagattgtactacccgattctctccttagtttccaagagattccgctctctcgttggatcacttgagctttacaagatccgaacgctcctaggacgacgcactgagaattgtctttatctgagcttacgtttcagttatggatctaacccacgttggttcactctatgccgaagaccaattcgaacccctaaccctgaacctaaccttaagtcacgatggttcacatcctgctttagaccaatcctaacagatcgcacaagcaaggaagaaaagaagttaagtggaaatcttatggtctcaatcccaactagcaattattgtcctctgtctgggttgacttgtaacacaattggttcttatatctacatgattggcggatacataaattggattgtcggtctcacacctggcacgaagctccaagcatgcaggttgcccgaaagtccccactcgtgaatgttcttgacgggaaaatatatgtagtggaaggctgnnnnnnnnnnnnnnnnnnnnnnnnnnnnnnnnnnnnnnnnnnnnnnnnnnnnnnnnnnnnnnntgtgccaagccctagcgcggagatgcgtgggaggtatatatcaaaaggcttagtctatgaagaaaaactttacctgtttggggataaaaatgtggtttacaagcctaaggaaagtacatgggatgcgttagggcttgatatgaatttgtggttggttagctttggttctttctgcgtgaaagataatggatgttatatg

SEQ ID NO: 15885 - DNA, 3918 bp, Arabidopsis thaliana landsberg
aaaagccacgaataacgctcacaataaatatgagtatggttttttttttctttttttttcatccaaactagattatataggggggctgggtggaaaaatagacattttttcaaaaataatttgcaaactaggtagttttttaaaaagttaaagaaataagacacctttttttactttttgtgagatagaaaatttgtgttataaactacaagacaaaataaaataaaaatgctaaaatgccctttatattgagagataagagaaaaattgatgggaccacttttctttaaaacattttttctttttggttcttttttttcttaaatatatttttaaagataacttttttttcttttaatattataataatttttatatttatatatcatcaatctcatatattcgtaaaccaatattttaaacatagttttgtacactaacatttgtacacaccggattatcatttacaaaaaaattattataatatctcataaatcattaaaaacatcgatttgtctcatatttataaattgaagtaattattgttcaaagactctctcactatttatagatcgaaacaaagagtagagtaacagttacatgtgagaacaaagactctctcactatttatatactttttcatttaatgagaagctgacatgaattcaaagccctgaccacactattcaaattcttaaccattttaactctctcttcagaactgatgggttttgagaagaaagttgctctcttcaaacgatttgtgttacttaggatgtatttcgccacttcggtctcatcgtttcgtttccattcgtatcctttccacatgaacgtctcaagatggaataacaaacattccggtacaatctttggcttattccatttcccaacaatatcttttttccaactttgatactttggctgatcagtgagaggaaaacacatgtaatctatgttattgtagatcaccaaaacgaaaaccaagctctatatttacattgcttacactgaggagctttagaggttgcggtttaggagaactattaagcattatagtaagtatattcaaacactctgcttcatgtgtcagaagctccaaatataccagctgatagaagatactaccagtaggaaacttaatctgtgcatgagtcataattagtacatttatatataaacaatatgataaaaactaatctaatcaattgcaagaaaatctaccatcaaaggtgagaattctaaggacagacgtttcactgaagttagagattctagaatgttctcattagctatatgagaaacgtcactgatttctgcctccaccagctctggcgcattctcaatcaaacaaaaatcaagcccctcgaaccctacaatgttcaagtatttcaaagaaggagcatttatcacatagcctcccttacctcctcctatgcaaaaatcatatatggttagtctctgtaatgatggcaccacaatagtaaaagtctccacatcgacattgcgttctctatgcacggacaaaacttcaagactagggcagccgcataaaaggttgcaaacagatgcttcgtctttgaagtgtacttcgtataggcgcagctctctaagggacttcaagcaaaccggagaaggaaggtctaaaagaatataatcctggatttccaaaatgtcaagtgtatcattgaagttaaacaaagcactccgaaatctagccctcttatcacgcacatcaccgaaactaaccaataccaatttacgaacatgacgtacatatgcagttgcaatccacattccaatattcaaaccatcaattccacgtgtgaaattcaattgcaaactttctagaaccgaagcttcatgtgaagtcaaagacctgtaaagattctctgaaaatgtttggtgatactttggatcaaacgtaaaatcgaactcgagatttggcaccaacttccaaagaggcctccattgtttagaaaaaacactcgtggctacgacaatctttgttggaagaaaagacagtatctttataagcaaagcatcaggcaactcactgatcctgtctttacccataacaactctaattcgcaaactttcactagcaaaaccaaaagaagacaagagttaaagttagggtttcgagcttttttttttttttttgctaaatatgtgaattgtcatcaaatgaaattgcttgtagaaagaagctacaaagtttgtaatacaacagattgatccttggcaaaaaagataaaaacaaggaagaatctacgagaagaaatatatgagtagaaaagttgtctagtcatacttcagccatactcgcatgagggaattgaaaacctttcgtttcctctttgcaagaatggaatcacggatctgtctatcaagagacttgaaaaggagacaaagaaacacaaacacaaacgaaacagagaatgcgccggagtccagacccattaaacggagacaaaaaaaacacaaacgaaacaaagaaatttacccttgttccattgtcggtgaaatccggcttatgcttttccagtgctaaaattgcatttcaacgaaactgaatccctaatgactattcgcatttcaacaagtagaagaatgtgataagactagggcttctcattcaatatctcggttttgtttaaattcgaaccgaatccgaccggttcacttattaataccaaaatgttaaccatctctaagaagtaaacccctaaatgacctaatccgatgaatgacctaattcgatgatcgacctagttcccgatgtacttgaagattctctgttgccttttagtcacaatattatgcataaccctattacaaagatgatcagtgtttacatacaactataaactttttcattctcatttagtctcattgtatcaccattcatgaattcatcatagagattagagatagataaaatatagagaaattttcaatatcatgtaaaatcatccccgatagccaaacccgatgtaaatcgttatttggaaaaatatttttacaaacccgacgtaaacaagactcactgtgaatttataagacttgctatggtcgtgagaccatctccaatggtacttcatttttcaccttttccttcattttgaagtgaaaaatgaagaaatcttctccaatagtgcttcatttttatcttcaaaatgaagatttgaatagtatatcttcgtatttgaaggtatactattcacatcttcatattttgaagataaacttttttatttacaaaatggtccttaaaattataacaagtatatttttttattaaacaaactatttatttttatttaatccaatcaaactaaaatacgaaaaataatttatattaaatggaaaaacaacgtactttaaataaatgttatgtaatgtgatttttttataataatgtattctaaatgaaatcaaataaatgggtcaaaattcatatgtttagaaagtaaagggtattattgataattaattataaaatagagatagaatatacttaaaatattatttttgaagtagaaaataaaggaaaccattgaaaaaaaattgtttcgtttttgaatagctctcatgttccctttaaacacaacaaaacttcttaaatctctttctactctacatatccctttctcttttaatgattagtgagaatactattttacccttatgaataattgaaattgaattaaaattaaaaaggaaaaaaagagtaaaaaaaaaaaagaatcaagaaaaaagaatcgagctccttcttctccaacgagttcgagctccgacacctctctctcgctgctgcattgttgtcgtttattctaatacctgcaagctgcatcgagatacggagttcatgtatgtttctagaactacaaagagctttcacttaggatttgagga

SEQ ID NO: 15886 - DNA, 1995 bp, Arabidopsis thaliana landsberg
  unsure (1)..(1995): unsure at all n locations
cctggtaatcctgatgctaacccaaggaagagctgcaatgccatcttgattagagaaggagatgatgtgtgggaagaattggatactgaagacgagttggagctcgtagttgcagagatggtgtcgaccgacaccctcatgtgtcgatcgacaccatatgggacacttttctcagagacgactcaatacgacggtgtcgatcgatacccgtctagtgtcgatcgacactggatccggattgcaccttgtgaggtacaaatacctatgcagcccgaatctgtctacactcctcctgtcccctatccgaggaggcgtcgttctaagcaggagattcacgctgttaagtgcacagccataatggagaagatcctccatactcttcctaaggatgcttgagggacatcttccgcctcactcaacaggtatgtcaagcaacttgttgacaatggaattagttcagatgaagctaagctgctcaccagagacatcagtgcaatcatgctgcctaaagccaaagaggagaaggcacagagagtagacatagctgaatatatctgcaccattactcctggtcagaccactgagaagcttccagatccaggtagctttgttcttgattgctctatctccacaagcagattcagccgctctttgtgtcatctgggatcaagcaccaacctcatgcccaagtctgttgctcagagactcggcatgaatcactatagacctactcgcattactcttctcttcgcggatcgttccaagcgaatccctgaaagaatccttgaagatgttcctgttaaggttcgtaactctgttatccctgctgattttgtagtcctggactatgagaaggaacccaatgatccccttatccttggaagagcattcctagctacagctgttgctaagtttgatgtgaagagagggagaatctttctcaaggattgtgattcagagatggagtttggcatggatggttcagagcttactaagcctatcagttgcattgcctccagcacagacacacctcctcagactgatcagaatcccaccacagagccacacacaacgctccaacacgttcagctcgccaatgacagttgcagaggaacggtttcgatcgacaccactatccctnnnnnnnnnnnnnnnnnnnnnnnnnnnnnnnnnnnntctgcacattctcttcaacccacaccacttaaggacctatgtgataagttctcttctctctcttctcctgttttatctttgattaattctttagattattcgaagactacttcactagataacaagcctagagttcctcgaaagcttgtttctcctgttgtatttgcaggtgacgagatgagtgtcgatcgatacaccgccttggaagctgctcagactgctccaaccagatccgtttacacaccgccttggaaggcgaggaggcagcagcaatcctccaccactccacccacatcctgaactccgccaagtcaagctattgactcaaaacaagcgcttagtgggaggcaacccactggtttgatttttcttttccctttcttttattttcttttatttttatttaatttctacgatttctctggatttgaatgctactggggacagtgtcgtttaagtctgggagaggttcatactaatattgcttttaattttgtttcttatcatttttcgttttgcagttcatttggttatttcttttatatcattctaaaaaaaaaaaaaatgttttattcagtttagttcggaattatgatctatatttctcttgtttattgcctgattgatgagtgttgcagcttcgagtcaatccgactattggaaaatctagatggcaaaccaacaaacttgaggatatcctagtttccaactcaactactaaagagggattgagacaactttctgatagtgtataggggtaccaatgtgattaaaaagattatgttcctctccattttaaaaaaaaaatatattgagaga

SEQ ID NO: 15887 - DNA, 991 bp, Arabidopsis thaliana landsberg
atattccagtttgtttactgcaatgtttcagccatatcttaacaaagtttaaaaatcttgagttagttctttgtgaggcagatgaaattatttcaactcagatattatcatatgcaaagatggcaactaatctctccctatagtccgaccatatcatgattttattacactagttggttggttgacaacaacatcaatagaattttttacactattacaacaatttcaacatcaaacatttcaacatttcaatttcaaaatcaatagaatttatttcctgagaactctacaaagagagactaccattggactttacaaaactaaaaaaaataacataagttctcatctcttcaatttcaaaattttattcttaaaaaaatggtgagagtcccttaagaggctctcaccattggagatgcttacagtcacatggtgagaagtgagagaacttcgaagaaaaagtttattttgtagagtaaaactaaataactaaataaagtatcaatcatttgacaaatatggcctattagctcagttggttagagcgtcgtgctaataacgcgaaggtcacaggttcgatccctgtataggccacttttttatttttggtaatccacaacttgaaaaactcgatttgtgatttttggggctaatacaacatgtgatttatatcagctgtaatatctgactcgatttgtgattatattatatggtcactaaccacaattattttctttaaacaagatataatcaaatgaatcatgcctaacattttacatgatatattacacatagaaaatctggccaacatttaaaaggctctcctgaggaacattgaagatggcactgttttctctacaaatcttcctaagaaacgcataaacataatcaatggctatcctcttgtagaaccttgcctctctcctggctcgaaccactgtgttccccattatatgcaccactcctgcgtctctgcacccgtttatgaact

SEQ ID NO: 15888 - DNA, 581 bp, Arabidopsis thaliana landsberg
  unsure (1)..(581): unsure at all n locations
tgttattagtccaatggtcttggaaccctagcctttcattaaaccctcccctgaattcatctctagaattttgatgtcatttaagtttagataatcattttgaaaataaaagaaaaaatagaaatgatatttgttagttttcatcaatttaaaataatttttaagttatttacatgtaactgttgtatcaaacatatcagagagagcaactacaaaactttnnnnnnnnnnnnnnnnnnnnnnnnnnnnnnnnnnnnnnnnnnnnnnnnnnnctttaaaaaccttggcagagcgagattgagatgatgatgacgtcgtcgatgcgaccgatgttgatttgatcgattgataaccataagttatatgtgattctaccatttatattgttaatttttaatgattattgatttaatgtttcaatttttatattatataggtgttttgtataaacttcatataatgttcaaaaaaaagaaaaagaaaaaaaaaagaaaagagattaattccaaataaatatgtacatactatctaagtagattacagattaattataaaacaatcaaagaagaaaatgtctatcg

SEQ ID NO: 15889 - DNA, 508 bp, Arabidopsis thaliana landsberg
gcttgtacgatattgaaatcaatttttgcaaactcgatcaagacaagattcatgtcatgtttattctcatatgcatctatgtaccatctcgtgtctagccttctcattctccaatggtacggcatttctaaagcatgatacgccttctctcgtacctcaatgtttttagtatcttcatcatcaacaaattttcttatttgttctgttgcaaaaggtctgatgactttatgcaatttaatatccgatttcgtggaaagataccacgcttcgtacaaagaaatgataccgtttatattgttggtcttgaacgtattactttctatttggtcgatgatcacatcaaatatatctgaaataaaccgttgttcagttaatatatgatattgatcacacaacaaaatttattatatatagaaatttaaaatttcattatattatacctactttctgagacattaaaaccatgttgtctaaaaagtcggaattcgagtgaggttgcatgtaaatc

SEQ ID NO: 15890 - DNA, 2219 bp, Arabidopsis thaliana landsberg
taaaaccatagtatcaaatagagacactaaggtccttagttacttttggaagacgctttggtctaagttaggaactaagttgttattctatactacttgtcacccgcaaactgacggacaaactgaggtagttaataggactgtgtctacactcctacgtgcattgataaaaaaagaatttaagacttgggaggactgttaacctcatgttgagttagcatataatcatgatgtgcattctgctactaatttttcaccttttcaaattgtttatgggttcaatcccattactcctttggatttaatgcctttacctttgagtgtaagagttagcatggatagaagggagaaagcaaagttagtgcagcagattcatgagcaggcgcgaaagaacattgaagagaagaccaaacaatatgctaagcatgccaataaacatagaaaggagcttatcttcaacgaaggagacttggtttggattcatctccgaaaagagcgttttcctgaggagagaaagtctaaacttatgccaaggatggacggaccttttaaagttctcaagaggatcaacgataatgcctactctatggatttgcaaggtacgtataatgtgagtaatagttttaatcttactgatcttgttccttttattgtagatgaaacagatttgaggtcaaatccttttcaagtgggagaggatgatgtgataatgggaagcttggatcatggaggtaaggagcagcttgaagaagggaaagttatcaaccactcgatcaagcatgctgttgaagacttgagggagcttgaatctaatgactcgatggactactcgacccaacatgaagatgaactgcttggagctacaaaaaaggaagcaatgcatgttcttaatggtccaatgacaagatcgaagactagactactaaatcaagatatcactacacttctacaacacattgagggcagtcttaaacaagatgcttgtcaaaccacgttggttgtgattcaagcggtttaagcgacaacaatggaggtgtgtgacttgcactctttttccctcctcttggttttgtcccattgggttttccaagagaggtttttaacgaggcaagcccacacactcttatcatggctcattgttgttttaaagcccattagcaaaggagaaacccaaatttcgtttttgtgtgttcatttctctaggatgactcttcctcttctctagggctcctctacttctctatatattctattctcttctcctatgtaaaactcatcaaactttttatgatcaaatctttttctgaattgttagatctgaagggtgtgtaatatctcttcaacttgtgattgctttggtgcgtaatatcctagcaagatcgagcctgaaagttcaagagtctttgcgcaactcttggaagtttcactttatccatttctgttggttttcatcatcatcattccatcttcaacccttcaacttctgcacagatccattcattcaccatatcattatcacttcatcacaatctatataaagagacttcaagggactggatcttaacacccaatgtcatatcataatgagtccttgaactcatcttattcatcaaagagaacgtactcaacaagagaggaagttgaaaggagtcaggctgaatggaaataacgagagtacagaacaacaagtatcaaagaaggctactcaaatagagagcgaacttctggtgttggttctacggacctcagagataggcttcaaaattcaacaagttttgtaagaagttcccaaaaccagcagctccaatggcgtgaaaagatgcattcaagagacaattttaggcaagattcctttgaaacttctagaacaaaaagaccacctctggaaaaggagtttgaaaaaacggcgttagctctcactgacaagtcaccatttaccacagaacaagtaataggagaattaagggaagcaacagtccagtataccagctgttcggacccgatagagagtgctgccataaaacaaagagttattcaaggggaagcaagaggattaatgccaaaaatgctgctaaaattatagcggctgctacctgtaataaccaagaagatcccttacctctagagcaatctgttataatgcctatttcaagtcagattaatggaataacagatatgatacccaacgatgaaactcccattactgcgcccctggtgga

SEQ ID NO: 15891 - DNA, 1120 bp, Arabidopsis thaliana landsberg
  unsure (1)..(1120): unsure at all n locations
ataaattatattttgttattttatcgtcaacttctttcacaatactgaaaaagttgcaagaagataactcatatcatacataaaatattcatacataatgttttacactaattcaattattattatttggtacactaatatagttcaattattgtttggagcagatttggggttgtgaccaaatttctttactcagatattcttctatttaatgttttaagggaaatatatgcttatttgattaaatgcctaccaaaaaaaaaaatctctattaattaaatgtctataaaaaaaaatctctattgattaaatacacatgcactcattatctttataaattggcttcttcttccccctcgtaacataatatagagtcatagacagatacaattattaacacaaaaaagaaatggcaaagacaaacttgcttctagctgcaactttacttctgtgcttcatcgttattacttcctttgctcggccagatccgaatctttactcaccggtattaactcaattagatcgattttcacatctatctttttttatttatatataaaaacattgaacacacacgtaagtcttcaaaacaatatttcaaagactaatgatgaacattaaaactaanacataacaaagatatatatatatatatatatatatatatatatatgtgcatgccgctctctctagattagttagtacgtaccctggtttatttggtacttgtctaaactgcttttataagcgaggaatgtgatctgtgcatacacatcttttggattggtgatgagggttgagttatcgattcttacgtaaaccgaaacgtacgcacccgagtccgttggaatgtatatgactgggtagattaggaacgtccttataacatttaagcagatatatatatatgtcaaattatatacaaattaaaatttgggtgaaattcagagcaataagttaaaatctctcacatcgaaagtggagatgatcaaaacactaatatataaatgaaaaccctttgacaaaaaaaaattgtatataaatctatgtataaggtatggtttctcaacattttgaaatggaagccaactcgtacgtaccaattgtatccaccgacggg

SEQ ID NO: 15892 - DNA, 524 bp, Arabidopsis thaliana landsberg
ttaagttttaactgcaattagcattccgttatcattgttaacggtcgttaattcggataactgattttgccaaaatttaaaaaataaatgaaagttttttaaagacagaaaaattaatttagatattttcaggaaaatttaataatgtaggtattaaagggacaaaacatgttaaaaaaaagtattaaacggacaaattaaaataagacggtggtctttttggtttttttcttaatctataactaactacacaattcggtgtttttattttctctagtaattttaaaatttaaaatgcaagaatagcatatattaataaaaatttcaacaagattacttacaattaaatgaaaaaaatattattatagatttaaaagaaaagaattacgtttttcaaccggttaatcaggctatgatttgataatacgatgacaaaaaaaaacaaatcacgtaggaatcaatgattccacctcttgtatttgatgtaagagagattagcagttttacatttcttttcatatttc

SEQ ID NO: 15893 - DNA, 1506 bp, Arabidopsis thaliana landsberg
ctattccacgtcaccgtagatggtgccaaatgacaactataccctcagaacaatggataaatttgttctgtttcgttacttcctcaaatccaaacacacaaaacagaggaatttacgagattaaggaaccattgtgacgatgcctaagtttctacacacccatcaatctcacttcttcttcctccatcatccgacattgttgcttggatattgagaagctagtcttaggtaggtaggttcctatatgagtttgagtaaacgacggtgatacatttgagtgttgttcagctaaacaagcttttgaatggtgagcttgtctgtttcaaatatgagatacacgaaagttagagtaagccgactagagaagccattgacattttgaccatgtcattacaaacggaagcagagcaactggtttatgggggcttgtgcttgtggcgagttctacgtaatttttgcttgcaatttccctgcgagactgatcactgatgtgctttccttctctcgtgacaacaatcttcaatcaatcgagttcactttttagttcgtgactccctaatttcacacgatcaaagatctcgcctccgaaacgctttcaccgaaggattctttcaacggcggcgaaggatatgattacacgacggagaaggacgatggccaagagagggatagtgaaattgacgaccagttggcagattctttggctttaaaactacaattcgactgcggaggaagcagacgaatttgtgtttcatcgatcgatccataatcatgatcaccagcgagaaccaaggtttgcgctttcctaattttctttttctgtaataaaagatttttacttttaaaagatttttttttatgtttaattttatttatttttatactgaatctacataaagagatgtaaataaaaactaaccggattttggatccagctttggtcgttagtgatttcaaatattcaacttgttttcatatcatctttatatatatttggtatcaaagtttcttattcggatttttaaagtcttttgttttgttttgtttgatattaaatttacaaaaagatatatgaaactaaccggattttggatccaacttcggtcgttagcgattctaaacattcaacttgttttcatatcatcgttatgtagatttttgtaaccaagttttttatttggattttttaaaagtttttttggttttttttcttttgtttgtttgatactaaatttacataatgatatataaaaactaaccggattttggatccaacctcggttgttagcgattccaaacattcaacttgttttcaaatcatctttatgtagattttagtaaccaagttttttattcagaatttttaaagaatttttaaagttttgttaatttttttcttttattgtgtttgatactaaatttatataaagataacgccatttatatgtgtatactacatttagatataaatagagacacattctttttttataaaacgcccccatg

SEQ ID NO: 15894 - DNA, 767 bp, Arabidopsis thaliana landsberg
agttgtttttctggatagccggcggtgcgattcccttcctctgacggtgatcacgtggtgcatctccatcaccgatgttggcatggccattttgttgattctgttcttcagccatagcgagtggttgctgaggtacagggttgactgtggttcttttttttctgatttcgcgggctgtgcggttgatgttgtcgttgaaaaggaggttctagttgcctgttgatcgagttcgcatacaacagagctgtacctggatcaagaagacaacaagaaaaacacacagttagtaactgaaaagaaaattgaaaaagaacttgatctaagcaagtctgaaatcttaaaggtaacaaacaaacacccaattggcaacggcgccaaattgataataggtttttagtcaattatcctaaaacaccaatcatatcgttgtagtattttaggttgccaatccaatgggtgtgatgctaacaatcaagatgtgatcagaagtcactaagtcaagccaagcaataacaggttttggtgtgttctaacagtcctaagtgaacatgcagaaaacagaaaatcaagcataaacaaataaacactcgaccaacacagctcgttgtagagcattgggtgtggtcgagtgacaggtcgagtaacagacagaaaatgtaacagggatactcgacggcacagtctgttgccagacaactgtgtggtcgagtaccaagtcgagtaacagtaaagaattgcagaaactaaacaacagatgacaggatgca

SEQ ID NO: 15895 - DNA, 804 bp, Arabidopsis thaliana landsberg
aggaggaaaacaaattaagcaaattcaagtagttaaggaaaagaaagtatgtaagaaattaagcacgtaagctaggtatcaagttaaccatgtaagcaagaaatcaagtacacagtgaagcaagaagctaatgaggaagcaaggaaaaaaaaaaactaagtaaacaaggaatcaaaggaagtaaacgacaaaccactgaacctgttaattaaacaaggaatgaagaaagcaaagaatcagaccaagaattaaggaagcaagcaagctcacaaggactgaaggaagtaagcaacatacctctgaagttggtaacagaacaagtaatgaagaagtaaaatgagtaaagcaaacttggattgacaaaaaaaaaaaaaaagtaagcgaagaatcaggcaaagaattaaggaatcaagtaagtaaacaacgactcaaagaagcagagaagaaattatagatgtgtaaaagtaagaaagtatacatattatacataagcgtagatgtatgtttgcaatgtagattatgtatgcatttatgtatgtaagtatgcaggcatgtatgtatgcaagtatgtgtgtatgaatgactgcatgtatgtatgtatgtatgtatgaatgactgcatgtatgtgtgtatgaatgaatgcatgtatgtatgtgtatgcatttggttgaatgattgcgaacaacccataagaattctgtggctcccaatttgttgttgcagaagaaaagtgaccaacatcaaactctttgcaaaggagatagagtcgccaattgcttcgtacaccaaaatttgagaaaagaa

SEQ ID NO: 15896 - DNA, 2958 bp, Arabidopsis thaliana landsberg
ggttgtctatttgagctatcatcatagcgtttccgggatgcccttggtttgtttggccatagagcgattgatatgtcccgggttttactgatttctaacacactttcagaatggtttttagagtctttctagtctttttcgtacgttttgagtcattccaggtacactcatacatcagcaataaagatcttgaaggacgtttttcagaagctggtgtcgatcgacaccacagctgtgtcgatcgacacctcgtcggtgccaggagaatattcgttttacacctagtctttgagatgccctgaagttttctttatttgcaaaatagtccctgcacgtttttagagttaaatacctaattgttttgtcattattagacctagtttttgttcttgagcttttgttacactttagagaaaagaatccaatccctaaagagaggattatgaactcctttgctattattcttaattcatcaatgaaaactattcagattatgatttgtgtttctattgtcatgtctgagtaatcaccttgttgggtccagggagtctcaatagggatttagatggattagtagatcgaaaaccccttaggattattcttagagttcttcatcttgattattcttaatgataggtttagattgatcacctagaacttgatattagataataggtattcccgccataggtatttgttatttgaaccatcatagatgagcctaggcatttaagaaagaacaggtaggctcatagaagggctctggtttagatactaggtgaactaatcaagcttattaataatacatgctttagcataggatttctcggcttctccggttatcttagttgtaagtatagagtgtttcgcggaacaccaccggtcactctaaaattatagtttgagtttgagaatggtgcgataacaatcctaatattagctagatttacaatttatctatctcccgagacaattccttaaacccgacgctttaatcacttgaatttacacctcgtttacttgcttatttgtcttttacattcaattacttcatctagcttattaaacaacatcataagtctattgtgtgaatattgagagctcagtggaattcgacccttaagtgctacgacgatctcttatttgcgggagtaagcttaacgcaatttgagctatatcaacctctttatccagattgcacaaacaacagtaatctctactattgtttcactctttaggctaaagactcagggtggttggtctacttgagtccttgtcaaatatgctacccaagggtaatgtcttgcacatatccttgtacgaggtgaagaagttttttaaaacttttgatatgggttatgaaaagatacatgcttgtgtaaatgactgctgtttattcagaaatcagtttcaggagcttgacacttgtcctaaatgcaattcttcacgatggaagattaacacgcgaactggtgaggtgaagaaaggtaatccatagaaactacttaggtactttctgatcattcttagtctcaagaggatgttcaggtcattaggcatgcagaagaacttaaggtggccctttagtaataagagcgctgacgagacattctgtgacgtgggatcgaatgaatgataaatacccgtcttttgcctgtgaagaaaggaatattaggcttggactctccacaaatgggttttatcctttcaatatgaagaatgttaactatagtgcatggcctgttttgttagtcaactacaacatgccacctgacaagtgtttgaaacaggagaacatcatgttgacattgttgattcctggtccaactcaacctagaaacaatatagatgtgtatctagaaccgctaatagatgatctcaaccatcttttggaaaagggagagttaacttatgatgcattcagtcacacaacattcacgttaaaagcaatgcttctgtggaccatacatgattttcctgcatatggaaatctagcaggctggaaagtaaaaggcaaaatggattgtcttgtatacgggaagcacatatatagtttgtggttgagtaattgcagaaaacacatgtatatatctcatcggaagtctgtgtcacccatacatgtttataggcaaaagaaagcattgtttgatggtaaagttgagcatggaagaaaatgtaggattctgactggtcataacatatatcaactactcaaaaaatacaagaatgattttggaaatgtaagagtaaatggaagaaagaggaagatgaacgattgtgttggatctgcttctggtactgaagaagaattcattgaatcagaagaagaggaagaacaattagatgaagaggagctacaagatggaagaagcactcaatcttattcaagttagattattggaaggtatgattgaaataatagtttttattccactatatgttcagatttggagtaagtttctaaaaataaatgtcttaaacatttttttattatctgttattattttatctaggaaatgccggttagacataacttagacgtgatgcacgtggagagaaatgttgccgctagccttgtctctacaatgctacattgtgggaagtcaaaggatggaattaatgctcgaaaagatctgcaactgctcgatattaggagggatttccatccccaagcacgtggaaaaagaacctaccttcctacagctcctaggtctttgtccaaaacagcgcttatttgacttcagaggtccgaatggctactgttctaatatttccaaatgtgtgaagatagaagattctacggttaaaggacttaaatcacatgattatcatgtgttgatgcaacaacttcttcaggttgcaattagaggtataagatgaattatgttagcttaactcttgcataatttgctacgttgtttttaatcttcaatgttatctacttacaggtttattacc

SEQ ID NO: 15897 - DNA, 499 bp, Arabidopsis thaliana landsberg
ttttctcccaaatgaactagctgtaagaaacgtcgacaatccacctcattttcacagtaactaacctgaagcagcaaaatatggaaatatatctcagcaagtagagttagaagtttagaacttagaaagcaaacacagggaatcttgccaatagataccatgcggagaaggttttccgtgttcgtttcgagcatcctccctgaacttgctttgcaattatatcccattttcatctggccttggccaagtcctccttggctaatcatatgcttcactcgaatctgaaaagatgtattttttaaccacaaacatgaccaagagcgtaggtattccccctgagtagtaacttgatattgtgtcagatttatgcaacttacataatcagtgtaactgtaatacaaaacacatgatgacctctggccgtctctaccagcacgaccacattccttgaatgagaacaaaataagactatgtgagtttctagctgatatcaggttct

SEQ ID NO: 15898 - DNA, 568 bp, Arabidopsis thaliana landsberg
gctttgctcgagtgattgtatcatcacgggtgtgtaataagatgtttaatacagggttttttaaacttattactttatgttgattggtttatagttctagattctatctattggctttgtggtgtgtcttccatttgagtttcaggttatatcaatggaggaatgcttcagtatcaaactcagtcaaaaagggggagattgaagatgcatagttcaatcaatcagctgatggcgatcagaaccgtgatggatttcaggaagctgcatcaaattccatcagacgcctgagttgctgacatggatgcaagagcagacgtggcaagctgtaacggatgatgtggagagccaagaatggaagttagcttggcgtggtgtcaaagacaagattcaccgagaagatatagaagatattgtctcgaagaatacgaaaatgaataggcttggaaacaaggaagattccatatcgtgagattctcggagatcctaaagttagggctctggagaataggtataaggattctagacaaagggggagcccgtttgagcaccctaggatatttttgatact

SEQ ID NO: 15899 - DNA, 3361 bp, Arabidopsis thaliana landsberg
tcatttcactggaccaacgaaaggagaacttcatatgataattggcgactataggagacgagtcctcattaggattttcaaccctaatattggacatacatcgaattaatttttatattagtcttcagtttcataatagattagatgtatgtcccatataaattgtaataatgtattataaacggagatagtggtaaatttcacaagaaagcacccaagtaaacacaaacaacatttccctctacaaacaaatttctctccacttaaaaaaagaacacttagaacaaatgaagcatcatagcaaccatgaatccaaatcctaaaacaagtgttttcgcggcagaggaggagtcagccggaggagagtctgcgccagcaagatcggccgttgtaccggtagtactagaagggaaggtcccgacggttttggtggatgttgtgctgctagagctacctggtgagcctgggaataacggcagagaagtccccgctgcagtagccggagatagtgccggagaaagtggaggaatgagaggcagagaggaggaaggaagtggagtagaagaagatggagagagaactgggacagggttaagaggtaaaagaggttgaataggtagaacagaagaaggtgaaggcgcgtttagagatgggacggtgtttggaagcggtgcggttggtgctacggttgcggttggaacaacgtttacttcaagtttcatcccttggctacaatgtcccggcattccacaaatgaagtacctaaacaaaatggatcaagaatttatatattgccaatcatcatttggtctttaattcatttgtatgtggaagtagtattaacctttttccaggagtagtaagaggaaccaaggagtttccattagcaaacgttataagcggtttaaccgcttgacagctatcgaattcgggttttgtgacttcaacgacgtcgtggaacgcagcagggtaggagaaaactgtttcaagcaaaaacagagttttggtttttagtcttttttttttttttgaatcaaagtttaagatagagatgtgatatatcttaccaagattgtctccaacagcaaatgtttgtcctgcagcccaagttcgaagactagctcctacagtccaaccactaggaccaccaatggtatggtcagtagctactgttaaaccaatgagtgtagtagcgaggaccgagattatgatcagcatttctctagatgccattatcttcttatatcctttttctttttgggggaaaattgacaagagaactgaaagatagatcaagagatgatgatgttttgtgcatgacatatggtgtcaaatgtgtgtctatataggggtcaaaggaggataaattattgagaagaatcttttgagataagagttggtaaataataaacttgtgtttgtatctgttgagagttagtatgtatgttggatcaagtaagcttttctttttttggttttacctaatccactataaaaccagacaatgttcatgttgctacacttgtccaaaaccagtttagttgcacctaaagcaagttcctttaatgctttatagtttatctcttacaagaacaggtgaagttaatattaatacaagagaaattacacaattacacatcttcatgtacattatagagccagtgtagtctctctctctgtaatggaagttacaagttacagtataagtaacagagtactttgtatgtgttgttattcaaaacttttcagaacttagcacaaaacaacaagaacattgagatttttatacaccggggctgtgactatgcgcgagtaatttctcatgttcactgtcgatatcatgttggagtgaaagaggattagattgatgagcagtatgcttgggattgttgattttataccacacgttctctatacggaaaaacgcccattggaatcgcctgtaaatctccaaggcagtgatgatgaagaccgttatgtagttgttacggagatgagcagataacttatatgtccatgtccaccttagtaccagattgcttccgattacccaaacatatacctgcaaaaccacaaaatccaagattgttcagacacatttggctactgtcgttgaagatttaatgaaaaaatgaaactatatattacccaacggcgtccatatagtagatgggagaaaagatttggtctggtgaatttgaaaatccgagtgaagacactacaagcaacaaagaggtaagaaatctaaatatcacactgaatccaagattggagtaatctgttttacattcacagtaccttagatcccaatcgcgtaatatatcccaaaagaaggagaagaaagtgttagctagaccagagaggatccatgccggctgtatggagtaagtccatgtatctggatcgatataatacttgagggctgagagaaagatgacaggcaccgctgttaaatacttcccagctgaaaaacaaagacaagggagagatgttagaaatctagcagaaagccaaacacaaaagaatctcttggatttggggttattaccattgtagatgtttgcaatgtccttgctatctttgtactgacgaatgcattggaacagccggaaaagataaggtagaacaagaaccaagggaattgcagcagaatgactcccgcaaaccgaatcagcttcaaaccatgcaacagtagccacctacaacgaatttatcagatacactgagcatttgttatgcataatttaaccgtaaagaagaagaaaacttactgacctgtcgatggaccatacgacatactgaacgttctaaatccgacaaaacctgcaaaatatatttgttgttgttcaacaattgcattatacatatatataggaaagacaaacaattgtgttacctttgacattgaagtcaggatatcagctagaaagaagtctgaaaaagtcactgcctgtttgtgatacacgaaaggatagttagatgatgtaagtgaatcttcaatagaaaaaaaaacaatagtattcctttacatgcacagggaagagtattcgccaaaaagtccaaagcaaatagtagcgagacgacatgtagaagatattgaaagggattatcagaataatcacagctgagaaatacaaaaccacctggaaacatccgaaaaggtcactcttatgaaaaaatgaatcaaaatctctttgaaacaactttaagagaagatgcatctattacactggttgagatgcagccaactttacatctccgtgcgagtatagatacagataggcagtcatgctagtcaatataattattgtcatccacctggcacactgtgacatcggttacatagatgtaatcaaaatac

SEQ ID NO: 15900 - DNA, 961 bp, Arabidopsis thaliana landsberg
tgtcagaatcagcctcctcaatatctccttgttctgcttcggcagcgccttgttctgcttcagcagcagggaacttcttccgatgtcaccaatccagatcgctgcattgcttctgagataggaacaatctccacaccttcggcttcgtctccctcacgctcaactctagcagtagagcgtactctggccatttaattttgaatttattgaaagatttcatggaaattaataaccttttcttccgaagctctccttctgacgaagcaaacgccaaacaggagcttcgtttgaatgcgaaagtcaagcttcggctatggttaaaatttttggcagcaaaacagtacaatagcaatgaatgctgtggtaacttcacacctacctgtctgtttatatagtgctgcaggtaagaaggtgaatcgtcaggatttttacaccaggcaaacagttgctcgcacccgctgcgcgtagggccgcaaaaaacaaatagtgaacctgcactatgggaccgctctcgctcagaaactgtatcgtttctcgacaacgagctcagggaaggtgttttttagaccttcggcgctccgaagcttaagagacttttttcacggatcaagctcgttacgaaaaacgatctagcaccgcgaaaggggctactgttgggtctatgcttcgtcgccgaaggtcttatagaaagaagtggtcctcggctgaagctgtttgtataagatagccgaaggttcctcttcgtgaagctttggtattacaaaccgacttaaagatagaatgaccttttagtccataaaggtctgggtcaatgttgtaagcttttataaggggcatgcttgtaattcctcacaggctgcgtcctgtgcctataaatagtgaacagtattccgttactgttcacgcattcgagtaattgcaatcgcatcttccggaatccaaccttttccatgacgagcca

SEQ ID NO: 15901 - DNA, 734 bp, Arabidopsis thaliana landsberg
caatagattaggctaaaaccctacatcatatttttattcgttgcgcaaaactataatgaattcgatataagcaatgattataaagagcatttcaagaaatgctataaaaaataccgtagcatgattgggttttaatcattgctctatgcatgcttattcttaggccctcacgccctacatcattattctcatgttacattttcttggtaaaagcatctaaatctttttgtagtgacagaggaaagcatatatattctcgagaacaatattccaatttatataaatattgtaagaaaaaaagagtccaagtaatttcaattagttcaatttaatgtgtattttttttctttgaaaattttaaaaaggtgagtaagaagaccactggaattgtgttttcaacatcacttcatgacctaaagcaaataaagccagagatttaggacatttccatccatgaaaaccccacaaagtttctcaaacaaaaaaaatattaatattatattataatttgattatttaattaaaaaagtatttttgttaaaaaattgaaccaataataagatgaaaattgtcatgatgggttgtagagagtatctcagaatttctcaagtgagaaactttctacactctctctctttcattttcattatttttatttttttaattgtgagaaattcttatgagatatccctaatggaaatggtcttaggatggtttgattggctattttgatg

SEQ ID NO: 15902 - DNA, 805 bp, Arabidopsis thaliana landsberg
cctacaagctcaggcacggcttcagatagtatctctgggtcgacatcgggagaggaggattggagcgagattacggaagaggcgaggtttcgggctcgctgctgagcatcactgcgatgctgagtctgacgaataagagaaagctctcggcgtttctgttgatcggagataggtcgtcgcttgaaaggacggcgaatttcatgaggcgccatttttggaagaagagttcgagcaactacgttctattggacggacccttaaggactggttcgacctaaaaacgctctgagagactctagctttggaatttggatggttgtgcggttcaaaattaaaaccaggtgtgggtaaaactgaaccggatcggtttggttttggttattaagtacaaaattcgattcctaataatactaaacggtttggtttaggtatggttcattaatcaaagtttctctataattttttcccaccgagaaaggcctatatatacaccaatttacataagctctctcatttctttttacgttctctcaaaattcatctctcgcattgattcttcaactctcaaagaatcgcaaatcttgctcttgaaataatcggaagaaagaagagtcatggtgtcacagggacggagtgattctacctccggcaagaacaataacccgcccgacggaagcagcggcaagagatctccatcttctcccgcagataaatctccatccaaacgccaaaaggtttctgatcggagacattatttcttatccatctttcgagtgccatctggagcttctggtttgacaatttt

SEQ ID NO: 15903 - DNA, 739 bp, Arabidopsis thaliana landsberg
aaattccctcttctatatttcgattttcttttttggcgtggccgagaatttggaataggagaggtggttttagaaatctttccatggatactttggtacatctggaaaagtagaaaccgttttgtttttgagaacataagggaacctccccttgaaaccttaggttgggcacttcaagaggcagctgcttggaaacaagcatccctaaaagatgatgatttcattcggccaagtccgttcgtaggttcttcttaaatcccgccctctttgcttcctgaatgtcaactcgatgcttcatggcatgtagatgacaccttgagtgggcatggttgggtacttgttcgtcaagacttggtcatccaccttggctttaagagctctcgtcgaatttatcaccgcttcatgcggagtttgactatttgttatgggcaatggagtgcatgatctctattggtgatacttctggtactttttcttcgtattgctcagacttgattgctatccttgataaccaagacgattggccgacttttgcagcggaattggcttcatatcgtttttagtttgtttttttccttcttttcgtattagatttcttcctcgttgttctaatactcaagcagatggtttagctaagaaagctcgggttcgtaatagtctttttcccatgtaagcacatcgaatcctgaatggctctctctagcggagagtctctttccgataatttaatataaatgat

SEQ ID NO: 15904 - DNA, 1628 bp, Arabidopsis thaliana landsberg
  unsure (1)..(1628): unsure at all n locations
ccccttttttataaatccacccttctcttggctactcatcaaacatttgctaatattaaacacttttgcttttacacaaaaacattcgataaatcatggctgttgattcgcttcttcaatctgggatggcttcaccgacgacatctgagacagacgtgaaggctctcaagttcatcgaggagatgactaagaacnnnnnnnnnnnnnnnnnaaaggttcttggagagatactgagtcgtaactcgaacaccgaatatctgaaacggttcgatcttaacggggccgttgataggaaaacgttcaagagcaaagttccggtggtaatctacgaagatttaaaagacggatattcaacgtatatccaacggtgatcgttctccgatcttgtcttctcacccaatcaccgagtttctcacaaggtatgttacttaagtgcaaccaactttatcaatgattaatatcgttttttttgtttttacaactttatcaaggagaaccaatccccttgtactactactaggtcaccatcctttagtaatgactaatacgttgttataaaaaaattcaatgacgtgattttgatcaccatatacaaattttttaaaaaaaatatacttatagaatactatactgtgttttaccgtaattaaattataatgttttgtgtgtattgcagctctggaacatctgctggcgagaggaaattaatgccgacaattgaagaagacataaaccgacgtcagcttttaggcaatcttctcatgcctgtgatgaatctgttagtatatacttttaacattattaaaaaatttgtaacgatttattaaactaaccaaacaatgtcttaactacagctacgtgccgggattagacaaaggcaaaggtttatacttcttatttgtgaagtcagagtctaagacgtcaggtgggttaccggctcgtccggctctcactagttactacaaaagcgactacttcaggacgtcggattcagacagcgtctacactagtcctaaggaagccatcctctgctctgactcatctcaaagcatgtatacgcaaatgctatgtggtctcttaatgcgccatgaagttaaccgactcggtgcggtgtttccttctggtctcctccgtgccataagcttcctccagaacaattggaaggaactttctcaggatatctcaaccggaaccctaagttctaaaatctttgatcctgcgattaaaaaccgaatgtcaaagattttaaccaaacctgatcaagaacttgctgagtttttgataggggtttgttcactagagaattgggaagggataatcacaaagatatggcccaacacaaagtaccttgatgtgattgttactggtgcaatggctcagtatatcccaatgttggagtactatagcggtgggttaccaatggcaagcacgatttatgcttcatccgaaagttacttcgggattaacctaaatccgatgtgtaaaccttcggagccttcttacacaatctttcccgacatggcctacttcgaattcgcccacataaccacgatggagatggaggagtagaagcaactcacttgtggagctagctgatgttgaggttggaaaggagtatgacgttgtga

SEQ ID NO: 15905 - DNA, 884 bp, Arabidopsis thaliana landsberg
tgcccatgtgtgccacgaatgggactccgacgagagctccaccgactcctcctccgacgaggacgccgccaacatcgtcgtcaccaagggactcctcttccccaacgtcggccaaaagtgcctcatggcaaaggacgacaaaaggaagaaggtaaaatcaaaatcctccactaaatatgaaacctctagtgatgaggataattgtagtgatgaggaggataatttgcgcatcctttttgccaacctaaacatgcaacaaaaagaagaattaaatgaactaattagtgcaattcatgagaaggatgaactcttggactcccaagaggacttcctaatcaaggaaataaaaagcatgttaaggttaaaaatgcttacactctagaagtagaaaaatgtcaaaaactatctagtgagctaagcacttgccatgagatgattgacaaccttagacatgaaaatgctagtttaaatgctaaggttgattcacatgtttgtaatgtttcgatttccaatcctagagataatgatgatgatttgcttgctaggattgaagaattaaacatttctcttgctagccttagagtagaaaatgaaaatttaattgctaaggctaaagaactagatgtttgcaatgttacaatttccgatcttagagataataatgatatattgcgtgctaagatcgttgaacttaattcatgcaaatcctctacatctagtgttgagcatgtttctatttgtactagatgtagagatgttaacattgatgctattcatgatcacatggctttaattaaacaacaaaatgatcatatagcaaaattagatgctaaaattgccgagcataacttagaaaatgaaaaatttaaatttgctagaagtat

SEQ ID NO: 15906 - DNA, 1064 bp, Arabidopsis thaliana landsberg
agaacagatttgagtttcgggttttttgatatattgacttttgattcctctggtgtagcaaattcaggtaacagtttctctctttgtgtacatgatatgacctggtcaatgacatgtttgaaacgtccatcaggtttgccgaaaacccttatttgaatcccgagtctctcgtcggctttcgacaaatgagcgtggtagtagtcagtgaccatatcccaaacttcatttgtagggtgaaaaagataccgagccaagtggtgaaagacggtttctttctgcgggaacagcttaactagttcggtttggaaagttggattaaaccataacgatggaacaaagtaaacattggcttgaacaatcaaccatgggactttgtcaatcaaactttgatccttttggcagacaaacagcttatcactatcccttgaatcatgaaggttatgcatgtatagatgcggcgggattgaagtcgagttgatggaatgtttttcagacattgttccgtaacaacgaggatattccttattgtagccccaagcataagtataattcagcattggaaagtcaagcggaagcaaccatgaagtacctggaaatggctcgcataagagatcactaacatccttgcggttgtcgacaagaatgattctctcggtcaagagagcgtagaggaaaacagaagcaagagtaagtaatctgtttccaagcccgtaacctgccacccatacaatgtatctgcattcaccatttgattcgcttgcatcatcacgactaagtttctctattgcttctttgtaagattttgtatctggaccgcaacgtttgtgaagcatctcatagcttctaagcttagagactagatattcagaaggcttgtacggggatggcttgcggtacaagaaatatttatgatacctactcaagcaagaaccttcatcaaaatccgcagttaaaagccctcctataagtttatccaccggtttttcggtttcctttatgtctactacaacaaaatgaaaacataaaaccaaaatgaggattcattgacttaacaataaaacaca

SEQ ID NO: 15907 - DNA, 950 bp, Arabidopsis thaliana landsberg
tctacaactcaatattcttcactcaaaacgcaaggacaacgttacaataacacacaacaacacgaagaacaacaacaacaacaacacgaagaacaacaacaacaacaacaagaaacatcaaaatgtcgatctttctctgtttcctcttgctcttacctctctttcttgttttttacaaaagacttttaccgtcgaaagggaagcttcctccgggacctataggtcttccgatcatcggaaacttgcaccaacttggaaaatcccttcatagatcttttcataaactctcccaagagtatggacccgtgatgtttcttcgtttcggtgtggtccctgtggttgtggtctccacaaaagaagcagctgaagaagttctcaagactcatgatctcgagacttgtacccgaccaaagctaacagcgaccaaattgtttacatacaactacaaagacattggcttcgctcaatacggtgatgactggagagagatgaggaagcttgcgatgctcgagctttttagctcgaaaaagctcaaggctttcaggtatattagagaagaagagagtgaagtcctagtcaataaactctcgaaatctgctgagacacgaactatggtagacttgagaaaagctcttttctcttataccgctagtatcgtatgtagactcgcttttggacagaacttccatgagtgcgatttcgtcgatatggataaagttgaagatcttgtgctcgaatctgagaccaatcttggctcattcgcgttcactgacttcttccccgcagggcttgggtgggttatagaccggatctctggccaacattcggagttacacaaagcctttgccagacttagtaatttctttcacatgtgatcgatgatcacttgaagcctgtgcaatctcaagatcattcagacatcattggtgtcatgttagatatgatcaata

SEQ ID NO: 15908 - DNA, 930 bp, Arabidopsis thaliana landsberg
tctacccgctgtataatgcaagttaaaattataaataagcagattaccatcactatggatgtaccttctcacatacacacctatcaaaaacttaaaacctttcaaaacctcttggtatattcaaattaggattcttcattcatggaatcattattccaagggttttgggatgtcttatgaaatgattttggcaaaagaggatgtaaatttttttgaataaaaagtagtcagcaaaacatatgttttattgggattttttagataattaaatcagagaatagggctgggcatatgagtaacccattcgagttcgggtagaacccgttcgggtttgggattaatgggtatatgatttactacctaatagaataattctaaatattcggttcgggtcgggtccagttgggtttgggtcagtttggataaaaagtttcaggccctaaaaatactcaaaaaaatagaaacgggtattttgtatgtagatagtgcgtctctaaacaaaaaaaacttttaaatttattaagttttaataaatttaattatatttgaatatattttactaaattttgacaaatataacaaataattttgataaacatagcaaacataacaaagtatacaatgtaatttatacaaaatattaatgcccgtgctatacagcacgggttaagatctagtcctaatatattttcaaagtcaaatacaattttaaacagaactttttacataaaaataatcagaatcataaatgtaactgggagacaaagatacataaactgataaaaagaaataagatgtacatatagaatcaaatcaatacccacttctcgtaaaacccactcatcgttatattttatacaagataagataagacttaagagtagatgttaaactatgctaatgaagcaatttaaaaacaccaaaaagacc

SEQ ID NO: 15909 - DNA, 3862 bp, Arabidopsis thaliana landsberg
tcttaaaatggggctgacagtgaagagattgtgagaacaaagacgacaaatgggcgattgattgaagaataaaccttcgttctctctcggaaatgacgaataggaagaaggaagtaatagatgtcgattgctccgagaagaaagattttgtgattgattggtcttcggctatggataaggaagacgaagttcccgagctcgagattgttaataccaccaaacctactcctccgccaccgccaacgtttttctccgacgatcaaaccgattctccgaaactcctaaccgatcgtgacctctacgagcagctagagcgtaaaaaagcgatcctgacattaggtccgggcttacccgacaagggtgagaaaattcgactcaaaatcgctgatctcgaagaggagaagcagcgtagagttttagaaggctcgaaaatggttcgcattctgattcaattgcatgcttagttcgtttgattttcttagatatgttactgttttaggttggggttttcaagtttatgctaaagtttggctttttttgagtacatttatgtgtatctttactggtcttacctcatagtccaagctagattcgagctcatttatgtgtatgatctatagtcacagaacatctatgtgttcgagctcatttatgtgtttgaatatgaatatgatgctacaaaagacttttttggcaggaggtggacagaagttctaaggtcgtgtcttcgactagctcaggtattcttggtggataatgttaaagttgtttgcttctaacatagtggttcatttttctgtatggtttttcgatttatctttcattttttggacttaagtttgatgagccatgtttcatgtaggttcagatgttttaccgcaaggaaatgcagtttcaaaagatacctctagagggaatgcagactcaaaagacacctctagacaagggaatgcagattcaaaagaagtctcacggtcaacattttctgcggttttcagtaaaccaaaagtatggagcatcttttttttttttttgttcaacgtatggagcctctatattttgcaattttaaaactgttttggatgggtacttcttcatgatacgattttgtaatctgtgttcaacagacggattctcagtcaaagaaagcctttggtaaagaactagaagatctgggatgtgaaaggaggaaacacaaggctggtagaaagcctgtaacaaggctgagcaacgggtggcggttgttgccagatgtagggaaagctgagcacagtgcaaagcagtttgattctggacttaaagaatcaaaagggaataagaaatccaaggaaccttatggaaagaaaaggcccatggaatcttcgacttattctctgattgatgatgatgatgatgatgatgacaacgacaccagtggccatgaaactcctaggttcgtttccaactgtttctgctactagtttgttgttttctctaagggttctcaagtttaccactgctggttactgcaattttgttgtgacatgacaatctggtacataatagaatgagatgtattgtaattgctcaacttctttctctcatagggagttgtcttgggaaaaatctccatcacaaagttcaaggcgccgtaaggtattcttgcttactcccgctactgtatatcttgcaattgcagtttttacgtagtcattatagtccttaagaaatttacaccagcagaagcatgactcattttctaaaccttcttgttatctcccaacagaaaattttatgaattccttaaaaagacttcagttttcgaacgtttgattcctctctagatgaactgcaggatttatacttgccaggaaaacttcctacttgactatatcatttatttggcttctttaatattgtctttactccaactcatttgttatgttgtttttcttacttattgatgatattccctaaaaaaactatagaaatcagaggacacagtgataaatgtggatgaagaagaagctcagccttcaacagtggcggagcaagcggctgaactgcctgaagggtaaatgtgacctattttctctttagcctcattaagttacaactggctatatataaactaatagttgataaaacatgcagcttacaggaagatatatgctacccaacaaggtaaatctatctcaagactgatctaggctaacttcctgtaaatttgtaaccctcaaaagatttaatgcttggtgattcagggatgatcctcactttgttcaagtttgtcttaaagatcttgaatgccttgcacctcgagaatatctgacatcgccggttatgaatttctacatgaggtattttttggagtgatagacttgccatatatgtcatcttatattatgctagcgctatttgcatgttatttatataactattgtcctgttttcttttggtaggttcttgcagcagcagatatcatcatcgaatcaaatctctgctgattgtcacttctttaatacctatttctacaagaagctcagtgacgctgttacgtacaaggtgattagaaaaatgtgatcctttaaaaataattatctgttggcattcttgcgattcaaatttttatcattgttatttatgttaactggtctatttatcttgtcctttcaatgaaataggggaatgacaaggatgccttctttgtgaggttcaggcggtggtggaagggtattgatctatttcgtaaggcttatattttcataccaatacatgaagagtaagtatctttccttttagcactctactttcgattttttcgcaagagttctcaagaattcagattcttgtaccatgtttcagtctccactggagccttgtgatagtttgcatccctgataagaaagatgaatcggggttgactatacttcaccttgattctctaggacttcactcgagaaaatcaattgttgaaaatgtaaaaaggtgagatgctaggggctttacccgtgactttatgttctcacatgcttgacgttgtatgcatatggtttcagttcataaaaggaaaaattattacactggcttgaaaatgtacgacatttactagtttctatgtcaatttgttgtaggtttctaaaagacgaatggaattatttgaatcaagatgactattccttggatctgcctatctcagaaaaagtatggaaaaacctccctcgtaggatcagcgaagctgttgttcaggtcagtcttttaccttcttaatcccatgattcaaggaactttgtttatacggtttcttcggaaatatgattatattcagacactagaaccacaggaagttcaattcgtcttatgatattattctctttgtgcaaccaggttccgcagcagaaaaacgattttgattgtggtccgtttgtgctcttcttcattaaacggttcattgaagaggcgcctcaaaggctgaaaaggaaagacctgggaatggtgagtaatctcaaactcttttcctgataccgaatcacatatcttcttcttactcttgtctaaacttgtgttctcaatgtatccagttcgacaagaagtggtttagacccgatgaagcctctgctctgagaatcaaaatccgaaacacgctcatcgagctattccgtgtcagtgaccagacagagtaaaccagtacagattatgcagcttcaaatcaagacatttctcaccgctctaacagagttcaagtttttgttcttgtatagacttggcagaagtattatttgggccaaaagttaaattaaaaaatggctacagactccataggttaatgttgtaatccaaaaaaaaaaaatacctttgaacttttaattgtagtttcacaaat

SEQ ID NO: 15910 - DNA, 4427 bp, Arabidopsis thaliana landsberg
agggtgttgattccggtgaaacgtttgctccggttgtgaaaatgacaacagttagatctttcttatcgatagtctctgctccgaactgggaggtgcatcaaatggacgtgcacaacgcattccttcacggagatttagaagaggaagtttacatgaagcttcctcctggattctctaaacaaactgatggaaaggtatgtcgattacgcaagtcattgtacggattaaagcaagcgccgcgttgttggtttgctaagcttgcgacctctcttgaagcttatgggtttgagcagtctctgtctgattactcgctgtttgtttataagacagaagacatcgaggtaagagtacttgtctatgttgataacttggtcataaccggaaatacaattggtgcgatcactaatttcaaagagtatcttagtaagtgcttctacatgaaagatctaggagtgctaaaatattttttggggattgaagttgcaagaaattcagaaggaatatatttaagccaaaggaagtacgttctcgacatcttgacagaaaccggtttacttgggtctaaaccggctacatttccactcgaacaacatcaacaacttggtttagcaaatggacctcttctctcacatcccgaacaatatcgaaggttgattggtaagctgatttatctgggtgttacgcgacccgatctttcttactcggtgcatgtactttcacagtttatgcaaactccgcgtgaagaacattggaaagctgcacttagagtggttcggtatctcaaagaaactgtaggacaggggattctactttgattagattctgatctcactctttatgggtggtgcgactccgattatgctggctgcccgttaactcgacgatcatcgacgggctggttcatacaacttggtcaatctccgatttcttggaagacaaagaagcagcaagtggtgagtcactcttctgctgaagcggagtacagagccatgtcttggacagcaaaggaattaaaatggctcaaagcacttcttcttgacttaggcgtctcacacactcaaccaatgcggctttattgtgataacatggcagcattgcatatcagcgcgaatccagtctttcacgaaagaaccaaacatatcgagaaagattgtcactttgttcgtgacgagattaaatccgggaatattatcacagctcatgtttccaccaagatccaacttgcagatattttcacaaaggcattgggacaaaaagagttcgacgaattttgggacaagcttgggatcatgaacctccatgctccagcttgagggggggtaatagaggatattttgttatttacatattcttaagatttgcatatatcacatatttcctattgttaaggaaacaacttgattctcaagctttgtatgtatgtatatattcgagacctttaggtcaaaggcaatacacagaaaaacattcattgatcgactctagatttatcatggtatcagagcacgaaacaattctttgattatcttctttgattttcttcgatctgtttcttgttaatctcgacaaaattctgtgaacatgacgagcgaggataatagagttattgtcaccgccaaaccaacggagatgcaacgacgaacgatatctccttacgacctaacctcgaacgacaaccccggaagtatcatctctcgccctctgttgcgaagtgataactatgaggagtgggcaatcaacttggagactgccctctactcgcgaaagaaatttggtttccttgatggatccataaaacccccgaccgaagattcaccggactatgaggattggaagccaatcaatgcactcatagtctcttggattaagatgacgatcgaaccaaagttgctgtccaacatatcacacaagccaattgctcgagatttgtgggagcacattcgaaagagatatcgagtctctaacggcccaagaatccaacagttgagaagagaaattgcgaactgtcaacaagttggattgagcatcgagacttactatgggaagctcacaaaattgtgggatagctacaattgctatcgacctccactatgttgtacatgtggaaagtgtacctgtgatctgagttctaaaagcgagaagcaaagggaagaagacaaggtacacgactttctaatgggtttagatgaagacacgtttggtatagtgagatcgaatttgatgtcacaagaacctctgccaacacttgaacatgcatatctgaaagtaactcaagatgaagatgctagagtcaagcggaaaacacaagaaaacaagtctgaaaacatggcgtttcttgctcaacaatcacagagatctcgccccagtcaatatgaaaacaaagacgctggtgtaatgtgtacgaactgtaatcgtatggggcacagagctgaaagctgttttcagattttgggtttcccagaatggtggggagacaggccaagaaaccgcatgagtcgaggcagaggatcatcttcatctgcgggaagttcgcgtggtcgtggcagtgtaggaaaagcaaacgttgcaagaatcgttgatcaacatgaaattggagttgctaacgtggccgtaacagatagtgatcgggctgcagtatgtaacttgacagatgagcaatggctaagtgtgaagcgggctatgaatgcagcatccaacgacacgaatgaacaatcatctggtaagatctcttctccttcttggattttggatacaggagctacacatcacatgacatgtagaaaagagatacttagagatataagaaaatcgacaccgacttatatcattctagcagatggtagaacagtgatgagtgatgttgtaggcacagtggttttaaactcacatcttagtttgatcgaagtgttctacatagagaatttgggatttgatctgatatcagttacacagttaatggcagaaaatgactgtgtgatgcaattgtctgttccgttttgtgttcttcaggaccgttctacgaggatgctgattggcgtcggtaaaccaatcggtgggctggtctactttcggaatacggaggttgtggcgattgcgaaaggtactgcaaatcaatctctggagttgtggcatcgacgtttgggccatccatcactgaaagtagtagagctgttaccggattttagctttagtagaagtagtagtgcttttatgaataaagcttgtgagacttgtattcaagctaagcaaactcgttgttcttttcccttgagtaataataagactacggatacttttgaaatgattcattgcgatatatggggaccatatagagtaccatcacattcaggagctagatactttctaacgattgttgatgatttttctcgtggtacttggatatatctcatgaatgctaagagcgagacatcaactaaacttcgttatttcctggctatggtggatcgacaatttggaaagaaagtgagaactatacgtagtgataatgggagtgagtttatctcactaagcacttattttttggagaatggaattcgtcatgaaacctcctgtgtcggaaccccgcaacaaaacggacgggtggaacgaaaacatcgacatcttcttaatgttgctagagccatcatgttcgaaggacatcttcctattgaattttggggagagtgtgctctcgcggctgcgtacttgatcaatcgaacaccttctatgattttgagtggaaaaacaccgtacgaggttctttatggtgtaacaccatcctatgatcatttgcgtgtaataggatgtgtgtgtcatattcgaaatcgagatcacaacggagacaagtttgctagtcgaagtcgaaaatgtattttcattggctatccatatgggcagaaagggtggcgagtttatgacatagaaaaaggaattttttgtgtctcacgggatgtgatttttcgtgaagacatcttagcttacactggtgaagaaggatcagagactttagtagacgacaccaacccctttgtgactgaaccagagcctgctttagctcagattttgacaacgcactcacccccaatacggaatcaatctcagagatcaaagaaggcttcaaaagaaaacccgactatcacttccactgagataagtcaagaatctgatattattgaacacgatgaagtcgaaacaaatgacaacgatcatggagacaatgtcatagaaacagaagaattgcgaaacgatgaagaagctgacatcgaaacagaacacgtagtcaccatcgaaacagaacacaatcaagatactctacctattgctctccgacaaagcgttagaccaaggactcaaccggcttatcttaaggattatgatacaacgttggtgtgttctacttctggatgtgatattcatttaagatgatt

SEQ ID NO: 15911 - DNA, 4529 bp, Arabidopsis thaliana landsberg
  unsure (1)..(4529): unsure at all n locations
cgagaatgactccttctcctcctccataacctacatatcaattccgcttcctaccaacgacgtcgtctcacgttcaatccataatctcactaccgctatctctagccaccgtccctggtcagaactcatcttctccggcgatttctctctcccggagagcttttcctctcttctcctccgatcaaagacgaatttcaactactttttcgtcaactacactatcatcgtctccacgtgtgcagcgttcgctctcatcacagctagtcccgtcgctttaatcgtcgttggcgcaatcatcgccttgtggcttatctttcactttttcagagaagatccacttattctctggagctttcaagtcggtgatcgtacggtgttgttgtttctagtcttagcttccgtttgggctatatggttcactaactccgccgtgaatttagctgttggtgttagcgttggcttgctattgtgcattattcacgccgtctttagaaactccgatgagcttttccttgaggaagatgatgctattaacggaggcttgatcgggtctaatctccgatgatatttggttcttaccctaaatttacttttccttgattgcttgtgacataagtttaattttttttatcatcaattattttagttcttttacttatttgtttgatttattgtaatttttcgtgttgatattgtgttggattgaactcaaaagagaagaatgaataagtttttgtttgatttggtctcacagtgaaggaatcaacttgctctatccattcttcttcacatgttacatctgattttcagatacaatgtatcaagtcttgcttcaagcaaacatatctcacaacagctttgacagttttgtcgtgaagcttgagaccaacttgttgatcttaaagtcacagcttttagtgtttgactgttagttattagatactaaatctgaaagcttcaagagatcatatattctcttgattgtcaattcaataccttaataatctgcttttgctttgttggattctgactaactttgtgtttaaccaaaaccagataaaacctaagctcaatttgtatgacaagtcagaatttttagtcctttgaaaaggaaacaaaactgagcagtgaactccggggaccagtaacagaagaggggagagtgacacttgttggcaaaacccagacactgattaaattgcatgtttacttaagcccatacctatttttctgtgtttgtctttggtcccagcttcttacacgagtatttgtcctttttcaattctgtttgttactgagattgtgttatctcttttgtttgattggttaacttatcggttagagctttttggcttgagaattcaatgcgtttacaaagagacaatgatcaataaggatgttggtaatgtacataggaataagatttgttctaaaaaaggttaaaaatagccattacatgatttgatgtcttcaacaaaactgagcttagagtagtaatgtggaaataataaccaggagaaatgtttttgtgtgtggtttcatcatatcttgcttctcattctgactaactttgctagtgtttcttgagcagccaaagtgagatcatggttatggccaagcatcactgtcctgatactgatacaagtcctgcaaagttcctctccactatcgaaatgtccgcctcgtagcagcagctttgctctggtctccagcaataaagctttcaacaatgtaacatcctgccacacgtattcatcgactttcttgttagtcttcttcttccaacagagcgagccttggcgccaatcttgtatctgagacacaaatgatttctccacttcctctaacacgttggtgcatacttttaggagctccagcgcggagttgcaccttgagaaggttgtgaaagctgtgattgctaaaggaagagctgttctcttgatgtaaagtaccatatccatggcttgtagttgaaccaaaggaggttctgatttgaatccgaatactaagaaagctgaagcccataggtgatcaagattcaacaacgggttatcgattttcctcacgccttgaactgttgcctttggtgcaaggatgtagtctcgtctcctcgcgaaagtttgagttatcggatggaactgaatccaacatccaggttgtctatttgttaacctcgctagtcctaatctgactagtaaaaaagcagcatcctcttcgcttctgcgtcctaaaccacaaccaccacaccaagcaaatgtgtgactcagacacttgttccatttgctgaaccggtttccacctgtgggcatgttcttagcagctgcagctaataagttaaccggtatagggacaggagcaaaccaagctcccacgagtagcattttcaatgagagaaggtttctgtttccctcagcttgctccaaaacagccaaactgaaagctaaaacctttgcaacaaatggattggacttgcagtattgctcatcatttaagttcagaaaaggcgaggccgaacgttcttcgatttgaactttgtttacagcttcaaagagagcagaaggcagaattgcaagctctgaaagcaatgatccaaccacccaaagaccatagctcaaccttcccaatttctcatcgaanagcttgaggacctccacctcctccaccgggtaatctttctttctttttcctctcagtaacaccattgcatcagacgagggcaatatagaaagctgcacagtgtcaaaggtcatgactttaggaagtctagtagtgatcaaaacatgtgttcctccggtgttcctcggaatcaaatcatttagatctttcccttcccaccaatccttctctatctcaagattatcaatgatcaacagataaggcatgtctctgaataactcacgctttattctcttgaaagcttcaaactcttgttcatcaaagctccttagtctacctctatccttctcagcatctgcactaacatcaagccccaagctgaatgacagatttaacaggttctgtctaaagtatcgagcttcccctccgacccacaaaaccatcttatacctctgagaatacctgtaagcgaattcaagagctaactctgtcttcccaatccctggaactccatttacacaaacaacacttgtgctacttttgcagttactattgtttctacacttcttagtcttcaacaatcttttaagagagtttttcccaccatttggatcactccaagcctcacttcttgaataggagcatcttccaagctccaagctaataaacttcccatttcgagttggtacaacatctgattcctcatctgcaagtccttcagattgtccacttgcttctcctctggtacttggtgttgtagactcaagatactctccattaccaaataaagccatctccatttcaatgatctccttttctcttccaagaaaagatctgttcctcggaaatggaagctcatcaatcccttccacaatctctttatcagccacactcttcctcccaagctttgccctgagaatcgtcgcagtctttcccacacagcttctccagttactctcattagcttctagtttaaactcatgagacttaatcaacccatcaatggcttctttacactctttatctatggcattgcagttgagaagacccataatctcagaaggaccagttccatagaaaataggaatcaagttcttcttttgagcaaagaacctaacttcctccaagctaaggtagttgagcaagctggaacaagagacaaccacaatcccataagtaacagaacagataactctgtcggcgatctcatgactctgtgtgtccgaatacttagctctgtcagcaacgaaacaagcgattccctgaagctcaagctctgactttaaccatttgcagaatctcaccaagtttgggttttgtccatgaaaccctatgaagacatcagagctcctgagcttggtgttagttgcaggtgaagaaacagagactttagccaaagaaaccctaggaacagggaaagagaaagagatccttggaggagcaggatctggagtacaagatgctgataacttgagcttccgatctgatggttgttcatcagaaaactcgtactggtcagaaggaggagtgtaggagctgcttggtacatcatcagattgtgagcctttgtaagaaagaggcggtgatggcttgtgagtggtaatggagggtgttgtagctcttggggatatataaggagattgcaaagcggaaacaaaagcagaagatggtggggacacaagagaaggtgaatagaaaggagagtttttgatacttggagatgaatctgaagcattattatttgcttgaagaagatcttctttacctttcttacttgaagagcttgctggtgatgaagttcttatggttaaaccaactaaacttgcttcttcttctattcccttcattactccttttacttctttcaccagaacacgaaattaaactcaaatgaaagctctcacctctcagct

SEQ ID NO: 15912 - DNA, 919 bp, Arabidopsis thaliana landsberg
gttgttgaatctagtgtaaggaatccaaagagcctccaaatacacaagatcaaccatcctcctccacgcaagcatctccaccaactcaaaatgaggatgaagctcaagatgatgaagtagaagatcaagcaaatgagccacctcaagacgacggcaatgatcaagggggagatgcaaatgatcaagaaaaggaggatgagcaagaaccaagaccgccacacccaagagtccaccaagcaatacaacgagatcaccccgtcgataccatcctcggcgacattcataagggggtaaccactagatctcgtgttgcacaattttgtgagcattactcttttgtttcctctattgagccacacagggtagaggaagcactccaagattcggattgggtggtggcgatgcaagaggagctcaacaacttcactaggaatgaggtatggcatttagttccacgtcctaaccaaaatgttgtaggaaccaaatgggtcttccgcaacaagcaagacgagcatggtgtggtgacaaggaacaaagctcgactagtggccaacgggtattcacaagtcgaaggtttggattttggtgaaacctatgcacccgtagctaggcttgagtcaattcgtatattattggcctatgcgacttaccatggcttcaagctttaccaaatggacgtgaagagtgccttcctcaatggaccaatcaaagaggatgtctatgttgagcaacctcccggctttgaagatagtgagtaccctaaccatgtttataggctctctaaggcgctttatgggctcaagcaagccccaagagcatggtatgaatgccttagagattttcttattgcaaatggcttcaaagtcggcaaggccgatcctactttgttcactaaaactcttgacaattatttgttcgt

SEQ ID NO: 15913 - DNA, 1730 bp, Arabidopsis thaliana landsberg
  unsure (1)..(1730): unsure at all n locations
caaaaacgtaaactcgtgattttctacccaaaattttaaacttgtaattttcccaccaaannnnnnnnnnnnnnnnntccccgccaaaaacgaaaatccgtaaaagtggaatccgtaaatatcctagtatgatgataataaattaataattattaataatgataattatttattattgttttataataataattaattaaattattactcaaatgggttaacccatcaaattaaatgatttttgggttgacccaactcattttgttaaatggggtgggtcaacccataactcatttaattctaaactcatttaaatatgagttgagttgagttgggttaaccattttgacacccctatttatatacatcaagaattctacagccttctaattacaacataattgtagttcatatactttgacttatttgggaccatgattgattatttgagaccatggttgatctgtaatgtaatcgtgattgattcttgacaggagcaacatttgttgatcaattatacattaaattacactttgatagaaataatatgcccggaagcgtcaaatgttttacgcaattaaaaacgaccgttaggaaacaaacgagaccaacgagaattcaaagttcaaagttgaattaaagagatgtgattataaaacattactcgttttagtatataaagaaaatggtgtggcttcaaagcaccgggtctggacggctaccaaccaattttttatcaaaattgttgggaagtggtaggtcaatctgtcacgcgttttgttctggagttctttgctacaaaggaatttctggcaggaacaaatgatgctctgttgattctcattgctaaggttatgaaaccggaaacaatcaagcagttttgaccgatcagcttgtgtaacgttttgttcaagacaattacaaaggctatggtgctgcggttgaagaaggtgatctcaggtctgatcggaccagctcaagcgagctttattccgggaagacttagcaccgacaacatcgtaattgtgcaggaagtggttcattctatgcgaaaaaagaaggggaagaaaggatggatgttgttgaagcttgatttggagaaagcttatgatcgtatccggtgggattttcttgaagatactttggtggcagcagggtttttgggaaattggaaggattggattatgaaatgtgttacaggcccagcaatgacgcttttgtggaatggcgagaaggcggaaccattcagaccggaaaggggattaaggcaaggagaccccctttctccttatctgtttgtgttatgtatagagagactatgtcaccagattgatttggcagtggcaactaaggactggaagccaattagtctgtcacaaggagggccgaagatatctcacatatgttttgctgatgatctcatcttatttgctgaggcgtctgttgctcaaatcagggtgatccggagagtgttagagcggttttgtagcgcatccgggcagagagtaagtttagagaaatcgaagatttttttctcagaaaatgttcatcaggaccttgctaggcaaatcagtgatgcaagtggcatacaagcaacacgtgatttggagaagtatttgggaatgcctaccctgcaaaaacgaataaataaggacacttttattgaggttctcgagagagcttaatcacgacttgctggttggaggggtcgtttcttagcttggcaggga

SEQ ID NO: 15914 - DNA, 731 bp, Arabidopsis thaliana landsberg
cctctgtcagagggccctggtccttccttttataggcgcaaggagaggatccaggtgtacaatgggaggtgtagcagtgtgctaacgtgtctagcggaggacagctagcgccctaagtacatgtcgtcgtggcagccggagaggttttggcacccgcttcgtgtggtgtcgtggccgtcggaggagcactggagcctggcggaaggacagctatcggggttgtcgagtccttgctgacgtcctcttgcttccgtaagggggctgagagccgccgtcgtcatagagcgtgcggggcgccatcattacttgtctggcggacgagccagatgggacgccggtcttgttccccgtagcctgagttagcttggggtagggtaatgatggtgcctcctgttgacgtggtcggtctgtgccctgggttgggcgaggcggaggctcctccgaggttgaggtcgagtctgtctttcgaggccgaggtcgagtccgagcccctgggtcgggcgaggcggagaccgtcggctgaggccagggctgagtccgagccctggggtcgggcgaggcggagttcgtcgtcttctggggctgagccagagtccgagccctggggtcgggcgaggcggagttcgtcgtcttccggggctgagccgagtccgagtcctaggatcgggcgaggcggacgttcctatggcgctcgaggccggacttggccgctgtcagcctcactctgtcga

SEQ ID NO: 15915 - DNA, 1644 bp, Arabidopsis thaliana landsberg
  unsure (1)..(1644): unsure at all n locations
tttttgcttgatatttaagtgatgtctaaacatatataagatctatcggtatatgatctattcaaatggcaattagagttggtaaatttattatcttccccagcattaagatttgagattcattcagtttgaagattctttgatattttgtgtatttttattttagtagttacgcttaatgatattgattttatttttaactaagacttttctgaatccaccatttgttcgaattatatatcatctatagtggatcactcaccacttgtttcgtcggcaaatgaaagatgtgaattttctttacattttttttctttttttctttttataagatgagcattaattgtaaaactcgatagtaggtgaaatcgtgtattgttatttgttaggttcgcaattatgatgacaggccattaatataatttggccttgtaagtcacatattgtatggttataatttctgaaagtttttggaaggcgtaaagctttatagaacaccactaattttaaagtgtttttaacccgaagtttcaaaatgtcacttagtacacatgtataaaacacacagtaggcctaacacagattcctttacagagaaattacatgggcaaaatcgtattaaaacatcctccccataacgtgctctcttttccttagacgagtgtcccacctttgacgaactcagtgaacgccaacgcgaccaaaccgagcatcgcgaaacgtccgttccaaagctcagcgtctgacgtcatgatacctttggacttggactcaacgcttatgcccttgaaaagcggcacaagcgacgcaagtgtcaagatcgctgttgtaccgaggaaccatgagacgccaccgtcggagatctgagctaaaacgttttcacccttggatagctcgacagccaacgccgcaacgaatccaaccatcgctaaacgtccgtaatcctctctggtgctggaccgctaaacgctagcaagtcgctaaactttgtgctcacctatattcaccaccccaaaagttattaacaaagattcacaaataaagcttgtttaatgaattttcaagattgtatgttcttaatatctaagacccgattaattaaaaaacaaattcttgtttatcaaaacttctaaaattataccttaggtttcataggaggaggaggagatnnnnnnnnnnnnnnnnnnnnnnnnnnnnnggtagatggtgctggtgaagagtcttcattcgtgggtcctccctgaaaaagtcaaataatcagacggtcaggatttcatagtcacatgatgaatggccgttgtatcagggaagtggagaataacgtacctcagccatgcatctcactcccaccggataattcctcttgaggttagggaagctaccggcggagaaaagcttgttggtgttgatcttgcgagtggttaatccaccggcgaagactgattgcatgttgaacgatgctgttgccatttctaaagcttagaactacttgtgagagaaaaattaagaagaaacttggagtagctaagtgattatcgcttaggttattgaactttaagctagatcgtgtgtagaagcttgatatgagtaacgaatgatcttacgtatgtatttataggacgggtgatcagaaatgataggtca

SEQ ID NO: 15916 - DNA, 5379 bp, Arabidopsis thaliana landsberg
catatttccatgtaagatcctactacatttttacaataaagcatttatccatgtactgatgtacattgtgtagcctctccccaaaaaaaattaatgtacattgtgtagcctaaaagatgtgtgtatccgttttatgaattatgaccatcttcattaaaacttctcaaaattcagaaatgacatagatctagaaactttggaagtcttcgagactgaacatagaattctattccacggagctaattaatgacgtttcattgacttctataaatattataatatcaaaattaggggaagaagttatccaaaggtgtaattatcatttgctgatttttcttcacctttccaaaatgattcttcaaagttcaaattgtatgttggaagaggcggaagaaaatagaaaaatcaacattcaaaaaagtctgaatcacaagagaaaatgtattatgattctcttttctttttttctttttcttttggtaatggattagatttttttttcttaattttttcaaaagtgtaatgttttttagatacttaccctaattaaggccaactaatcagaagaaatattttaaaacgtcgtcctatagttaattattttaatagaaatggtttacatgaatggtttaagagatctctttagaataatataaacgaacaaagtaagaatcttctaagtccaaaacgtgaagacaataatctccaatatgttttcactccaagaactttctaaacgtggtataagactgatagaagttctaactggtattggacatatataaatgatagaaaactctttaattgcatataaaatctataattttctcatcgtttttatatttgctactaaactaaattgataatttagtcgttctagttctcactatttaatctgtcacattcaaatatctcggccagtcaaaatccaatacatattagtttgtgttttatacgacattactcgtgtttatctttctttcttttttgttaacacgtatttgtgtttatctcattgtttagatgttgaaaagtatatatgctggttaataaataacaatttcttagtcaacaactcaatgatacaatgatgacaaaaaaaaaaaactcaatgatacaatgttatataactctcttacatcattttttttttagattgaattaattctcatactaagcaatctacctggttagggtgaagtcacaacaacaacgacattaactaataacaacaatttaagctgcatgtcctaatcagaatctcggttattggtcgctcagaagaacagttagaggtctttcagtcacaattgagagacgacatacataattggatgggaatcaaaaatcagtttaatcgcgctatacgcaacttgaaacgtcattatacaccaataagctttaaaaataaaatgttgtgatggacacgcgcactatatatgtatgtgtttggacatgattgaagctaaacaagataatatttattaagaagaaaatacataattattactaaataatgtgtattattatacgattccaacttttatttgataatgatttttgagcaaatcaggttgataggtatgattgagaccatcgcccaaactacaccttaaggtcttactattagaaacaaacaattcatttgggaattgaaaccaaagtcatctatggaagtaacctcaaaatttatctaagaaacagtgatgtattagaatggtcaagtcaacttattcacaaaattacaaaactatcgtttataaatatataatctatttttcacttgtgttacacgattcctcttttgatatgcaggaagaagagaagatcttacaacggctagaaatagaaaacttaatgtgctattaattacaacttaccaactaattagaactttctatatgaaccggatcttctacagcaaatcacggtcaattcaaaatattcatctctctctctctctccacatggacaagacatgattaagaaagtatataaaagaaacagagcagagaaagacattttgttccgatataccattgcaatttgcaaactgcttcaatccaatttccctaaacctcttagaaaattctgcaaaacccaccaaacaaagaacaccaagaaagacaaaaggcaggcaagactacaaagcaaaaccttcttcttcttcttcttctcgttactcaaatcatttccatatatacgcaaaaaccattaagacaagctagaaacaaagaaacatggttttctctgtttctatatttgcctctcttgcaccatacttaatctcagcatttcttcttttccttctcgtcgagcaactctcttaccttttcaagaaacgtaacctccctggccctctctttgtctttccgataattggaaatgttgttgcacttatccgcgacccaacttccttctgggacaagcaatccgcgatggcggaaacttccgtgggcctctccgtcaactaccttattggaaaattcatcatatacattaaagacgcagagctctccaataaagtcttgtccaacattcgtcccgatgctttccaacttactggacatccattcggaaagaagctcttcggtgatcacagccttatctttatgtttggcgaggatcacaaatccgttcgtcgtcaagtcgctcctaacttcacccgcaagccactctctgcttattcttccctccagcaaatagttatcctccgtcatttacggcagtgggaggaaagtttttctagtggatctcgtccggtttcgatgagacaactcatacgtgaactcaacctcgagacttcccaaacagtttttgttggaccatatctcgacaaggaagtcaagaaaacgatttgtgatgattacaatgtgttcaatcctggaacaatggcgctcccgatcgacctccctggcttcacgttcggggaggctcgtcgggcggtatcgaggctagtgaagacaatgtctgtttgcgtgggaaaatcaaaagcaaagatggccgcaggagagaatccaacatgtctagtcgatttctggacgcattcgatcgtagcagaaaatcctccaccacctcactccaaagacgaagagattagttgtgtgctcgttgattttttgtttgcctcacaagacgcgtccacgtcatcactcctctgggcagtggtgatgcttgagtccgagccagaagtgctaagaagagtgagggaggacgttgcaagattttggtcgcccgagtccaacgagtcgatcacagccgatcagctcgcggagatgaagtacactcgggctgtggcgcgtgaggtcttaagataccgaccaccagcaagtatgattccacatgttgctgttagtgacttccgtctcacggaatcgtacacaatcccaaaaggcacaattgtgtttccttcccttttcgacgcctcgtttcaagggtttactgaaccagaccggttcgatcctgaccggtttagtgagacaaggcaagaggatcaagtgttcaaacgaaactacctagcttttggatggggtgcacaccaatgcgtaggccagcgttacgcattgaaccacctcgtgctcttcatcgctatgttctcatcgttgtttgatttcaagagacttcaatcggacggttgcgatgacatcatatactgtcccacgatatcgccaaaggacgggtgcacggtgttcttgtctaagcgcatcgtaacgtatccgaacctctgatttggatttttgttacaaattattggtgatcaaagtcaatactcatgagtgtgattactattactgttgttcgtgatcgtgatgtgtctcgtgaggtgagttccactagagcgttatgtcttgttgaatttgagaagtcattgttttgccattaatctgtgctgtcttattttgtttggaccccagtgattctataacgtgtttcatgtattttatgtcattttctctatttttcgattcaaatagagataacaatatcgcctcgtggtatataacgacagaaagccaaaaccgtaaaagaattcacacattctcggtattattgtacatttggatcgttaagatatactaatatacatatacaaccctatagttcctgttagatttttacatttcattttcttatttacatttttgtaagataattaatattaatattttatctatacgattagcaagataaaataacactgtgacgataggtgtagtaaagtgttgatgtcgcaaagtaaacaattccgaaatttgatggcactatggttgccatgaagtcacccatgttttctcttagaaaaaatttgattcctagttttttattctctttttgtgtcaactgtcaaggtttcacactttcaattatataggttctagctactaaccaaagtttaagacctgattatttattttaatgatatttacaatttagccataaaagcaaagtacgtaaaaactgagaagatttactattattgtatatagttatcttatagtatagagagtatgtacagattgatatttctataaattaatcttagttttggtttaagttttggtttatggcttatggtttaagcctttggttaagttgtatataaacccccaattgtattattttctaaattaatgagaatgagatttaattgctaatatttacaatgcgaagaaaaatatatctgaagatgctgacatatgattttgacatatgtattgatttcttgtcaaacaattatgtttggataggagttgctgagcatcttgattaaacagtacaatttaatcatatacaagtccttttgtcatcgtcgagagtcttcatcaatggcgttggcgtgtcacaattatgcaatgaatgtgtgagatacacagtatgcaataacgaccttgattaccttttttttttttttttctttcttgcgctcgtgtttgcgtgtcctcatcacccactaatttacttcgttggatctcacaatgctactatagagtggattggacctatatatgtgtgtttgggctttgtcgtaacccacatctgtcttctgtcgttttgctttaaacagataaagtttggttgtttttcactttcatattttttggttaatgattttcactttcacccctcttcaaataaaatgggtttttttttttttttttttttttcccgtatgtgtgtgtgcaccatttggcctggtaaggatataatattgaaacttgctacaaaaatttgactagagagaaataataaaatgaggaggaggaaataaccaaatttcggctgggctaagacttgattacaattaacagacaattgggcttttatgatatcagttttagaattagggttttgggccgatgctcattttaaaaaagaaga

SEQ ID NO: 15917 - DNA, 5088 bp, Arabidopsis thaliana landsberg
  unsure (1)..(5088): unsure at all n locations
cagccacttgaccatataggaaacaacattgaaaacgtagattctgaattcatgttactaccacttgatatatatcaagatataccaaaccgagggcataaaaaggatatatagtaaatcaatgtgtttttgattaattattaactaataagcaacggatttttcaaattaattaagtaatagttatataaaaattataacgacgtttgtcaaattttaattaaatgttgattcataagttttttaaaaaaagttgatttataagggtggtattcttacgtaagttaatgaatttgaattaatgatgggcacatataaccagattagtctagagaccaataaagttttattggtatgtatcaatgcatgagtgtgggccgtggggaaaagcatatatacttactaaatacagtataaaactaaaccaacgcatttttgattgaagagacaagagtcttgtcgaggaaaaagtacaactatagcttctgcattaagtatctatataaaatattcatattttgaccataattttttttaagtcttttaaatggagtcgtcggactatgattttcttattttgagagtaaaaaaataaaaataaaaaggaaaaaccccgggagttctatcatgaattttgaaggttcaaacaatcgatattgtgcaaaaaaaacaaaaaacaaaaggacttgttgtaaatcaaatcgatagtgtgcaaaaaataatataaattgctatatcatatatatatatatatatataaattactatattgtatgtaacatancggtaatatatattggaccgttataagaggaaaggttgtgaccccaatttgggtcagcacttagcagctgcagccccactgctcgtgtccagctgtgctccagctccaaagttcacttcgccagtggcgccacaaaacttttccacttttgtttctgctatttatttaccaatatacgccagttttctataaattttagtacaagttgatgcatgaaaattttgttatgtgtgcgttttagtcagttatttgatcaacgtgaaaaattctgatcatagtattcatgtgagtgaattattttcactctgcatggactagtccaatggtcctaaacggcatcatgatctggtaaattgaagaaaataaattaaaccaagttgctttggtctactggtaaagagtgttaattccactatttgggttgaagtaacattagtcaccaaaattcgagtaatttattggatcttataattagtctttgggctttgaaaacttttaggatcacctgcgttttattattaaaaaaaaactaatgatttaatcacaactttattatagattttttttctgattccttatttttaatgttttggagttcttctattcttataaagtgaaatgaaaattggaaagtgaaacgcgtgaaaagccgaccataaaacgctctcttaacatttattttggtattataaatatattattttttggtatgataaagtatattacttgtttggcttaaaagataaaattgttggtcggtctactaaatcagcttgagataatcagataggccttttgttaatttgataaaaagtcaaaacatagatttttttattattattttatttcgtgaaattatgtttatcaaaatcttatacattttgatagtttcaatttgatgatttattcgctaatatattttcatggttcaatagtttatacactactttcaataagttctctaatccaaatatccaattattattattattattattttatctaatccaattattagtcaataaatacatgtttctttaacatgcaagtgtatttaggatttaaataaaatcgattcctatagctatttaagatatagagacagattgtggcgcacagcatgacagcaacaataaaaacgaaacgatatatgtctgcactcatctattaaactaaaatctgtttacgttatacatatgtgtgtgcatgctacatgcataacgcgtaacctcataagtcgtaatttattagagatattatagacacaagttgatgataaaccaccagcataaacttggcttttgtgtgaaaattaaagttgcaaatggttgtaccataaagctcagacatcacggaatcaggagtctttcgatagaaatttcgtagaaattgtgaaagaacaaaacgacaacgttttcttaactgtcaagtttgacaactgttttctagctagtgatgggtaaccgtcattttcgtccaacggaaataaactgttgtgagtttcttctgcagctccacgaatttacgaacagaactccacgtgtcgttcaacgacgcaaggtttagacttcacgcgcttggtgttgcgagtgtggatgatgccatcttgttccggtaattactcgagtatcatcacaacggttttaggagaatttatacgaagatccgttacttagtgcaccggccagagctaataagatacgatacgtgtcattttaaaggacgttgaaaatttggtcgacttagatcttctcggttgttcgacagagataatgtgaataaattacgggaatggataaatcagtatgtaaggagacaaatgtaataaatggtgatacatactaatatttgagtctttgactgtttctattaaaaaacaaaggaaggaaatgataatgttattattcagtaattaactagaacatacgacaattattcagtagatagaataacttaccaactaaatatccttaacgtgtgtttcgtaagtcaattacgcgtacgaggtagttaatcagttctttactactttggccaaaagtaaccctttttttttaatttaattggtcggtttcaatttcaatatgtaaagaacgatcatagtttagatgaatagggtttgtgtgttgtgacaatgtttgctaactaatgcatgccctacaaatagtttgaaatagtctaagcaattaattttagtagccgcagttaaacatggtttaactagtgaattttggtgatacttatatatcgggcataattattagccaatagaacaaactgcttaactaaaggtattcactcttcttaaaaataactacaaccaacgctcaataacatagaatacttttttcttaaacaaaaaatttataatacatataatactctgaacccttggcaatgttacgagaagcaaaaattacaatcaaatcgtttttttttgtttgatataatatggtacaaatcaaatagttagaataaagattagtcatcatggtccaacgatacatttcttctgtttaaccaaaggcaaaaccggactgattaaccaaaccgagagaaatcagaattatttcttctgtttctttcctccacatacatttgtttcaatacagattcacactcagagtttgttatagtgaagccatgattaaacaatatatcaaactaatagagaaaaacttgtgttacctacaagaaaattcagtacaatatttaggtgcttttgcaactggagtcgggttgctttaaatcattcattaatttggcgagtcccccaataggtgctataatcatcactagaaccccaagaatgatgcaaatctgacccaaaaaagaacatgtattattagctataacaagattatcatcaattgacaaaaagaccaaaggaggagttccacttgcccaattgatacaccatgatagactaaatctctttggtttcttcaggatcagccatatgatgcaagggatctgaaagagaacatcattaattatatatatttttgttgaagatatcacgatatgttgatagagatagacgatatgaagattgtaggagaatgtggtttgcttcaagatagtcaccaagaagactagctttgcctagaaaatttgtttaaaatcttttaattggacgatgcacttgttgtaacaaattttttttagaaataaattttacattttattcaaaaaaagaaagaaagatatgttgatagagtttaagagcttacaaagtatgtggtcggggcaaatatgaatcctccaaaaaatgacagcaaagcactgaaatgcggtagagcgactgctatccccatcgtggcggctgtgatatatatatatatacaagttagatagtctttctttacaaaatatgtaatcttggtatgaaaatcacagagacatacccacaaaagtccagcggatggtaaaccgtagaactcttgttggactgaagtgccatttctttatcattacagattcgatcatgtcaaatacgggcattgcgtacacctaggaaaagaaatatgaaggcgtttttttagtagttagaagttttctaatagataaggtgtttcttggtatatatacctggtagcttcccatgagatgtataaccacaaacatgttggccacaattataagtcccttcgggccccggagtgttttgagaatgttttcttcaacgttgtttccgaatgtccaaaaccctacaagagccacagggaagtaacagaaagctacaataatataggctacaatggctcccttccacatgggtcgttttgatggattttctggtgttgatggaatcgttgcttgaatttctaaaacaacattgtgacctgcatacgcaaaagccatctcccccaatgcgcctaagaaggctaatggcactgaggtgttgtttcttcttttatagccgtattcaacattgtccgcgacaccctttgtcagtgaagctacccaagcaattgtggaatagctatgggaaagtaataaaacattggtcagagatctccatgttatgtttgcacaagatatatattttacacatatgatatacgattttgtataatcgcgagaagtggtgttctattagcggtgttttggtcttttcccaaaaggactggttttgagagttatctttttcacgttaggttttaagtatagagaatatagaattggatgttttgtattgagatgatttacattgtttatatacagactagatattctagagacttctaattacagaatatatagtttacataagtagaattgtggttgatcgtgattaatcc

SEQ ID NO: 15918 - DNA, 857 bp, Arabidopsis thaliana landsberg
ggtttcctgcaaaacaaaatggagtcataagtaatctaagattacttagtgagctcggtctacctacaacaaatattacttccccatccaataatcacacgcaacagagaatagcaacgaaaggtaacttaccgaagcatctaccaagaacatgcacatgcaattaagactccagttttgttaagttttttaaaatagggcccgatatgctgccttcaacccacaccaaacacacactcccgggttctctcgctttacaaccacaaaggcatgtcacgagagcatccctacccaatgctacaccgtcgtgtagacaactcggccagggtagctagccccaactctccgagcccttcgcactatgtggtgatcaagtaacaacgttaacaagaccccacaatagcacggttcactacgaagatcagacatactacgatcttgatacgcttatggtctctgcctcctacaacgagcaccacgtatcaagacccaacaattcaagatattatgagacatatggttatgcaaacacatagaatcatcaatatccttactcagcacaaactcccaacaataaacctttacgcataagaatctataagatcacatatgcaacttagtaccatcacaccattaatcaatactcatataattcacaaaatcattcaactaatgcaagagtatatgaacatgcaactaaacaagcaaaccatcacccaaataaataccaaaacctatcatgtgccatatcacacgcttcgagacccacatagatttggctgaaggtttaaggttagcttcaacggttctcggacatctcacgacttctccacatcattttcatcttgatctagggt

SEQ ID NO: 15919 - DNA, 621 bp, Arabidopsis thaliana landsberg
tgtatagtggttcagctaatggttctcgtaagttgttcttttttctatataagatattaaaaatggtgagtagtacttgagaactctagcatcaaattcttggactcaaatcgtctagcattttgtcttatttttttggtttaaggttaacacaaatgaaaaaaattataaaaataatgtttactgagaaaatattttgttagaaatctaaatgcaaaatgcaaaaacaaattgttgatttatggagcttagtatcaaataggaattttgtcttcttgcctattaaaaaatcaacctaaattttacatttaaatacttttaaattacgaaatataaattaaaagtctgcacgtagtgcgggtactcatctagttagtccaaaaagttactctcggttaataaatcattctaatcaagcacatgtcaaaactatatactgctgccaataagcatctgaagataaaatggtaagagaagagaaagataaagtccaataagcatcaagaaactatttgccattccaagactctctagctcaagccaagttttcgttctctcgatgaattgacgaatataaaaagatataatgttatctttgtagtgttaactctatgctacttc

SEQ ID NO: 15920 - DNA, 2883 bp, Arabidopsis thaliana landsberg
  unsure (1)..(2883): unsure at all n locations
aagagagatcgtaaaactttctacggaatgaagaagaagaagataacagacttctatttatatgtgtttgacttcgagcatcgaagcctctttcagaatgagagtcttccaatcataacttccttcttctgtaaaccaaagcgaaaccgtttcaataaccaactccaatctgctgctaaaccgaatgtcatcagaccaacattaaaccgaaattggatcatattcataacattatatcaaacaaggaaaaaaaaactattcactattgtcggcaataattaactttttgaaaaatcgaaacaacaaggccaccacgtctacaaaaatcagaaaccaattcatgcacatgatatatgtgtttaataaatataatttatatggaccctcttaataatataatttatatggagcatttattattatgggcacatcatatcatatctgtttttaccttaataaatagaataacatttttttctgtgacacacattgaagagagaaaactatttgtcccacagtcaattacgggtctaaaatttggtagtaacaataatactttcatatgcatatcttaacatgagaaaaaaatgttttcactggtcgagcagagttatatatatatttagatattgacgaaaagtcttcattgacaataaattacattggtttcgtccatcagtacaagattggatatgatctaaaaaatcagaggcaaatcaatcaagattaagaagacgacaatggaagagccgtttcttccgagagacgagcagttagtctcttgtaaatccacatggcaaagtggtcaggtcaccgtcgagctgaagaaagtgagccgcttggccgctcctatggccaccgtaaccatagctcagtacttattgcctgtcatctcagtcatggtcgccggccacatcggcgagttggagctcgccggtgtcgcgcttgccacgtctttcacaaacgtttccggcttcagcataatggtaattatgctattactctctcctcttcatttcaagaactcaattaactttccaatgttggactattgcttcattcttttttgtgtagtttgggttagtgggtgcattggaaactctttgtggccaagcttatggagcaaaacaatacgaaaaaatcggaacctacacatactctgctatagctttcaacataccaatttgtttcatcatatcaattctatggatttacatcgaaaagctcttgatcactctcgggcaagaccctgacatctctagagtcgctggctcctactcattgtggctcgtaccggcttttgttgcccatgctattttcttaccactgacttggtttctgctagcacaagggttggtaatttccctgctatactctgccatgaccacccttttgttccatattgcggtttgctggactttggttttcgcgcttggtcttgggagcaatggagctgccattgccattagtttgtctttctggttttacgctgtgatactctcatgtcatgtgagattttctagctcttgcgagaagactcgcngatttgtatcaaatgattttatgtctagtgtcaagcagtacttccagtacggagtcccatccgctggattgatttggtaagtaaaccatttcacgtttcttgttggttaagttacaatacaccgatgcttcctcttatcttgcttgcatttttttgtcttctttgatagcttagaatggtggctgtttgagctactcatactctgctcaggtcttctcccaaacccaaaactcgagacatctgttctttcgatttggtaagtatcatattacttctttttatcctatgtgttctctttaccaaaatgtattaatcttatgtctttcatgttatcagtcttacaataggaactttacactatgtgattccatctggagtcgcggcggctgtgaggtatgatctcaactctcaaaccagaacaagtgttcaacaattcctttctcaacattagtcatttggtttcttgaagcacacgagtgtcaaacaaattgggagctggaaatcctcaagttgctagggtttccgtattggcagggctttgtctctggcttgtagagtcagctttctttagcacacttctcttcacctgccgaaacatcataggctacacattcagcaacagcaaagaagttgttgactatgttgctgacatatctcctttgctctgtctctccttcatcctcgacggatttaccgcagttctaaatggagtggctaggggatgtgggtggcaacacattggagctttgatcaacgtggtagcttattatcttgtaggagctcctgttggagtttacttagctttcagtcgtgagtggaatggaaaaggactctggtgcggtgttatggttggatccgcggtgcaagccactttactggctatcgtcacagcctccatgaactggaaggaacaggttagagtttgttacattctagttttttgaatgctctgaagtaactagactctattatttgcaggctgagaaggcaaggaagagaataatctcaactaaaaatggattggtttaaataaaggttgttcctcagagctatctcaaagtatttggaagtcatgtgcaagaaaatatttaatgttattttaatattttcgtaaaacttatatccaggttttatacattttttcacatgcagattttatacattttttcacatgcaggttttttgtaaaaattattcgaattgcaaaaactcatttacttgtgcagcgaggcgcttctggacccaaaacccccaaaaaaaaacatggctataatgacaacgtgagtcctatccattatcccaataagtccactaaaaatggatggtatgacacaaccaga

SEQ ID NO: 15921 - DNA, 684 bp, Arabidopsis thaliana landsberg
ccctaggccgttgtttaggcaggagcaggaggcagccaggagagcagagctctagcgagaccctacccaccaacgttgagtaccgctgtaactcacactcttcccttgttacacatctttattttgatttttaatgtgtttgtgcggcaactttcctttgaactgttttcacaccgagtttgtgtgaagcaagtcggggggaggttggcacttgtctactaatctagtttgctattttgttttgttttgccttttcttgggtcagtttgttttatcgagtcaaaaccgtgtcttttattgagtcaaaatgctgtttgagaactgtgatcttttcggagagaattgcaccatgcttgatttgattgccttgggaccattttagcactattcgataacttggaatgtcaggaaaatccatcactagatcgcttaataataatccctatctctttgaaatttggatgaattgagctttctcttatctatttgaatttaatcttgacttaatctatctcacttagaggcttgagaatcatgtaatggatcatacattcagagttttctttacatcatttttatcactctttgctaactcttaatggctggactaacttttagtctagtaccacacatgttcccccacccattatttgaaacctcatgtactcttatatattcattatg

SEQ ID NO: 15922 - DNA, 911 bp, Arabidopsis thaliana landsberg
caacagcttcaccggagaaatctcttcaggtttcacgaacctcacgaagctaaagactctgtttctagagaataatcaactctctggttcaatccctgacttagatttacctttggttcaattcaacgtttcgaataactcgttgaacggttctatacctaagaatcttcagaggtttgagtctgattcgtttctacagacttcactttgtggcaaaccgcttaaactttgtcctgatgaagaaactgtacctagtcagcctacttctggtggaaacagaacaccaccgagtgttgaaggaagtgaagagaagaagaaaaagaacaaactttccggtggagctattgccggaattgtgatcggatgtgtggttggtttcgctttgattgttttgatactaatggtgctctgtcggaaaaagagtaatgagagatcaagagctgttgatatctcaacaatcaaacagcaagaacctgaaattcctggagataaagaagcggtggataatggtaatgtctactcggtgtctgctgctgcagctgcggcgatgactggaaacggaaaagccagtgaagggaacggtccagcgacgaagaagcttgtgttctttggtaacgcgactaaggtttttgatcttgaagacttgttgagagcttctgcggaggttcttgggaaaggaacgtttgggacggcgtataaggcagtgcttgacgcggtgacggttgtggcggtgaagaggttgaaggatgtgatgatggctgataaagagtttaaggagaagattgagttggttggtgcgatggatcatgagaacttggtgccattgagagcttactatttcagcagagatgagaaacttcttgtctatgacttcatgcctatgggaagcttatcagctctcttacatggtg

SEQ ID NO: 15923 - DNA, 4530 bp, Arabidopsis thaliana landsberg
  unsure (1)..(4530): unsure at all n locations
acccaatagggtaaatctaaaatgtcggttcgatttcggttcgtgtcctttcgagtttggatatagttttttagaccttgggtggaatcgatatccgaatttttgggtaaatatccagattttttgggtaaatattcggattttcgggtaaaattttgagtttcaggtaaaatttagatttttgaataaaatatttgagtattttcggattcgggttcggttttttcggtagaagaatttaagacctaataggataaatcttcgggttcgagtttgatttcggatccaattttttgggttgatttcgattcggataaccgattctggttttttgtccggcctaatttattcctgacaatcggccgtagtaggtaaaaataatgaaatgattgaataaggtcgaattagtagatttaaatcatcattttgataagattaaaaatttacaaatgtatgataaattatattttgatgatatatacaatttggtattacaaaaaaaattgatatatacaatgaaaaatatattgctgtataacataagataaagtgaagtgtatatataatttttttccccaaaatcattcaagttgctattttttctaatttctcatatccagctccccattgtttcattctctccgaagcttgttccacctaataaattaagatagtgaatcattttacttcaatttgtgtgaaagatttgattataaaacctgaaatgagtgggggtacctctttgttccaattggttatgtagatcatgtacaaaagtatgagagtctgaagactagtcccacatatcataccaatccatatcccctgaaaaaccacataaagcaatttcatcaacttaaaccaaaataattagaccggaagctatgtggctttacctttacgccaaggcttgttttataacctaacaaaaaccctagaggtaatccaaaagcgtagtaacaaaacaagtttatataagccaccggtgcttgccatcctcctcctactgcaactcctgatataactggttgtaaactgttgagaatcatcgttataccgagcaggtacgcaagatcagctaccgcctttctcatctcttcactctccgtaaaaaccacagcaaagtcatctcttgttatgagaattacaattgcacacactactccaatgacgagagactctatcaccgttacgatcaccgagtatttcgcagctcgtggatgtcccgatcctagctcattcgacaccctaacactgaaagaaacatctcgcatatatatataagtctaattaacgccttcttttagaagacacaaagattgctttcgctttttaccttatagctgcattgattcctatgaacaacattccttcccatccattaatgttcatactgagagaaacaaaagtgttatcagttatcagaaaaagaatgtaaatctttgagtttgtgaagggttctaacggttaaccagattgagagagatccaacggctatgacagggtcttcaagatgtccagttaagacaatgatcgtcatgaagtaccaaatctctagacaaagcataaccgcagacgcaaacgacagtttcaaaaacggccaaacgtcttgaaacgctaaccaagacagccctttccaaccgtctttacaccacccgacaacataaacaacctgagcgatcgcgattccccaagccgagacatcaaacgcagccgctgcgccgtttagcccccacttgaaaacgtttataaagaggtagaggatgaaaatgtgaagggtcaaagcgaagaaacctatccatgccatgatccctactttgctctgtgactggagaaacttctgagtcgggaaattgatagcgagcgcaaacatttgagggatgatttgtgtagtgaatttgccagagatctctgcgatttcgggttcttggccgagtaaaatgagaagtggagttgcgtagatgtagagaggaagcaagcagacggaagttccgaggaggataagccaagaacgctgcatataaacacctaacatatccatttgtcccgctccaaacgcttgtccacataacgtttccaacgcactcgccattcccagctgcagtttttttctagaaagttagagaaaacgcaagaaacagaggaggaaaaaagcagagtagaggaaggttattttaatcaccaagaaaccaaaggagaaattagagacgacggagagagcgatggcgacggcagaaagctcaagatcgccgatatggccaacgaagatgcttgtgaaggagttaacaccgtaattacaaagaatgttgaaagctataggtgcagctatttcccaaagcttagacgtttcaaccacacaaacaagtttagcatctctaaagctttgaatgggaggaaaatcagcgtctcnnnnnnnnnnnnnnnnnnnngttgacggcgcgtggataagcttggtcgtctcatgctctgtttcgaagacagagactttgacgacaagcggagaggatggaccgctatcgatggcgtcgtcagctgctaaggagatggtttgttgtaatggtccggcagaggatgaggaggatcttctctcctctcgaaccgggatttccattttcaccggttgtggcaatatttgtcttagtttttatatttctctacttggggaggattagagacatgaggattgaaagcagacaagacaagagattcttttttatgtttgttcttgtaatttgtgtttctggtttgcctaagattaaggttagccgtggagtagaagaagagagaacatgggtttattgtgcccgttcatatagtttaaagtatcgacatgggttattgattcaatcacgtaatgattctcatacaatacattctgtattttatcatgtaatgattcaatcacgtaatgattctgtagttaacataatgcaaggtacaaaggtggttgttgtcactttcagtttcagtttcaggaaatggattctcttgtgttgccgttgtttttacgcaggagtgacaaacacttggtcagattgagatttatggcattggttctgatgttgagatgcttagagaagctgttttgaagaatggaggtgggtggcacgggcatgggtgggtggcacgggcatgggtgggttggtgatggaaaatggattgtaaagaaaggtaatgttagctcaacaggaagatgtttgagctgcagtgagcagttagcttgtgaagataccaatgaggtagaaacacagaagtttgtcgattctttggtggctttggctatggaaaggaaggcaaaaatgaattcatgtgagtcagatgtggtcttcagcgagtttcaggttagagaaagaattgatgattccttgattctcttagcttgcttataataagtcttggacattaaataattgcatgagatagaaattccagagaatgaaagtttattctttgtttacaacattaaatgttggtatctatttggcaggactggcttgagaaacatggagattacgaagctatagtagatggagcaaatattgggctctaccaacaaaattttgtagatggcagtttcagtctttcacaggttctcccatctatttttgggtacttgtttttcttcctccatatatttagaatccattccttgctatactgatgacacatacatgtgggatagagcagcttgaatctgtggtgaaggaactttaccgcgaaagtggtaataacaaatggcccctaattctattgcacaagagacgggtcaaggcgctgttagaaaacccaactcaccggaatctggttgaagaatggattagtaacggtgtcctttatgcaactccaccaggttccaatgatgattggtatgaacttttttagcttttcttacagtaccattagttcgacaaaaaacacaaacaatgtttggttactacactcatcttttgtttctttttctacctttccaggtactggctgtatgctgctgctaagctcaagtgtttgcttgtgacaaatgatgagatgagagaccacatttttgaactcttagggagtacttttttccaaaagtggaaagaaagacatcaggtaatgttatataaacttatatacaatatgtaactttttatactaaaagtgtaattttgagaaatctacagttagagcatttggtttatggttttggtacaggtccggtatacttttgtgaaaggtaacctgaagcttgaaatgccgtctcctttttcggttgtcattcaggtttgtttaccatctcagtcctttttttctccggtttcgatagtttctcaattacgtttcgacaaaatcaggaatcagagaaagggtcatggcatttcccggtctcatgcgaaaacaatgaagagtcttcaagaacttggatgtgtgttagcagacaaagtattttagattcacctaagagtaatgggaagattccttagtagcaacaccagcttattgagttcatgtatcatttgttatgagttttcattctttgtcctttgaaga

SEQ ID NO: 15924 - DNA, 997 bp, Arabidopsis thaliana landsberg
gtttgttgtttcatatgagccttctggcccaagtaagagaagtactcatgtccaggcacatcaacaagctgcttcacattggcgttgtagatcacaagaccaaactggtttagctctagctgaaccttgtcaaacacttccttcttaaactcctttgttcctacaattccacaattcaaacacagttcaaacaattatattaaaacagaactcagaaataaagaagataatcaaaaagggtatgtttggttacctttgaagacctcttccatagtcatggaagcaacaagaacacgagtctctccttcgataacaccctgaacaagctcattgacgtgattcgagtgcttatcgtgttgagacataagcatggcatacaacaagagagcgtgaggatcatcaacgcgaggaccgattgtgaaaacagcaggaataacaaagggaagtttctcggaactcatagcttgaacctcgaacgtgtagttcaccggagaaacgtcgaagacggtgcaagactgccatggaaacacccaagacttctttgcaagcttgatgtctgtgatcccaccaccggtgatcgcaagatactgcgatgctttagcgactctgtaactcattctttcttcgtcttccttgaaattagggttttgttgagatttagggatttttctagtacaagtttgtttgtggagaggatcataagaaaggatttaacttatatacaagtttttaatacgcgtaaataaattttttaaaaaaaataaaaaaaaaatattctcttgaattaagcttttatattcttttctactttctacgaaatttcattgaaacgcggttatttacaaaattctataactgttttggctaaatttgaatgttaaaagataatataattgataacaaaattatgtggaaatcttgtattttgatacatatctacataatttatttttttatgtaatgataaatacatgcatattttttatagtttagatgt

SEQ ID NO: 15925 - DNA, 621 bp, Arabidopsis thaliana landsberg
catcatactttgtaaacattaaaattactattattaattattaattattttgagcgatatattaacaattataaagaagttttatatataatttaatataaatattattttatattcaaaactaaaatcgaatgcatcgcgtggacaatttctattagtttaatacagtaaattcatttataaattaataacttttataaattaatatattcttctaggtcggaattagtgccaatgcaaaacaatatcacaaattgataaaataatgagataatcatttataaaaataaaatcttatgtaaacatatagttcatcaatatcataaattaataattgtataaatgtatcacctatatatattatatgtaagaaattttgagtgaaatataattcttgtattattattttctcttaagtttgcattagtacttgtttaaatttatttctaatatttttattatatcttttttatcaaaaacttttggtgttgtcttttaaacataatagttgtttttacttgtagaaatatattttatatattgaaagaaattttataatttacaaaaatagaaaattctcttttattattgattatagataaataataaattttaccatct

SEQ ID NO: 15926 - DNA, 1818 bp, Arabidopsis thaliana landsberg
aacttactttcccatttcatgcctttgattgcatagagtctccatttagtcccttaaccaatttgtattctaacttccggtaccattccagttgtttcttcactatagtttccacatctctgaaagctctcctcacaagcccaacttccatttctctttccacaagcttcctcactgaatctatcatcttatatgcaatctccttaagggattcagcataatctgggtcatctatcaagtgaataaccgcacaaaaggcacccgtaaacgccaagacccagcaactgttatctaccaacaacactgttggtggctctaaccttgtgattatcactgggaaaagattctccataacaggaatcacaaaatcgtcgtcaacaagcggcattgttaagcactggaagatataaagtgctatctgaaactctgttttactcgatgcaatataatctcgtagctcataacatgtctccccttggtagaccaacatctcataggcaacatggttcaccacctgacctaagacttggaacatagagtatgaaactccttgttcctttaagcaagacatgagcaatgactggagttttctcatctctgaaatatctattttcgccttttttgaattgtgacgagagagtacaacttcaagtcgtctaatagccatctctctggtcctatcttcaagatcagttgacgcaaagattttcaaaagttcaagtgatgataaatactttaaatggtcataccaggcacgatcaaattcttctccatggtcttgtgtttcgtgaggttgttgttttgtaaacaacatgttgatcttcgtcacaagctcattggtttgtgttccaacttcactgagttttccgatctggctcacgaacgtcgacacaaaacggcattgtacttcactgtacttatacagattcatgtctcttgacacgaacctttcgaaatcttgaagcacacgtaccaaaaacatttcgtttccattgtccactagcttcttagctgattccacaatattcacaagctgaaatctcaatatcttctttatcacatcttgtttcattcctgtattgaaaaactgaatccctaatttaacaacagtttgtaaagccaagctccattcttcaactccactttcctcaggattaagcaaaacctccttagctttctctaaaataatcgtcagaaacttcttgatgagttcctcgtagccaggtggcatatcgatgaagacgtgaaacgccttgacaggttcttcgctactcgctagcgataagatacaatcaccgagctcgtcccatttgtctttatgcaactccacaacattgtaagctacacaagacacgatctttctaaggatcttcacgtcagattctttggtttcttgcattgtcaagcatggaatcaaaagggttttgatttcataaagagagtcgagagagagagtttgcgatttctcaaaccggtgagagtttgggagagttgatagagtgatcggaatctgagaatgccattagaagaagattgatagagcttaagaagctttagggttaagcaacctaggttacaagagacgcagtaatcgtacagagctcgcgatgttttatattcttcggagtctttacgcttaaagagattatcgacgatcatcgctagttcttcatggctttcactcacaagaatctctcttgctattaactgaagagtcaagaatcctttattgctattccccccaaaaattttgggatcagaatcttctacaagttgtggtgcgtttttgttacgagcttaagataaaccggaaataac

SEQ ID NO: 15927 - DNA, 907 bp, Arabidopsis thaliana landsberg
ctatgaacttcttaccggtaacaaacctaatgtctcttactttcgtgtatttgggagcaaatgctacattctggtgaagaaaggtagacattctaaatttgctcccaaggctgtagaagggtttttactaggatatgactcaaatacaaaggcgtatagggtcttcaacaaatcatcgggattagttgaagtctccagcgatgttgtatttgatgagactaatggctctccaagagagcaagtttatattgatgacatagatgaagatgaagtttcgacggccgcaatgcgcactatggcgatagaagatgtgcgaccacatgaactgcaggaacaagatcaaccttcttcctcgacactagtgcatccccaactcaaggcgatgtataggtacctcaagaagaggggcaggatcaagggggagaacaggaagaacatgttatggagaaagaagcccacatgcccctccaactcaagtccgggcgtcaatccaaagacatcacctcgtcaatcagattttgggtgacatcagcaagggagtaactacttgctcacgattagctaatttttgtgagcattactcgtttatctcttctattgagcatttcaggatagaagaggccttgtaggatccagactgggtattggccatgcaggaagagctcaacaacttcaaaaggaatgaagtctagagcctggtgccgcgtccaaagcaaaacgttgtgggaaccaagtgggtgttccgcaacaaacaagacaagcacggagtggtgacaagaaacaaggctcgacttgtggcaaaaggttatgcccaagttgcaggtttggattttgaggagacttttgctcctgtagctaggctagagtcaattcggatattattacggtatgctgctcaccattcctt

SEQ ID NO: 15928 - DNA, 2674 bp, Arabidopsis thaliana landsberg
cgcggtgggcaagcaaagtttccctaaaaaggaagcacccaaacaaagatgacacagaagagacagtttcaatttggcgtgatattaaggaacttcccatacagttgaggaaactggacctgaagcgtttccctgataaggaacttccagtgtggctttggcctcagaaccttctctacctggaaaagctccaccttggaagctcgaagcgcctaaaaggattcggtgccttaccaggagagccaacaaagtgtcatgttaaggtcttacgtctcacgtccctgctaaagctaaaagtggaatggagagagctgaagaaactctacttcccaaatctgagattgttggagagctatgagtgtcccagaattacattctgtccctgtgatcgcaacggaatctggagatctgataagaacgatggtgcaacgacatctctttaggatccaaaactctcattttgattcttgttttaagaagacttactttttgtgtgattgtgttgttggtttcccatttttatttattttcagtttctttcatgattgttccttcctcttttgatgagctatagttgcttttgattaatggtttgaaagggattgttttcaccattcttccgatgtgtcaatgtattgtttagtttcttaaagtttttgttttactttgatttgtgaacaaactaaataagtaaatatggatagctaaaccaatgcaaaaagcaaaatagttgacgaagtaaacgacaaacgagattaactgatgaaaaatgacaaaagacaataccatttttatattcatcgataagagatttggaatttgaaattttcttgcaacaaaggaaattaaaaaaataaagaccagaagacttctggtttaaagaaagtcaacgactgaataaatctcagtctctctgaatccaaacattcatcacaatcattaatcagaagaagaagaagaagaagaagatggtacaggtgattcccacacatatcaaaaatgtctgggacgagtggaacatcagaggaattgtaattctcagtctctcgattcagacaattctcatcatcttagcaccattgaggaaaagaacaccaaacaggttcctggctttagtcctgtggttatcttatctcttagcagattggtctgcaaactttgtgattggacttattgccaagaatcaagggaaagaactgaagccagatgatcctcctcaagatcagaagctcatggctttgtgggcaccgttcttgctcttacatcttggtggaccagacacaatcactgcatactctcttgaggacaatgctctttggcacagacactttcttggcctggctttacaggctgtttcaggtgcctatgtggttatccaatctctacctaattctctttgggtgatcatactgcttttgttcatcgctgggaccttaaaatatctggagaggacgatcgccttgtatctcgcaagctcagacaagttcaggggttcaatgcttgagattcctgattcggattctaacgagaccaaccgcccgagaaaggaagacgactcgatgcctactgaaaactacatgctgtatggtaggcaaaagagaccattacggctagaaaaccccggtactttgacacacctcgagatccttcagtttgctttctggtttttcaataacttcaagagtctattggtaaataacatctttagctctgagcagcgagacgagagcagggaattcttcaagaatctacaagacgaagaagctttgaggattttggaggtggagctcggttttatctatgaaggtttatacacaaaagtctcggttcttcatacctgggttggagctttgactcgaaccatagccttgggatcacttctgtcagcatttggcatctttcattacagaaccaagaagagccaccagtttcatggagctgatatcgtgatcacctacactttgttcttagttggaatagctctggatcttatatctctcctcatgatcttgccctcagactggacatttgctgtcatcagtaggataaacgaagacgaagtagacagcggctcatggatagaccccgcactcaagtggttcctcggttggaagcagctgcactggaagacgcaaaaatgctgcggaggagtggaacatgaggtgcttaatacgccgtttctaatccaaagatgggcaggaagcatcaagctgttcaacttcattgcatactctgtgaaagcagatataaagaggatacatgacgtcaaaggtagaacacgtcggcttgtgtggaagactatactttaccctctcatttacgttaccaacatcttcaagaaattgtgcaaaaagatcgctaattggaatgatgatcttcacaagtatattagagatgtcatcggacagtggtccgaagaaaatccagtagctcattatgctatcattattgttgagttctgcttcatgatacctcacttctttacgtttattggtaactacatgaccaacttcctccgcatcaatgatctgctggatgagatcaatctaatgagatctgtacacagtgaacccttgacaaaagatctgtggggattcatatttactgagcttaaatccagactgcagcgtccacacatggaaagaagaaaaacaaaagccgtgaggaaaggatg

SEQ ID NO: 15929 - DNA, 565 bp, Arabidopsis thaliana landsberg
gaaactgaagagaaaactttgtgtacccagagaatctgattttgccataaattcggatcgatctcgagctctgctctgggcctttcgtttgctttttgtgcgatcgaaagatggttgcattgcacgtgtaggtgtaatatatatccaacggctacggttacacgttactaatcgtttttattaataaaattaaatatatatactttactaatgaattaagtatatactgtaactggcaacagagcagattactagaaacaccgaatgatgtcaccaattttctttaatatattcaaaggtttgctttcctttttttttttaacacaaaaccacaaattgaagaatgattaaaaaaccagatggaggagattaaggagtactggaaacaaagttggttaacttaaaccggtattttattgcacataaccaatttgtgtagagtgtacacactacacaggcttacatatatagatccacaaggaaaaacagaagcacaccaatgatacgattgagctaaaaagaaaatgtgtcaaatccgaagctgactccattattcttggtgaaa

SEQ ID NO: 15930 - DNA, 1878 bp, Arabidopsis thaliana landsberg
  unsure (1)..(1878): unsure at all n locations
tgtcgatcaacactcagtggtgtgtcgatcgacactcatctcgtcacgtgcaagaacaacaggagaaacaagctttcgaggaactctaggctttttatcttgtgaagcaaacttcaaagaatctaatgagttaatcgaaggtaaagtaggagaagagagaagagaacttatcacataggtcttcaagtggtgtgggctgaagagaatgtgcggaatgctctgtttgtgaaactcgagggtgtccatccacaggggtagttgtgtcgatcgacaccgttgctctacagctctcattggcgagctgagcggatgggagcgctgtgtgtggctctgttgttggattctgaggaggtgtgtctgtgctggaagcaatgctactgatagacttagtaagctctgaaccatccatgccaaactccatatccaaatcacacaccttgagagagattctccctctcttcacatcaaacctagcaccagctgtagctaggaatgctcttccaagcataagaggatctttgggttccttctcatagtccaggactacaaaatcagcagggataacagtattaccaaccttaacaggaacatcttcaaggattccttcagggattcgcttggaacgatccgcgaagagaagagtgatgcgagtaggtctgtagtgagtcatgccgagtctctcagcaacagaattgggcatgaggttgatgcttgatcccagatcacataaagagcggctgaatctgcttgtggagataaagcaatcaagaannnnnnnnnnnnnnnnnnnnnnnttcttagtggtttgaccaggagtaatggtgcggatgtactcagctatgtctactctatgtgccttctccttcttggccttaggcagcatgattgcactgatgtctctggtaagcagcttagcttcatctgagctaattccattgtcaacaagtcgcttgacatacctgttgagtgaagcagaagatgtcctagaagcatccttaggaagagtatcgaggatcttctccattatggctgtgcacttagcagcatgcatctcctgcttagaacgacgcctcctcggatacgggacatgaggagtgtagacagactcgggctgcataggtatttgcacctcacatggtgcagtccggatccagtgtcgatcgacactagaggggtatcgatcgacaccatcgtattgagtcatctctgagaagagcattccatatggtgtcgatcgacacaggaggttgtcggtcgacaccatctctgcaactgggagctccaactcgttttcagtgtccaattctttccacacatcatctccttctctgatcaagattacattgcagctcttccttgggttagcatcaggattaccaggaagaaaaacctcttttctcttgatagattgagcagtttgagctacctgtacatctagtttcttcaagtgagagctcagattgtcgatcttcccattaatatctgtgtggacaacatcaaacttgccattaaactccacaacaagctttgattggctctccagaatctgctcaagcatcgattccattcttgtctctgctgagggtggaggggggcttggtaagttgaattaccataggtcctctgaaagctgctttgaggaaaggtcttctggaaagcaggctttggagtgtagttggaggaaccctggttccatgtaaacctgttgccactgaagttgccatgtggctgcccaaaacttcctgtatccctgaccatctatgtagaagactccttcctctgactcaggctcaggctcaatagtctcttcctcagctgcaaagtggacatgcttcttccctgtgagcaagttatgaaccgaatccagcttagcattca

SEQ ID NO: 15931 - DNA, 1191 bp, Arabidopsis thaliana landsberg
  unsure (1)..(1191): unsure at all n locations
gttcttacccttttggccggaaaatgatgggtttacgtttttggctgaaaattttcgggtttaagcttattggcggaaatatcttgggtttacgtttttggcgaaaaataacggatttacgtttttggcgggaaaatctcgggtttacgtttttggcggaaaaatctcgggtttacgtttttcgcgaaaaataacggatttacgtttttggcgggaaaatctcggatttacgtttttggcgggaaaatcataggtttacgtttttggctgaaaaatcacggggttacgtttttgacggaaaaatcatgggtttacgttttgggcgaaaaaataaaggatttacgtttttggcggaaaaatctcgggtttacgtttctggcgggaaaatcacgggtttacgtttttggcgggaaaatcacggggttacatttttggcggtaaaatcacgggtttacgtttttggtgggaaaattacgggtttacgtttttggcgggaaaattatggatttatgtttttggcgggaaaatcacgggtttacgttgttggcgagaaaatcacgggtttatgttttttggtggaaaaattacgagtctactttttctcaatttcatcgcttgtatatttaagaaatttgaaaaaatattgattttattaaattggtttagatgtgttggttaagcttaaattgacattggtttagagattttagggtgtttaattcaattttacaaaatttgatgggttaattgagtaaaccattgaaaccattaaccattacaacccaactcatttgactcatcaaaccaattgacccaataactcatttgacccatcaactcatttgagtcaaaaaaatttaactcattagggttcatgggttgagttgagttgagttgacccataaattttgacctattttaacacccctatacgagatataaagatttatatcattttaaactactttccaaaaaattataattagtacttacataggtaaaacaaattaacaaaaaaaagtttaactaaaaaaaggacatataggttttagtaggcaaatggccaattccaccccaaacttagttgctttatcgnatccacacataaaactttgttgggtgcctaaaactacataaactcaagttaaaattgaattttatacacgaacaaaacgaactctggtctaaacc

SEQ ID NO: 15932 - DNA, 1492 bp, Arabidopsis thaliana landsberg
tttgattatgtgtactcatcatttaaagctttgggtaggatttagccgattctccatcggctctagcattacatgaataaaacccttcctatctatacttatgaactgataatcagaaaaatctactcttgtgagatatgtagcagtctcataagtccagagtacaggggcatcggccacagcgatacatgctgatacatcagcatgtacttgttctacatcatcacctacccattatattaacatttgatgtaatgtagacgatatacattggttggcatgaatccaatctctgcctaggattagactgtaatttccttctacatcagcgacgaagaatgcagcaacaagggtcttagtcccaatggttaactcaacggacgtgactcccctggctttgatcgaactatcagttccaacaccgctgagggtcatgttggtcttgacaagttcgtcatcttgtttacctaattttctgtacaatgaataaggcattagatttacagctgcccctccatctaccaatattttagcaatcggtatcccatcaatgtgaccgcgcacgaagagcggctttaaatgatttaccgattcctttggtttagtaaaggcgacttctttaggaccaaaatcaaactgggcaaccacaggttcatcgtcgccgacaatagtacaatcggcgaaaaatgtaataacatttgcatccatacatgggcattctggagaagcttcgtagtcgaccaggtcttctcccagtaggtcgtcctcctccattgatgtcggtacgtcgtcggaggcatcctggtgtggtgcagacggtccggacttaggggtcgaacggtccgcgccttctatagctggtccagcctttttagccgggttgtctgccatacctgcagggtgctgcacaagtgctattttattttctatttttgtggtcgtttgcttttcctcaacagtctttggtctccatttcttttgcggtggcgggtactgtggatgtgtgtcattgaatatcttttccgcctccttttcctggttctcttttgctcttaggcgttgtaattttcgcttttgcgatcgcattaatcccgatgggtaccatcggggcatggagtattttgaatcagccgttttgttgacagccgtatcttcttttttgtttgtgttggccgatttaccagaaatgatcggccctttcgttattttgttgtacgatgacatctattgttcctacttcaatgacgtccccttttatcgtactgttggaggccgtagctatatacccccctgccggattagtcagcctttggggccgagtggttcggcaatcttgctgggcctgtgctcgtggaccagattgaggggctctcaatcggtcttgtactggaggcgtcaacctgtcaagaacagatgtttggggtgcccccaagcggggtaatgtggcatcccaaatgaatatgatggtatgccccaacatttgatttgggac

SEQ ID NO: 15933 - DNA, 689 bp, Arabidopsis thaliana landsberg
tcctaaaaccctttataacctgtccactgaaatatataaaggcaataccaattcactatgcctagccttaacaaaacctaaacctagagtgataagcataaaccactaaaagccacgtataacccagaaaccctaagttactcattaacttagtttttcttctcttagcataatgttattaatcctgcataatcatgacatacatgttcattgcatttcgatagactgtaaccttgctgacggagagtacgtcctcgtgctagagcaaggagctgctcaggaggtggtcccggatccagcaccagagcctacaccagaggacctgcctgccactgctttggaaggcaagccccggttttatgcataacctgttatttatgctattttactacacttattgattgtaggattgaatgtgcacttaagtgtaggagttgcttgaaaccctagttgcatgaactcaggattcccattgagatgaatactagtatgctaagtcgagtagctgctttattaatcaggatctcggtagaagtcgagtgatttttctagcactcgcgcaaggtcaggaattggctgtatccactttcttatcatattgatgttggtttgtgggcaacaatccatggggattggttgtctacgggataaaacttggaataatgattaaggtgtggtaccgtgtgtca

SEQ ID NO: 15934 - DNA, 1000 bp, Arabidopsis thaliana landsberg
gggtgttacaatgggttaaaattcatgggtcaactcaatccatgaaccctaatgagttgaaaattttgactcaaatgagttgatggatcaaatgagttattgggtcaataggtttgatgagtaaaatgagttgggttgtaatggttaatggtttcaatggtttacccaattaacccatcaagttttgtaaaattgaattaaaccaattaaaatctcttaaccaataccaatttaagtttaacatacacatttaaaccaatttaataaaatcaatatttttccaaatttcttaaatatacacgagataaaattgagaagacgtaaactcgtaatttttccaccaaaaaatataaacccgtgattttcccgccaaaaacgttaacccgtgattttcccgcctaaaacgtatacctgtgattttcccgccacaaacgttaacccgtgattttccagccaaaaacgtaaacccgttattttccctccaaaaacgtaaacccgttattttcccgccaaaaacgtattacccgtgattttcccgccgaaaacgtatacccgtgattttcccaacgtaaatccgtgattttcccgcaaaaacgtaaaaccgtgatttcccctcagaaacgtacacccgtaatttttccgccaaaaaaatgtaaacccgtgattttcccgccaaaaacgtaaatctataattttccgccaaaaatgtaaacctgtaaaaagttaaatccgtaaatatcttaagtttgatgataatgaattaataattagtaataatgataattatttattattggtgggcgagcaagtacaactaaaaggtttagttaagggtcttggccttttggcttctccgattccaaaagaatagattttgtggttagattatttattttattctattttgccgcttcttaggtcttgccattctcatttgcttttcactagagtaaattcttttcaaaatccgaaatttacagaattttccagattaaatgaa

SEQ ID NO: 15935 - DNA, 559 bp, Arabidopsis thaliana landsberg
tcaaaagtttgaaatgtcgatgatgggcgagttgaattacttccttgggtttcaagtgaagcaactcaaggacggcactttcatctcccaaacgaagtacatgcaagacttgatcaagcggtttgggatgaaggacgccaagcccgtaaagactccaatgggaactgacggacacgtcgacctcaacaaaggaggtaagtccgttgatcaaaaagcataccggtcgaggataggttccttgctttacttatgtgctagtagaacggatattatgcttagtgtatgcatgtgtgctagatttcaatccgatccaagggaatgccaccttgtggccgttaagcagattcttagatatttagtttctacgccttgcttcgggatctggtatccaaaggggtctacctttgacttaattggatattcagactccgattatgctagatgcaaggttgatagaaagagtacatcagggacgtgccaattcctaggaaggtccctggtgtcttggagttcaaagaaacaaacctccgttgccctatccaccgctgaggtcgagtat

SEQ ID NO: 15936 - DNA, 534 bp, Arabidopsis thaliana landsberg
cccagtcctccaccggagtatgaaacttgtttaggtgacttgtacagtgttgcttggatggaagataggtaagctaaagaatccagatacgccaataagagttgcagtgttctgtttctcatgtttatgaatctctatggatgtcccttatattgattctgatttgtttaaaatgcaacagtggtatgcacaatttacagactgagactctgcaccagcaatatgaacttgtaagtttctagtttttgtggtttgcctgtaatgatggagctaaaactttttcaactgtaaattagattgttagcaaagatgtgcatcataaagtgtgtctttgtgttttcaggtgaaaaggaggactgcacctgttgggtactcttatggttctcatgtcatgcaatatggcgatgtaggaattagcaaggataatctcgatctttatatgggaacaaaccctgccaatgacaattttacctttgcggatgcgaattcactaaagccaccttcaagagttacaaaccagcgtgatggggatcc

SEQ ID NO: 15937 - DNA, 867 bp, Arabidopsis thaliana landsberg
cgcaggtcgactctagaggatcccctgattaataaaaagaaaggaataaataaaacacatgtaaaaaacccaaaggaataaaactcaaatcgatttgggcttttctcgattctctcttttccgcttttgcatgtctcttcttcttctttgatttcaaattgaaaccctagcaaatctccggtggtggcttctcgatacgccgacttctcttctccggtggtggcttctcgactaggcgacttctctctccagtggtcgctgcttgacttggcgacatctcttctccggtggtcgctgcttcttctcacacaaaacggcgtgagaactcttctttggttcaagcttttgtagccgccgtaggttccggctacacaaacagcagtgaagagtcgcggtggcccggattcacttcttcggtggtgtaggtaaactattgacccgccgccaccgcttttgaataagtctgttttatggattgaatttcgtttgattgtgatggtgattaatattttttgttgcagatctgcaagtttgttgcagcattagggttgtgggttttctcctttcttattttcacataatcgtgttcatcgttcgttttcaactttctgatttactccttatcaaaagcagcttctctgaccacaacaacagcggaggtatcgactttggtgtaagtaaacttcagaacctgtcacctttgcattttttttttttttttcattttttgattgattaatgtgatatttgattctcataatgataaatcctttttgttgcagatctttagcattacttcggcgcttaacagttgataattccaattcataattctttataatctagtaaggattttggacaatgtca

SEQ ID NO: 15938 - DNA, 450 bp, Arabidopsis thaliana landsberg
  unsure (1)..(450): unsure at all n locations
taaagccattttgcctaagattatctaacaaagcaggctagtggctaggctcttaagttcttaacaaaggtagctaggctcttaatttcgttaagttcttagttcggttttggtggaacgactaatgttaagtgtctacgtattatctacaaattatataactaatcaaacccatgactgataatatattgaagaaacacaacccatttaatcgatggcaaaggctcgggggtgacaattgtattactaatacaagattatgatcattaatggtaatataacaacagtaaaatcagtcacatttgaaatttgattcaagtactcaaaagagagaataatagactaagaaggctgcggacgagggagacggtgcagccaacgaggaaaacatactgtgaagcgaggagatagttaggaccaccatagttatggatagtctncatatactcg

SEQ ID NO: 15939 - DNA, 642 bp, Arabidopsis thaliana landsberg
  unsure (1)..(642): unsure at all n locations
aagtgaatgatctttgattaataaaatccacaagtcgacaaacctgtaagaacttcttcacgaatggaaggaccaccaagcgatactcaactgctgatagcttcgggaatacatctattagcttttcgtacgtagatttgttctgcaaaatctttgaatcaatcaaagggaactgcgaaaaagaaacacctcatatcagccatcacagatcaaatcttgttcatatgaataacaagaaagaagaggaagaagaataccttctctttcagtgatttccttagcgttaacagactttttttcacatcatcatttgggacagtagaagagagttcggatatacacttcttatcttcgaatacttcaaagctcggagagctttgtctttcaaaaacatctcttacaacactcaagaaacattttgtatcatcatcttgcttacctacaagatcctcacatttcattcgaagtgcagactcatatgtgctccgctgattaacattctttctagtgtcttctctgtcacaaatcgtctcagcctcacccaacatcttctcataggttagcatcttccgtctcttatcatagtagctntcctttttcctaatcacacaccgtactattctcaaagctgctaaccatagc

SEQ ID NO: 15940 - DNA, 476 bp, Arabidopsis thaliana landsberg
tatttttgcaggacatcttgtgatcggtatggctattgtgtgtatatgatgcatgttaataaattattcatgacctgcgtgtcgtgaccagggcaaatacggctggagccacatgcagtttacatagttaatgtaatgacctgcgtgtcaacatagtcataatcaaaccgtaacactaacctgtctacccgcatgacgctcgaaacgtccagaatgactcctcagctcgatgtaagtcatacctatatcatggagatggagatcatcgtgatggatagattattggagatggggatcaccatgtgacagcaagccataccgaatcacaactgttgtgtgaatgccattcttaatgttctacttgttcatattgcatatatgtccttgcgtgcgatgatataagtaggacgatccctcataaatgtttaagcttaaatgcctctccaaaccttgcactatcataagtcttgtacaat

SEQ ID NO: 15941 - DNA, 1655 bp, Arabidopsis thaliana landsberg
  unsure (1)..(1655): unsure at all n locations
agttacacagatataagtttggagcgtacatctgatgttttatttatttgcagaacgcagttcgtgtgactctgcatggaactcctaatctctgcacgacctaacctatccacgacactcagagagccacaagtcgatgtgttttatcatatgttgcctcactttgttcactgcatctggtgaactgcaattctgggcatcacctgcaaatgggaggaaaaaaacaggaaaagaatgggacatcatattttcttaacagttgttctgatgcttgtcattgacttcaggcatcggaaacagagaagaagccggtaatataccttcaatgaccattgcagattgggggcatcctcgaagatcacttccatgcccacagttgtgacaagtcatgatgtacgaaggcactgtgtcatcaaacattatctttttagtgtcccagacaaaggatttgtctgaatactgctacataacgacataggctatgcctgagttattgctatgcgattttgatcaaactaaatgaagacttacggtcaggagatgaggtttgtttggatgcatgacgccatggatcctgtgacccatttgtgaagataatcttggtcgctacaaaattgagaataagaagatgcgaagaaactgttggaatgtgcacaagtctaaaaggatcgtcgagaagttttccgatattacataccagcaattttatcgcttccatagtacaagtttgttgcatcgacttcagggtagacacctttcccaaagaggctcttgcatagatccaaatgatacctatcaaatgaaaagaagtgtaaatgggacaataaatagaaacgacaaaatcagaattctgaatatgatatataagcttgggtctgtgcatactctgtattgatctgatgagaccggatgctatcgtttgcaggtgccacctggaaataagccacttcagtacaaacttggaaccaccaaagcctatctgcactctctagggtgaccgcagtgtctagtagatgtttccggctatatgttttagagcttagcccgaaaactcccatgcaaaactctctaacatatttagcatatgcttcctgcattaacacatccaatgttatgtatcaccaaatacaattcttctgtttgcaaaccatatgatgaatgtcaatatatatacaccaagcataagtaaagagcgatctaaaaaaacaaagaacttaccactaaatcaccaccattcttttgagcttccacgagtggtacacatagtttatctgggtttccgtattgaatctgccagataaacatctaaaactagaaagaaaatgaaaattttataaatatgaaatgaacctgcttaccgccataactcctgcatccgctattaagtataagaaatcagcatcaacatcaagctacagatttcagaaacttaatcagattggagatagacttcttacttccttaagattcaaacaaaagaaaacagaaacagtnaagctagacctccgtggcattgaagagagctttaacagccctgttattcactttaagccctagttccaagagtttattagtctcttgtagcgcagtttcacattccggtccagccgactcagctatctattcaataagtataaaaatctcgattctgtcag

SEQ ID NO: 15942 - DNA, 615 bp, Arabidopsis thaliana landsberg
ggaataattgttataagaattttgtttcgtcatttttctaatgcttcctttttttaataccagtgaaaaagtatgtattctatttatattcttctttgttttcttttataatcatgagtttgaacaaaggtatttttcaagtattaaattgtcaaattttataattaatttacatgttaataaaatacacgaaactgtacaaatacaatgtgtacaactacatatactaaatatacaattacgtacacaaaagtacatatcaatagtataataaattttccatgctactgaggagactacatatactaaacaaaatacaagctgaggagactaaatatatttagttaataacaataatatatgatatacaactacatatttacaaacaaagaaaatatagtagatttgtaatatatacataattgagatttaatgattgattaaaccaagaatacgtgcgtagcacgggtactgacatagtatgtgtattattctggacttcataagattattttgcatttttgatgtgaaagataaagttgcaaaaatggtcgaatttgaaggttttttgcacaaacccagaaataaaataaaacaatataagatatgatcata

SEQ ID NO: 15943 - DNA, 499 bp, Arabidopsis thaliana landsberg
ttcagaccaaaaaaaagtttaaaaatagtaagtattcaaaagtagtgaatgagtttaaacatgtaacataattgtagtatgattaccatatcttcagctatgtaacataattgtagtctaaccattcctctgcggctaatggtgggaggaatctgtttgctccttctttccttgtaactatcacttacaacctaaaaggaaagtgttaatatgaaagacattatataggaaataaacaaagtcaattacaaatgattaccttaaactctttgctagttttgagcttgactagttaacgccactcaaatggagaaacattcttaggtcgcagcttcatcctcaattggttagttttggcttttctaatcttagtgactagccaggatttccatgacctccacaaacatcccatctactgaaacactacaatcttctggtactcttcatctatctcaaaaaatgcctgtaaatatagtccatcaaaacaaaacaaaaaagt

SEQ ID NO: 15944 - DNA, 575 bp, Arabidopsis thaliana landsberg
ggtctcaagggaaacgtcaaaatctaatagcaaaattcactgtaaaaggtatagagaacaacacaacacagagaattgcttaaactttattcttattgataatcaactctgttacaagtattatctcagatcttacttaatctattctacccaaatgatcaactccgactaagaataactaaacttaattctctcctctgtttcttctcacacacacttaaagataaagagaactaacacactcaccttcaagcttttgcaatgctttgaagtttacaatcatatgacagtattctagagtgctcaagcggctccacgctcatctctagaatacttatacatattctccagaaccctaaacctaggatctccaagaattcctaaaagaaatctttcttgttttccaagcttattccgtccttattcttcgagaggatatcttccatatcttctcgatgaatcttgtctttgatacagcgttaagtcagcttccctccttggtttatcacatcattcgccttagcttgtcacgtcagctcccgcctccatgtcaaaaactcaaacgtctgatgtga

SEQ ID NO: 15945 - DNA, 439 bp, Arabidopsis thaliana landsberg
ccacctagcagcaatgtgtgattaagactcaatcgatgtccattagcaattggtatcatgaatcgacacaaatgcaaactataaagaaggcaaacatcaagttgaatcaaacctatgattttgcggaaacgctttggaggggccgggccaagtcattaaaggagatgggtcattgcttttggggataggcctagaattggttaatgggctcaaacatgagtggcccattaagagaaaccgtagcaaggcttccgttgaacagaggacggtgatggtacgacggatctgtggtgacagataggacctccgatgaaagctaagcgatgtcgttgggactgagatcatcaacgacgaggtacccacataaaagagatcggaggtaagggtggtgatggatgagatcggatccgctattgttcttttcattttttctttctca

SEQ ID NO: 15946 - DNA, 3296 bp, Arabidopsis thaliana landsberg
  unsure (1)..(3296): unsure at all n locations
gcaccatatatcaataaaaaccgattactatataaaattaatcagtaaaatcaattaatcaatagtatggatacaaatatgcagtgaggatgggtgtgacgtaaaaggctacttcacatggtcgttattggataattttgaatgggaacatggatatgcagtgagatttggtttgtactacgttgactataaaaatggtcttcaacgacatgctaaacattcagctatgtggttcaaacattttcttgagagatccggaaagccaatgccgatggatctgtttaagagtgtcaagagatggtggtctacattacagatgatttaagctcatatggtgggggaaattaaataactgattctttatttaattttgataaaaattacgggataagattaagattcttttaatatttagaaataccatatacatttgtgtatatttgtgtattgtttagtttccttttttcttaaggtcttttgacctaattcttgtagtatctatatacatgtaattttttggtcaaaataattttgtactttatgttttggtactatctatgtatagtttgttcttctcatgaataaaaaatcatgattccattttaaaaattgagcattaacccagtgcacattttggcttgcaattgttgggactaggtaacacatacgtagaaaaacaattacaaaacaccctacccttatatgcgtgattgtcttagggaggcataaaaattcttgtgtagtgtttttgtcatctgaaatatatttaaagggatgaaacatacttcagctggaaagataaatattccagaaaactaaaccaaccgaaaatgttagataataacttaaagagagagataagtttggaaaaaactacaaaactgctagagctaagtttttacttattaaatcttaaacatattcatcgatttttcaacgaaacaaataattgttttgatgtctatggaaccaaaaacctcaccgaaaactttcaatcttcacgtactcgcttgatgtttggtagactcttaaaactaaaacttatgcttacttgctctgatttgataagcgtcttgactcttgaggtttagaaaccatctattattcagcaatattgttatagtttataatttttttgaacaaaaatactaactttgtagatatgaaatatttattgtgatacattggttactttttaaacgcttttattttttattaactactgataaattttagttgtttcataaaattgttaataaaccatgagaaacgttacaagcaactattaaacatggaatgatctttgttcacttggaaagcaagcgagtgagagaagaagagtcaaagacaggaggactgcaagtgaagtgttgacaaacaagagccaccactttctctgagtttctgttcttcttagccatctcagctacattactgttatgctcttcccaaaactcgatttcatcagaactagagggatctatgtgaatcacctgctcagtaaaaccaccaaaagtcacaaatcttgaatctagaaatttggataattttttaagctcttaccgttttattaggatcatagactgaatgtgctgcagaaagcatgttggtaagctctggggaagacttagaaccaaccaatacaacttgtttcctcgacggaacagagatcatatctgcggagcagcacattaatggcacagccaccgccagttctcttaacctcaactcaaagactgcctgcaaaaacaacaacaaagagactcaataatctctttctatgaatagcaaatgggattagttgtttctttgtttaccaggagacgatgtgccgtgttgaggtaggattcagctttttctccggcgactatggaagctaacctcacaagattgatagcagaaacagagttccctgaaggttctgcaccatcatgatcttcttttacacgaagaagaaccgatgggtcttgtccttcagtattgaagtatgctcctccttctcggtccagatataactcatcctaaaatgtttttaacttttttagccaaaatcaagaactttaacaaatcgagctagtaaagatctcacttgcctgtgtttcttgaagtttaatcgcccacttaagccattcgatcccacctccattctcgtaaagatcgagtaaaccagagatcaagaaagcataatcgtctaagaaggcaggagctttggatggcccctgtctgtaactgtgttgtaatctgcgagactgctcatcatagagatttcctctgataaacaaagctgctttctctgcaacctctatgtaatcctctggctgaaaaatgagtcttctaattacaaaacggtcaaagaagaaattaaaggaaagggtgtnnnnnnnnnnnnnnnnnnnnncaccacagggaaataatatttggtgctttcaggctcagccttaagaatcttggaagctcttgcgaaagacgagataacaagaccgttccaagacacgattatctatgaaagaaatcttaaatggttaacacatctgaagaaacagtagagaagacaacatgagaattccaagaagagtattaccttatcatctagatgcggcttaggtcgcttcaatctgacatcgaaaagctttcttcggcattcacctaatatctcctgatacttctcaacagagaggctaaactttgatgccatagcagacgtctcatttctttcgatcagcacgttcttcccagcaaattcattgtgcgggtcactcctgctcgaaagatcgcagttacctgatttcttaacataataatgctccttgaaaagatcagcattctccccgaggacttcatcaatcttgaaaccaaacacacacgcaaaacaaatgtcagtatgcagagggaaaccagagtcagctcatgaatatatcatatatcagagaaaagaacctcatcgcttgtccatatatagaaagctccttctttctttctctttgccccctcgaactcaaagctatcggcatcttcagctgagaatattccaccttcaggtgcaatcatgtctcttctaagataatcaaggatgtctcttgccacataagaatacataacgtccttggtaatgctaaaaccgtcgaggtacacattagctagttgcccttgatcatacagcattttctcaaaatgtggaactgcaccagacaaatagcaaaaaatgcgtcaatctcaaaatatttttcatcaccttgatactacaggatactgtttgaagttttaccatgccaacattcatcgacactggatctatg

SEQ ID NO: 15947 - DNA, 883 bp, Arabidopsis thaliana landsberg
caataattgtatccacaagttcctcaaaaattaggtgcatctcaacatccaatacccaagataaataattcttcccagaaatatcaagggcctcaaacgcaactctcgtgagatttgacattttgttgaaaatatagaagtgtgattaaataatcgatgatttttcaaaaattaatcaatatactacatgtgattaaacaaaagtaataatcgattattaaaataacatcaacatatgattagctacaaagcattaaataaaaacagcaacatacatttcactactaagcatgaatcaacgaatcatatattaacataacaaaccagaaacaacgagaacaatgatatctaattaattttaccaaaagtttttaaacggggaacataaatcaaagaactaagtcaacaaaatatcctaataataaatatgtagttctgatgtgtgacgataatcaaacggtgatgcatagaagagataacaataaaataatatattatctttaatcgaatagtgcagtcaaccgatctcgtcatattgaatccatatgcaatgatatactaaccaatctaattaaaccaaataactataatcgataattcaaagcagtgataaaaattcaatcgactataccaaatcaaagaaggtaaacagaataaatattaaaacatttgtcgaagtatggatttaatgttttcaaaacagagaatataacaaactcaattataaagcagtataaattttagaatgatacttggacgtgataaggtcccatcactaacatacgatggcaaagttttatgttagcttgcttggcaagggcttcgtgctgataacgtgttgtaaaattagggttataaattgttgatgtgtattattgatagt

SEQ ID NO: 15948 - DNA, 2797 bp, Arabidopsis thaliana landsberg
  unsure (1)..(2797): unsure at all n locations
aaaacaatcgaataaaactccaatatgattggaaataagagctacgcattactaaatccagcttttgacagcaacacatggattgaaagcagtcgcttgcaacgttactaaagtaattaacaagatcaattgtcatgaactgaagcagtatattataagtgaactcttgtaattatcattacacaatttgatcacaaatctcaaagcttcaagcatttatagtaaatggtaaaattcaaagtaaaaagcagaaactttgagcctataggcacaaagtgtggaacctaaacctaaaatcaaaattacaattcagacaacattttctctgatttaattctacccaaatttcaacgatctggaactacaatcaagatcactttgaagaattgaagaagcatacaaaaagctaatcactttgaaaaacccgaaatttcaaaattcggaatccataatagaccttagaaaacaaaaaaggcgggaatgggttagaaaagttaccggattggaagagacgacggtagaagacaagaaacctcgagacgggaggtcagaaaggaacttggaagcagtttgatcagaagaatcggatggttgagatgatgaagcctccattgacaaaccactgataaaccctagccgaggaaggcgaacccagaagagcaagagagggcgagagagcaaagagagaacagacagaaaatcgtttaggaacaaagcggcacagagatggtcaccgtccgattgcgtctattggagaaagatatgggccttattaggccttaagatgattaagtaagaagttaatatatgggccttaatataatttatatatacatgttaaaacgtggtctattcaaagctaatatataggccttatcaggccttaagatgattaagtaagaagttattataagggacagaactcaaagctactacaagccatgaaatacaaactcaatatgccatacataagctctgatcattactagattaggagcaagaatcaacaaaaatacaaagcatagattagaatctgcacatttagattaatatatagttaagcaagtctgcagttttgctgcaataacttataagttaacaggaaaaatgaaaaagagcttttttgttttgttttgtttgatctctctctctctctcgagtaagtcattcgaatcatagacatataagaatcagacacttgcagggtcgaaatgatgattaaatctctaagcttctggttccatagctcaactgcacaacattgtacaaataatcaaaggtgtgagtcaaatcaaataatggatatcaaaattgtgtattttacaaagttttgtttatgaatctaaagaaatgagccagatgatactgtaaattgagcttctttgatattatcaatttttagcttatttgatgagaatcaatgaagatgacacagagcagcaaattcctctaagactaatcaaagcaagctcatgaagaatctcaataaccatagataatcaattgcaacaagctacattgctgaatattactagaattcacttacccttggctatcgagattaccatggccgctacttcctccacttccataagacacatcatcaccaccaccagctgaattctgccaaacgctttgccatgcctgagaaggaggctgagcataaacaccgctaggatccatcgccggtcttccaatcatcatccctccaggaaccgccggttgtcccatcggtggataatagtaaggaacaccgctcgcggcgggagcaaccatacctcctccaccaagggccgatgctgcatcttcctcttccttgatctcttccctaggaacaatatcaacaaggaaatcgaagatatcggttctagtaatcgcagcagcgatatcgtttttctgaagcgtacgacgtttgttctcttcagcgtgaagccaagatctaatcgtaagttcgagaatgaaaagctcacaagctttcgcgaagagaatcggtgcttcggcggagatcatacgcacatcttcatcagctttcatgatcttttttatcctagctagtggaagctgatggtttttgaaatcgttaacttgttcgatctcttggcgtgggtaggaccagaatagccggagctgttgttgttgctgtaggagaaagtgactgaaagaaggtggtaactcatgaacacgcacaacaccctttgattcgctttgggtcttcaggagagggctcttctcttttgtcagtgatctctgtcctaaaactctaatcttttttttcctaaaaattagaactgttgagagatacaccttcgaagagaaccccttgagcgtttcgtgggttgttttgtttcaagttgccaaacagagcctatgtcttgtgcgatcttatccgcgtccattgacgcacctgagagccctttcctcgtaaacccaaccgcatacaatcctgtccttcctttccaaccattgttgtcagctactgtctttgggaaaccattctttgcaaagaactcattctcttgtagccaatatgggacgttgctgcggtaaccagtagctagaacaactgagtctacgtctagttgttctccattgacaagttcgactttgtttccgttaaaccttttgatccctggaaccacgttgatctttcctaaccggatcttctctatagctccgatgtcaagcaccggtgtcttgcctttcacgctttttagctccattggaaccatctctggtcgtttcaaaccgtgtttctcgatgtttccaagaaccatccaacttaaaccancaatatcgt

SEQ ID NO: 15949 - DNA, 3445 bp, Arabidopsis thaliana landsberg
  unsure (1)..(3445): unsure at all n locations
cgacctggatgggagcttatttgagattagcgttctttgattctccattgcatttggatatttgagttatggtttacacttatcaattatatttgcagaaaagaaaacgtgggagggacagttcgtcgccatcgtcgagtaagcggaagaaattgactgataagacacattctggagctgagaacgtcgagtcttccagctagactgatacgggcttgactgctctagcgaatggatctccaagaatagaaaacttgagcttgatatggtgccctaacgtttcaagtgtgggtttgtgttcccttgctcagaaatgcacttcacttaaatctcttgatttacaggtaatttaacagccgttgtcgcttatttagatctgttaatattcatttcccatatcctcttgataaaaacaataggatctcatatgcttaggatgtggtctttagggttgctatgttggagatcaaggcttagcagctgttggaaagttttgtaagcaacttgaagaactaaatttgcgcttttgcgaaggcttaactgatgttggagttattgatcttgttgttggttgttccaagtctttaaagtctatcggtgttgctgcgtcagcaaaaataacagatttatctctggaagcagttggttctcactgtaaattactagaagttttgtatttggattctgaatacatccatgataaaggattgatagcggtggctcagggatgccaccgtttgaaaaatctgaagcttcaatgtgttagtgtgacggatgtggcttttgctgcagtgggagagttgtgtacttcgttggagcgattggcattgtatagctttcagcattttactgacaagttagtgatcctgttccgtttaagtgtctttggatttttgatgagcacaatccaatccttctagtacctaaattttcaactattagagaagtcaggggatgaggaaaatacaggctttggtctcatcttgtgtgcttctattagatattgtcttctgaaattattgcccagtgttggttagaccattcgaaggacatggaaggacacttgccttatagagagacctttgtttatctttgggatggccttgtgtaggatgatcgttttacttgatttttattttgtatttcaggggcatgcgagccatcggtaaagggtctaagaagttgaaagatcttactttaagtgattgttactttgtgagttgcaaaggtttagaagctattgctcatggttgtaaggaacttgagcgtgtggaaattaacggatgccacaacattggtacacgtggaatagaggcaattggaaaatcttgcccgtacattttcttccttactttctttatttcttgttgacagcatcagagatcactatgggatggatcattgattgaaccgttattttcgggtgtatgcaggcgcctcaaagagttagctttgttgtattgccaaaggattggtaattcggctcttcaagaaattggaaaaggctgtaaatccctagaaatacttcacttagtagactgctctggcattggagacatcgctatgtgcagtattgctaaaggctgtcgcaacctcaagaaacttcatatccgcagatgctatgaggtataatctctcatctcttaaaataaagtattttcttaatctattgacatagcaactggtatatgcgttttttcttatatacagataggaaacaaaggaattatatctattggaaagcattgcaaatcactaaccgagcttagtctccggttttgcgataagtaaatcctgcaactcgttgaatcttgtttcttaaacagtactggaacaaaagctaatcatttcttttatcttattcagagttggaaataaagcattaatcgccattggaaaaggttgctccttacaacaactaaacgtaagtggttgtaatcaaatcagcgatgctggaataacagcaatcgccagaggctgtcctcaactcactcacctcgacattagtgttcttcaggtaaatagaactaacattttctaaaagcgtgtgtgtttgtttgttatcgagatctcaaagctgggacgtttgatcacaaatttcagaacattggagacatgccgttggctgagcttggagaaggatgtccaatgctgaaagacttggtcttgtctcattgccaccatataacagacaatggtctgaaccatcttgtacagaagtgcaaacttctggagacttgtcacatggtttactgcccagggatcacttccgctggagtggctacagtcgtctcgagctgtccacacatcaaaaaggtgttgatagagaaatggaaagtgactgagaggacgacaaggagagctggatcggttatctcttatctatgcatggatctctagatcgtaatttcaaggtcagtttctaagatttatgtttatgttttcttaataaaagtaataacttatagtccaaacttatggtgagtcatggttgtttattgtatgtttatgtgaactggttgtacatggatgaaaactttgtcgggatacaaacatgtgccgaagccgaacattgaattaatcaattacaccacggttaccaactacaaaacaagcaatctttagaatacaccaagacaaagatggaacagtaataatgcattatcaaaatagaatatagacagtcaaagacttttgcctagtatccattatctttagtcttcgttactcccgcacctaacttctccacaaactccctaaaattcttatccgacgaacctcctggagccaccgctgcttccgcctccgccttccatttcaaagcgttctttctcaactcctctgccttctccccaactgtcgcttccaaaagcttctccgccacttcctcccttggcactaccctctcctcggtcgctccacggcctagtcnnnnnnnnnnnnnnnnnnnatcgatcaaatacactgcatcagtcacttgatctccccattgcggacaacaaaccaccggaacacctgaagacaaagattccattgtcgagttccatccacaatgagtcacgaagcatgccactgaaggatgagacaagacttgctcttgtgggcaccaatccacaatcatccctttacctttagcactactctctttaagttcttgaggcaagacatgtgtctcgaccttcagatcgtgtggtggaggtctaatcacccacaagaacgataaacccgacttcaaaactccgtgagcgatctcttcgatctgttcttgcttcaaatatgcaactgtcccgaacgaaatgtagacaactgacgatttaggcctcgagtctaaccactcgaggcatttatctgttgatttgcaaatgtcaccgcttacgtcagaagtaactgtcgtagcaactttgaaaagcggtccaacggttttaacggacaaagacttgacatg

SEQ ID NO: 15950 - DNA, 916 bp, Arabidopsis thaliana landsberg
ctcgcttattcccaaggatcacgcgagtgtccctttttgccgggctcacgcgcttcaacgcgttttatctacttgctgcggacccgacgcacctccaaaaactctatatatggctagccactcctttaagaagttctcatttgaagttttcgaagaaaagaaacaaggtttgtttccttctctctgatcttgatattcatattgtttttctcttttttcgctgaagctccgccgtttctttgttatttttgatttttctggtttagaaatttcttgttttttggtcgtttctcatctcgttgagcatctccgaaccgagaatgagttctagtaagttttttttatcctgagcacctctctcgcctattccaccgactcgaatcatttacaaacggagagcggtttggacgtcctctaaggatgatgttgtgtcttcttcgagtgccccgagcagatgacctcttcacagctcgggcagataccaatgccgatattgctcgggaactggatttgcccgatgaccccgaggcgcctctcgtccggagccctcttgcctcgatggcggacgaagccgggacgtccaactagcgagacatgcccgagcccttaatgctgacgataaagaatgaggactttctttatttcggcccgaacgagacggaacatattctgcgtctcaacgagaagagggcttttgagaaagccaagaagaagaagaagaagaagagtaagagggcgatagtgccggatccccctggctcaactttatgcaccgagcggtccctttcggatctgagggccgattcaatcttggtgaggttagtttgcgtgtgccaagcccgatgagcgagctgataatcccccgcgggcttctatactctgtatgaggtatttttctacggttgtttcttgtggc

SEQ ID NO: 15951 - DNA, 795 bp, Arabidopsis thaliana landsberg
gttaaaaatcagtttgagattgggatgccttgtggtttttgtacggagtatggcattgaaccttatcttaagacggagtcatgggggaataacaacagcgactgttgtaattgggagggagtcacgtgcaatgccaagtccggggaagtgatcgagctagacctaagctgcagctacctccatggccggtttcattccaacagcagtattcgaaaccttcatttcctaaccactctagacctttcatttaatgattttaaaggtcaaatcatgtcttcaattgaaaacctttctcatctcacctatctcgacctttcttttaatcatttttcgggtcaggttccatctttcattggaaacctttctcaacttacccttctcgacctctctagtaacaatttctttggtgaaatcccagtttcttttggcaatctaaaccagctgacccgcttatatgttagttacaataagctcagcggaaactttcccaatgtcctactgaacttgacagggttgtcaagtttaacactcttccacaataagttcacaggcacgcttcctccttatatcacttcactatccaacttgatgaaattttatgcaagtgacaacgccttcactggaacttttccttcttttctcttcaccattccttctttgactgacatttatttgaatggtaaccaactcaaaggcactcttgatgagtttgggaatatatcttcaccatctaacctaaaagagttagatattagcggcaacaacttcgtaggaccagtcccgagttccatttcc

SEQ ID NO: 15952 - DNA, 1105 bp, Arabidopsis thaliana landsberg
ctggctgttgatgactgctcagggcacgaatgagagctctttctccttgttgccggtatatcttcacttcttacaacttgcaaatcctggcacaatttatcatttggaaacagagattgatgatattggtgatgagcggtttaaatatgttttcctagcattgggggctagtgtaaaagggttaaaatatttgtggagagtcgttgtagtagatggtacccacttgtttggtaagtttcttggctgtcttcttaccgctagttgtcaggatgcaaactttcaaattttcccaatagcttttgctgtagtggacagcgagacagacgaatcatggacatggttcatgaataagcttacagaaataatcaaagatggaccagacttgacgtttgtctcagttcggaatcaatcaatattcaaagccgtgagtattatgttcaatcaagcacaccatggagcttgtttggtccacataagaaggaatgttaaaggaagatatagaaagaagagtggccttccagctttaatgtggcaagcaggtaactcatttcgtatcaaagattttgatgatatatgtgaaaggataaagaaaaggagtatgggctgttggaaatacatagaagagatgggacttgcgaattggagtagggtttattttacaggggagagatataatttgatgtctagtaacattgttgattctttgaacaatgctctactaccagctaagggaagtccagttgtggcattgctggaatttataaggaaaatgcttgctaggtggtttgaatcccggaggctaaaaatatctatattagttggggaaagtccgattgcggttgaaagggaacttatgaagcggttcaaaggtggtttgggaatgtctgttttggctgtttggagctagtatttcgaagtagttgcaaaggatggagtacagttccacgtctctttggaacaaaagacttgcacttgcttggagtttcagaaaatccgaatcccatgtacgcatacaatggctgcagctcataattgaggtttggaattcaaatctttagttggagagatgcataggctaggaatatgggccccaacggtccaagaa

SEQ ID NO: 15953 - DNA, 849 bp, Arabidopsis thaliana landsberg
tggttgtgacttcagttgtcgactctttagtattgggttgctttcagccttcttaagatattttattctgtttagattcgatgtatatttgcgaaatatttgggaagaaaatagaaacaaaatttgaattattggaatatgtgaattttgaaaactggttagttatttagggtgataatactgaatatgtctctgataatgaaatatgtcattctgctaagaccagtattagcatgcgactgtaatttagctagctctattgagcaatctgtggcggacggcatcgccaacagatgtattctgtattctgttagtctgttagtggtattgaggtcggttaatgccgtggattgtacttgcttatcaccttgatagaggccagcattcctatagagtatattatgtaaatattctgttagtatatggtttgggtcaaccaatgctggggttgtaccattccgacatgcattgctggaaatctggtcgttctgttctgatgttaatattctgttctgctgatattattctgttatgctgatttgataatataatttggatagcataagctctgatgtgtttactttatttcaaattaattaaattgaaatttatgtctattagtacatacacgtgaatattattctgtacgggatcagaccgtgttggtacttgttcgtcgggtttgtagtctcactgggcaattttttgctcatataagttgtgattccgtgcagaggacattgaggaggtggagcgtgcaactgaggtttaaagtttttagttaaatcgtaagcgagacttgatagaattttctggattaaataatcttgtttcgacattggagtttta

SEQ ID NO: 15954 - DNA, 2238 bp, Arabidopsis thaliana landsberg
gattaactattaattaattgtttaaatacgactaaaaaatgggttaaaattaaggatttgatctctttaaaccgtatatcggaaattgttgtcttgttaactgatgttagaatctagtggaatattataaagctataaagcatggacatacgactaattgccgcctcatgaaaatgggccaaagtatgattttaggttttttaacagatgatcaaaatgaggaaaaaatcatgccaatcatgccaacaatacaaaacaaacatttgttccagaagcttaaaacttctctaaagagcatttaccaatcgatcggtggccttgcttagccaatcctgccaccaattcacaaatgaatggaaaagatgagaagaataaaatacaatgaacgtgaataggtaaaaatagttaagaggatgaattaccaaattcaaacagtaatgtgccaacttgtttgttccatcgcagatcttgacggactgttagattttcttctgtatctgttgttccaatctacaaagaaacaatggccaatgttgtcaaattgaagtgatcaaatagattttaggatgaatcagcttgtccaagagctatagaagacaatgacgtattacgacttgcaactggagaccacaaacgaacataagaagaaacagagaaaagtttgttcaatactagtaatctactcagaagaacaagaaaaacaataatcataagaaaaatttgaatacaaaatcaagcatttattaaagctaaagaaggtgatccacaaaccttacacagaagggtctgcgaattcttgctgagagttaagaggtgttccagattaccaccgtctcggatcaatgtgtattgcaagtaagaatttgatggtatcatgcaactcctgaccaatgaaagataatacgtaaagttataaagcgcccacaggaaaccagacaaggggaggggataaagtcataacatgttctcccaaattaccttagcgtcttctcatattgagtctttaattcttcgtattgcaaagtttccattccacttgaaatagctacacttagccaaccctaccaattcacaaagatgaccataaacaatgagtacaatgcaataaatgtgcacgtagaaacaagtatactaggtgacagttagaaacttttacctttagagagatatctttacagacatccattagatgcagttgaagcagttcttggctgaggttattgaaatttggttgactcagatcaagtagttcaaatcccacagcatcatcatcttcaacttgtcctctgccagcatcaacaccaaagccttcaccttcgacttcatccacaaggccttcatgactaggttgtcctcggcctcagccacgacctggagcagctcgtcctcggcctcggccacggccagcaccctctcggcgtcggcgtcggccagcccgagctcctcctcggccagccccaaatacagcctcagtttcaacaacgcctgcaggcctttcataagataggatatagagtgctctttctggagtgttgaccaatgtgtaacgatgcaacttataatgtacagccattggatgttgtgaccttggtctgtggatagtgcggttcaaaattccaagaataatattcccatctctccaaacaacaggatccaggaggaatctgccaatgaacaaccataatcttgaggtttccctcacagtcatgttaatggtgcgaaacatacatgcacaacaatttcacgaaattaatagtgtcactaacttagcgagaaatgttacaaaactacataaaattttaacaatattattgcacctggttgctcccaaggaaatgttgataacaactgaacgactagagtaagatctgagattccaggattcacaggcggttgttgccgtaacgctatgttgagcttaggcaacacgaaatgctcaaaactattgagggtgtagttacatccaagagagtgtgccacattataatgactctctgcaagagtttttgttggttttttaatatttttttggtttaatggtagagttttcaagtgagtttcttaaaaaaaaactattattaaaataaaaattgttaatcttttatttcaaaaaaaataataattaatacaaatactaaaattttaaacatacaagacaaaaatcggaataactattagtagttagcttcatttccgccaaatttgtgccatatatactaaaaaggatcgacaaactgg

SEQ ID NO: 15955 - DNA, 911 bp, Arabidopsis thaliana landsberg
  unsure (1)..(911): unsure at all n locations
caagttcagctggcaatggatgaaggaactcccctcggtggtctggagtctaaggacgacgccgagccgagccacgggcttcacaccgttttttctagtctatggggccgaggccatcttgcccacagacttagaatacggttccccgaggacgagggcacgcgacgaccaaagcaaccagaccaatcgagaagactcactggaccagctcgaagaggctcgggaaatggccttactacactcggcgcggtatcagcagtccgtgcgaagtaccacgtccgaggggttcggtcccgagacctccaggagggcgacttggtgcttcggctacgacaagacgcccgaggcggcnacaagcttactcctccctgggaagggccgttcgtcatcgccaagattttgaagcccggaacatacaagctagccaacgatcaaggcgaggtctacaacaacgcttggaacatccgacagctacatcgcttctacccttaagatgttttcaagttgttcatatacctcgttttctatacatacacaaataaagtctaaccgtcaaggaagggtcagccttgcctcggcaaagcctgaccctccctcgggggctagaagggggaaccccctctgcgtcaaaattttcctcggaaaaagtctttctgctggaacatctttcgcgcttttcgactgcttcgatagcggggtcctgaaaacgatggagtacacgtaagcggcaaggcgaccgagccgagggactcctacgcctccaggatatggatcctcactcatcaccttctgcgataagtaactcacgctcggataagcgattttgctgccgaacaagtcttaacgctcgaaaacttttctgccagaacgatttcagtgccttctcgactatatcgataacagaatcctat

SEQ ID NO: 15956 - DNA, 635 bp, Arabidopsis thaliana landsberg
ctcgtaccccatgttagagcaatgctgacgagagctttcacagctctctgctgtaataggtgtatgccggatcccagcacatggattagaggaccaatcgcaagttgcgttaatggatctttctgcagatgctcctcgtagagaagatgagatagaagctcagctgccaactgctggactgctggggatggagattccagtagcggaattagaggctcaattacttggtgcggtgtaagtgtataatcagcgcggcattgtggatgttctaagatatttaccagaacttgcagagcactgtgctgtccatcagctccaaactccaacctcgtcagcaaatggaaaagtggctccaccactttcgcagcagattgtcccttggcaatagtagcattatttgtgaggattcgaagcagttctgaaaacgcagcacatagaaaatctggagcttcgtggagaatatcaagtacgcagtcgataactccagctttcaccatttccagtttacaagcaggcctgtccttacccaactttactagagccctggatatagcctcatgaagcacatagtttttaccatagagaaggccaacaagaggtaccacagcgccatgagctgcaactagttcagctca

SEQ ID NO: 15957 - DNA, 520 bp, Arabidopsis thaliana landsberg
ccgcattaaagaatatcttttgagtataaaatgtgggatgagaaaagggcggtgtttttactaaatgatgttttcaaaaagtgtatgatgaagggtattcacccttatcaccttttgagtgggataatcagggactccctggtttaggggagggctcaagtgtaggctcaaccgggtaaggtgtgagcagaaggattgtaccctcatataaggacccatttaaaatccttcactacctgcactcatgacaagtacaaccactcaagactgtatgggcagtcactcaatctaaactcgtacggtccaaccccagggacaagaaggcaggggagcgccgggaggataaggaggggaaaagttttatccggatagggcatggcggtggcctgactccttccggataaccgataaggttaggacacacgagcaaggaaagagatccggcatacgggacacgcgacggtgagatcgcagaaaccgggctagcgggtaaagtgtacccctcagcgcagagttgaaa

SEQ ID NO: 15958 - DNA, 1708 bp, Arabidopsis thaliana landsberg
  unsure (1)..(1708): unsure at all n locations
aaactattgaattaaaaatttattaacaaatttaatattagaaaactggtaaattaaaaataaatatattaacaaatcgaatttttgtgaatttcacgaataaaaagaaaattcttgtgtaagtctaaaccagtccttaatgttcttcatttatatctctaactgcctgtgacttcgtccccgagagacactctctgattgataaaattcaagcagatgaaccttttaagtcctgaaattttcctcactagtcgacttaatcaagtgctatacactcggtcaagctcatgatgttagtgtaggagctgagtttagggggaaaaaagaatttcgaaaatctattgatcttcaattttttaacgagttcaaggtttttaggtttaggatatttcctctagtaatctagggtttatctggtttcccgagataaattaattaggggttttgggtttcttcattgcaatggcgagaagacatggatggcaacttccagctcacacatttcaggtttttttccttacaatacttcactgagagtattgattgggttctgtctttgactttggttttaacgatttgggaaattcctgtcgtaatctgctattgtgacaagtttgttcctttttctaatccttttgaaaatgacatcaaatgttttgttcgtatctggtagtttactttgttgtgatatagtattcacatagttttcaaaatcttttctttttcctctgctttatgtgtttggggataaaacacacatttaagtttatgtatatggttatctaacatggtctgttgctcatgttgctgtgcaggttgttgccataactgtatttttcttgctaactgtcgcttactatgccttctttgctccatttcttggaaacaaactctatgaatatattgccattggtgtttactctttcctggtaagacctaaaacgaaacattgttacactaagctctcagttgcattaaacttgttctttatctcacatctctcatcactatggcaatttattcatagagtttgcataatgattttacaggcgttttcggttttagttctttacatccgatgcactggtatagatcctgcagatcctggaatctttgtgaaggctgataacactccagctcataagtcacagaacagtaactatgttcctggtacgttctctacccgatgatgttgtgtataaggcttacataaatcggatacttctttcttatagtgatgtctctgttgcagagaatgcttcagcaattgatggtgggccatatattagacacggctcaggttgctgtagtgctataggaagattcatttgtggttgtttagtaatacaagattgccgtagagatacccaacaagagcaatcaaacgaacaagaagaagctttgttctgctcattgtgcaatgctgaggtatagtacatttttaccttctggttagaagcttctcattgcatcttgtactgtaacagcacattcttttcttgaaggtacgtatgtttagcaagcactgtcgaagttgtggcaagtgtgtagatgggtttgatcaccnnnnnnnnnnnnnnnnnnnnnnnnnnnnnttgtttttgttgggtttctgccttagcaatttaaactgatatgttaagtttctttaggccttagtggctgaataactgtgtggggcagaaaaactacatcaggtttgtgtgtc

SEQ ID NO: 15959 - DNA, 558 bp, Arabidopsis thaliana landsberg
  unsure (1)..(558): unsure at all n locations
acgctcttcttcctcatattgcttaactcatcttcttctctttgtagctatacaaatatgacttggagtttttgtccatcagagctaatgtcacaaaatcttagactcttgactttttttttttgcggcagaccgtgtaaagtcnnnnnnnnnnnnnnnnnnnnnnnnnnnnnnnncgtcgtgtaggactcactctgattccgttggggttttaatttacagagacatgatcatatttttttactccgattttgttggggttttaatttacagagacatgattatatttttttactccggttttgttggggtttttgtttggtgtttttattgggtaccttattaaacaactacagatgttacttcttctacaatttggatttggatagatgaaatgtggcgactaaatgccaatccataaaagttggagtgagatatcacatctatattgggaaccaatataacgattttgattttgagatatctagaaagatactatattattttgcgaatatactatttactcataccctgtactatttaagtattaaaataaaa

SEQ ID NO: 15960 - DNA, 2613 bp, Arabidopsis thaliana landsberg
acccaggaagctctcagaattctctccctcagtttgtcttcccgttggctattatggattctgaatgtgtggttaatgcgtatcctgacagtggcaaccagcctgcttcacaagaggtaaagaatgaagagcatgatcatagtattgtggaaagtgctaccttgacaggccgcaagcgtaagttcattgaatcagatgaaggcacaagtcagattgggcatcaggtggaagagaacgttgcttctctgtgtgaccctgatgctgcaaatcatgtgagaggcgcggtgggcccagaaccacctcttccttcatgaggacaacctgttggaactgtcgagggttaggcattgacctcacagttcgacgccttaaggagatatcccgacgatatctcccggacatcatatgcttatcagagaccaagaagcaggacgattatattcgggacatagcctgtgatttaggttttcctttttatgtaacagtcccaccaataggacttagtggtggtttagttatcttttggaagcattctgttgaagtttctgtgttatttcaatcccctaatcttgtagattgccttatgaaaagtagtgaatctagtttctatttctcttttgtgtatggacctccaaacccaagttttagaaatgatctttgggagagaatagagaggattggaataaccaggaagaatcttccatggataatgatgggggattttaacgaactcttaggtaataacgagaagcggggaggtaggataagaccggaagctagtttccaagattttagaaggatggttaggacctgtgattttacggatctaaaaataataggagataggttctcttgggcgggtcgaaggggagatcattttgttacttgttgtctagatcgtaccatggctaatacggagtggcataatatttaccccagttctgaaacagagtttcttgagttaggggaatcagaccaccgtcctctcgttacctacgtttcagattcagtggaggatcgcagaggaagttttcgatatgataaccggttgtttcacaaagatgggtttaaggattctgttctacaaggatggcatggtggaatcagatcgagcacagaggaaatgaggttttcagagagaatttcacgatgcagaaagaagatatctcgatggaaacggaatcacaaaaccaatgcagaggaccgaatcaggattctccggtatcaattagacagagctgcttcttctggatcttcaactactgcagaacgataccgactgaagcgtgaattaaatcaagcttacattgatgaagaactcttctggaaacttaaaagcaggaacacttgggctcatgagggggacagaaacactaaattttttcatgctgtgacaaaagcaagaaaggcacgaaacaagattctctctattgaagacaaagatggggttataaccagaggtgaagcagacatagcgatggttgctgttgactatttccaagacctttatcgaacttcatccccaccggatacactacaagaggaagtttttcaggattttccaaagcgagtgactcatgaggtgaatacggatttaacacgacgagtaagcatcgaggaaattaaagaagctgtgttcagtataggtccgcacagagctccaggccctgacggtttttcagctgctttttatcaacaattctggagtgagataaatccagccgtcgttaaggaagtagaccttttcttcaatgagggacaactggaccagctacacaaccacacaaacctttgtcttattccaaaaattgaggctccaacaaatatgacggaattcagaccgatcgcactttgcaacgtcaactataagattatttcaaagatcttggttaaccgtctcaagaatcacctctcaagtattatttcggacaatcaagcagcctttattccgggaagaatgatcactgacaacaacatcatagctcacgaaattttccatgcgctcaaggttcgaaagagacagtctaagtcttatatggctttgaaaacagacattaccaaggcttatgatcgtttggagtggcacttcttagaaaagacaatgatacatatgggctttgacattaaatggattcgatggattatgaagtgtgtatctacggtcagctattcggttctcatcaatggttcgccccgaggaacgattgtaccagagagaggcatacgacaaggtgatccgatgtcaccttatttatttattttgtgtgctgaggtgctctctcacatgttaaaacaagcggaggcaacaagacagattcaaggtcttaaaatcagtgaccaaggcccagcaatcacccatctactttttgccgatgactcactcttcttcacgttagcaaacgacaaatcttgcaaagccattcaaaagatactcacccagtatgaacaaatttcaggacaagcgattaacttacggaaatcatcgattacttttggaagtcgagtcaaagcgcaagtgaaaacacgtatgcgacgtattctccggatacacaatgaaggaggcgggggaaaaaatctgggattgccggaggagatcaaaaggaaaaagacaga

SEQ ID NO: 15961 - DNA, 1596 bp, Arabidopsis thaliana landsberg
  unsure (1)..(1596): unsure at all n locations
ctcgggggaatttcgatccttctcagcaaacacttttgaaggttcgagagagtccatagagccataactctgaaagaacgaacaaatgcaacaagtaaggctaagtgtgataattgtcataatcctaaccatgcaagcatcaagcaaggtttaagcaaacattataatgtagaaaacagataagcaaatgatcgttgttacacaaagtctctgctttcaacttcacacgatgataaatgtaagcacagtgaagaataacacagagccgagcttgggaacaagaaccagaactagtacatatcttctaaacctaaagaaaccttaagaaccgattctaataagccaaataacgtataatcgtgattaactagtgaagccaacaaacgaagctagattgatcgcaaatcacaaagaccgggagatataggagaacttagaaatattactcttgcggaagaagctgaaaccggtttaggatcagacgcatcccaaaccctagcagccgtggaattaacagatccggcgagatctaaagcgtggtgagacaatccggcggaggcattagggcgcataggttggaaatcatagctagggaagatagcttccttctttgattccaatccattatcgccgacacggtagttctgatgatcgccgtcttgtgaattgttgctgttgtcgttcatgagatccattatctgcttatccgagaacagggccgattttattagatcgaaagattgcattatataatttttttagtctcccttgatttcgattttatatgattttctaacttcctgatgaaataatgtcatcatttttcatcggtcttgttgctttttctaagtcagcatttcaactaattgctgaagccagttgggcctactaacttaaattggcccataactatttactttctgcaacgatgaaatctcaaacacaactcgatggagggacaaaagaagaaccagcaggattttactgcagttacgactttgagaacaacttaaaacatgactaactcaaaagtctttacactgtgattggtgggatacgccaatcccttgcaatagtgtgagcacaaatagcaagctattttgatggctcactccctcaataaattgagttaatatcgtgtgaaccgatggtccacatatcagatattaaactgataagaacagatactacacttgatcttagccaaaaggccgagaaaggtatgcttaggtaagtaaatcgtgatcctttttatagcaaaactttgcctttggtttgcaaatacacttccgatgtgggacttgtttaagctgaacacttgatggaaagttactcgtaagtcatttattgaggaatacgtttaaagattaaagattgaatgttgaggaaaattaatttattgagaaaattttcaagttattgattgatagagnnnnnnnnnnnnnnnnnnnnnnnnnnnnnnnnnnnnnnatgccgcttggtacgacaagcacacggtattctttagtaaaaggcgaaagaatagttcgctatgtgcttattgcacggctcaatgaaaaatcttcgagagctctctccgttttatatatgccttga

SEQ ID NO: 15962 - DNA, 3866 bp, Arabidopsis thaliana landsberg
cgactcgggaccttgataatgcattgtgcttccagacagtgccgggttcatcctaagaggaccagcctgttgatctccctgcatatttaccaataacaataggataagtgaccatatcaagatatatcatcatctttcttgtaaaacgattttacaacaaacaaacgtacatgcacgttgcgatatcctccattttcaaacccattcaagtaggaatcaggcatggcacactccccctgctgtgaagggggagctggtggcggtggtggcgaggaagatggcagtggtggagatgacaaggacatatgctgatgtgaagtgccaaagacgggccgatgctgctgtccaagctgacaattggaaacctttgtattatcagcttgatcagtgtgtgtgcagttttcagttccccaaggcggagccacatcttccatttcaagctcaccatcaacatcttccaatataagcgtatgcctttcagccgtggatgacgagacattttcttcaaggattctggactcatgttcaggggtgacagactcgaaatcccctccatccgagtcactgcctccctccgagtcacaccctccctccgagtcactccctccctcctcatccttaagcaatgcgggcatgcaaaatccagggagctggagagttgagttactgataagtaaagatgaattagttttaacgaatctagagacaggggtacatatatagattacacaaaaaacgaaaaatctaaccttccatattcatccaccagcatatcctccatatctctcacaggatcatccaacgacctttctgttcgagctgagcgccgagaatagaggcaagcaggaactatactatgtgaatcaagttctcttatatggtgacgaacaatagattcaggcaggatccgtctttcaagccaaagcttcaaaacctataaatagcagaaagggtgagagttagtattcataagaaaaagaatatctaactaaaatcgcataccttcaagcactgttttcggttttcttgtgtggtagctccagctgggacagcagcagttaataggcgaggtagcatagcctgaatggatgaaagataaacaccaccagcatcacctgaatagaaaggtagtattcacaaagttaactcgccattgagaacatcaatgatgcaactaagcaaaaacagcatactcaccattcaaacctttggagcactgagcaatagaatccacaaggaaaaataaatccaccctcctttgtaaatttgactcactttccaaagtgtgggccagaatttccatcgcctaattttagacatagagattcttagagcatcattaacaacattagacaaaagtctgcaaaatagtgttttataaattacacaaaagcaccgtgcaaaaagtccctttccacattaaaacggtaagataagataataaggattgccctagtcctttgcttgaaaagagtggctggatgcctacagcatcctaaaatcagtagacaaaacaatatatataaggtgtttctctaattcgtagtaatacataaagttggtattgacaatttgacatgttctcgcaattaactatttgataaatgcaaataggtatatagcatgggacagatccaggtacaatgttttaacaatctataagaagaaatttgtctccgattggattccacctctaattaacatgtggcatccacaaacagataagacaagatcacaagcagagagaacgtttcatacctttgccgaaacgccaaatttcgccaagtccatagccaagcgagttgctcggccaatggtctcctttgtcctcaccaatgagtcaagtgcagtctcaaaagactcaacagtgcattgcacatcagaactaacaaccttcttcacctgagttgtgcctgtttcaactttgctttcttctttgacagtgtcaacatttaatgatttgttctcaccatactgaacattggtgctgtaataactgttgttctgcatagcattttcactttctgcggtagaaattcggcatactgagttgcaatttggagtaccccttgcaggagatgaattcaatttttcacgtgaaaagttctcagatactgagatagaattggtggcttgcatctgctccttctgctcatcaacctcacaactgccaatgcacacagacataccatactgttagtcaaccagttccgtgaattggaaaaacttgaccaagataaagtctgaagaaacttaatctaattgatgttttgcttaaactcaatatgcatatcctctacatagactttcaaagcaagagaaaatttaaataggaactgggaatcttcaactgtaaaaggaaaatgcaaattataaagaaagaaagaaataacaaagaaatggaattttatgtcaaaaagtgaatagatagattcctagtcatgttctacatcaatctgcctatgaggactccatgcataaaatattccaatgtggttagaaattgaacacatgattgtaattagaaaagtttttctaataaggaaaatcaaaaaaggaaacaacatagaatcagaggttagtataggagtagagacaaaatcagtaaactcacctcttttccagctctctgttctccacagcatccgcacagtgactatatacagtttcatactgaggttccgcatcatctacgatcatttcattttcagtagcagagagtactggattctgtatcatgtgagcttgtttgtcactatcaagttctttaccgggacttccttggttttcattccaaagagtattttcagtctcctgcaggttttcaacctcctgataattgaccactgaacagaacaatggaggcggcggttctaaggcttgggactgaacaacctgagtcatacagtaatcaattttctcacattttccattaagagaatctccaacaatgaccaatgaatggtcactagaatcatactcctggattttgtgttggtgaggagattgagcaggtacctctgttgttgtcatatccaaactcgagcataaaccgggggacttatttgcagatgaatcaacgatatcaggattcaaaggggtttcatgtttctcactttgatgtgagcattgtatatcaataggatcagtctcactaattagacagttcccagtttgcgattcctcagaacatccctgaactacttcaggaacacgagcttctgtttctaccaaactgctaagttggttagattgtgctcgagttacttcatcatctagtgtcatggtaaactcgttctcatggaaattcacagccgtttgtctatctcctacagtctgaacacaggccacagaaggagacattctgtctgaaggtttctccatatgagaaggcactacatcaaccataacacctgaaagcttagcagacaactcaaagctgttaaattcttcggctgcagaagtatcatgaccagaaccaataccattttcatgattcacagaagggcttgtctgcaaagctgcacttagtagggtgtctttcgacgatctctcttccacctgtgaagaggcattgaccttttcatcagcataaaaagctctactcattcgaactatggctcgctttaccagaggcaaatgttcatcaccattctcttcacagggcctctcattcagcctttcatgagaattttgagatctctggcagctatcacatgcattgggcccaagaccttctgcttcaactttagcaggagggtcaataatgtcactggtttcacgttttccggtgggtttcctcttcttcctcttaaccatggtgaaaatatgaaaatcaagccctttgttagctcataccccgtcac

SEQ ID NO: 15963 - DNA, 659 bp, Arabidopsis thaliana landsberg
catcggtgattgtgagttccggtttttgttttgcatgtttgattttccttcttgcatgttctcgattctcccttctcttagatttgtggttgttgtggttgagtttgttgaggttgttaaccgaatagttaggattgttgaaaccgaagcaccttcccctataggagtggttgtgatataatagcaccattcgcttgagagggatggttgcgttgtcaagacactactcgctagtattcgggagacttttagagagaagtttatgaacatgtgtgttgaaaacgaaccgcatgtttcatagtgttgattggaagatcgtagtgtgtggagcttggagagtatccaagttaacgacataagcatgctacggttaagtggaatgtatctgaccttgccttgtgactccgttctttcgtggggtgtgcttgacgagatgcaagtgacctcaaggggttcgaaggacccggagagactgggttagctacccaagggccggtgtcgcttacacgacggtgtagccatggtgatgttccggatatattcctttgtggatataactcgggtgttcacgatgtgctgaggaaggcagagcattcgggtcctaaataaaactttaagaaacgttatcttcttgttgtcttgggtgttgcttgctacct

SEQ ID NO: 15964 - DNA, 7845 bp, Arabidopsis thaliana landsberg
  unsure (1)..(7845): unsure at all n locations
tccccattgcgggtgcacattgtatcagagcaacttttccttcccaatctacctaaaccgaacacacataactttcaatcacattggaaaactgaatccaacactcaaacgtacaatccaaggcatgaaactgagtattagacacacaagccaatcaaactttaataagtctcactaggctaaagattgagtctttaacaaaaagatataatttagaagcttaccgtcttgataggttcttcaggacgtcccgtggcacaatcaattacagtgtgaatcccgaccaaagtcgccggaattgtctccggtttactaagatccgcctaagaccacacaaaactccggttttagttctcttttggacaaatttaaatactttgagtaactttaaaggaagatgtgaatacgtacattgactacggtggcgccccaatcacggaggaaatcggcgggagctggtcttggtcggaccaaacacctaacatcatacccttcatctaaagctctccggacgatttgtcttcccaaagttccagtggctccaaccaccaagatgctcgtgggtcggactggtgtccccggagcaagattaaccgctgcagcactgcatgtaaccggaactactattgatcgttcccggttaagggatgaggatgaggaagatgggaagagcgggattgtattttccggtgtgagagaacgtcgccaagacagacgcccggaggaggaggatgaagagttgtggtggatgagattgccacgtgtaactagttgagcggggagcctgagcgaagccatcagtgtcgaagagaagagagagagacaagtgagggagagagagatagagagacgacagttgatgtgcgtttggccacgtcagctggtgttttgacattggattggcttgcatttgctgccacggaataaatattattaagaaaaaggaaactttatatcggtttctataataatacttacgggccgggcttgggctcaaattttctaattctgatcgggtatagttttagctggattttcaaaatatttgcaatgtttgttgagaagatatattatactaataaactattttcagttatgggctgcaatacaaaagtttcaagcctcatccaaaactctaccaagaggcaagaggtgtcaaagtttaaaagtcattttcgaacttgccgggtaccaaatgtgacatcccaaatccgatgaaacaatttcaagtgattttaaaattagtcaatgttaattcacaaattaaattaaagacttggagtaagagcaaccccaatggttgagcccttaaaagggttttttaaaattttaaattataaaaaattaaagtgtttttgttggaccattaattttttttggtctaatgtttaagtgggtcttttaaaaaaatatattattattaaaataaaaattatttatattttattttataaaacttaataaataatacaaatattaaaattttaaacaaatatgatatatatattaaaaatcatatggcctaaaaaagagagaaaaacgcgaaaagaaaaataaataaatgatgttgtcacaatgttcaaccacacacacaatgacacgttagagtttcttaactactcaaaaacctcttaaaataaagttttatatttaaaaacatccatcaaaaattaaccaatgtggatgctcttaagaaaccaccattcgaggtgatcaaagataccatcaatttttcattcatattcttgaaattacgaatccataaaagtttgcatattccacgaacaagtgtttaagaaactttgacatgacaaaaggcgccaacaaacgtagcaacatgaattatttggaacatgtttttttttcttatcgaaatattccacggctaaagaatataataaaactcgaggtacaaaaccagataaccgttgtgcttggatcataccccatattttggcaacacaaaatctgtatcaggaatttgatgatttatgcagagcgggaacacgtaatttgtcaaagtcagtctagttttgcaatgaccgcatcaacgacctcttgagtcgtgcttgttccaccaagatctttcgtccggcactttccttcagcgatgactttcttcactgctgtttcgagccggtcagcaaatgaaggaaactgaaggtgtctaagcatcatcgctgatgagagaagcaatgccactgggtttgctttgttttccaatactatcttgtctttcccaacatttcctgctgatgcaccttgctcgaataccgcatggtcagccccaacatttcctgtttttgtatttaatgtcgcagatgtataaattttagaactattctttatccactaatgtatagctcgagagaatatcaatacaggatgtttttttacctccaggcatgactcctgtgcctccagcaataccagcagcagtgtttgcaactaaattcccatagagattcggcgttacctgcaaaacatttcataaattgctgttataaaaggggggaaaagccaaaagacgctactacatacagtaatgaaaggttaatacttagcaacagtgaagttactgctctaacgaacaatagtgtatgcaaagtagtaagtatacatagacaaggtcacagaagtacaatttaaaagattccctgaaagcatgatatgcaaatgacgagattaaatagtatgcaaatggggcgattaactatagtatatggcaacacaacatcagtctcataccaataagataatatgactctaaaacaggcaatctagagggataccaaactagggagagatgactggtatctttttctcaaagtaaaacatcgaagacttaaagaacgtcatgaaaattcatatgtatataactctgaaacataccatgacatcgaattgctctggtttggctacaagttgcatacagcagttatcaacaatgatttcattgtaggtgatgctgggatactttttcgcaacctcgcgacaagattccaagaacaaaccatccgcaagtttcatgatgttagccttatgcaccgctgtaactttcttcctgttgttcaggtaggcatactcaaaagcatactttgcaatacgctccgaacagaacttcgtgatcacctaagcatagaaataggatcagaacaatcacacataacatacaaagaccacttgcaaacgaagatgattccacaaatacagattgaatccaaaacgaggagcagaaatcggaattctcaccttcagactctcaacgacaccaggaacaacctcgtgctcaagccccgcgtactcaccttcagtgttctctctgatgacaacgatgtcaacattctcatggcgagtaggtaaaccaggcaaattaaaacagttgaccagagaagcaaagaggtcaagctctttcctaagctggacgttaagagaactaacaccaccaccaacaggagtcttaagcccacctttcaaacaaaccttattcttccttatcgactccatcacttccggcggcacacggctcatttctccgtgaacatcgtacttctcgaagaagatcggagcgtgcatcgcttccatcacctgttccacggcgttcgtcaccagaggaccgattccatctccggggatcagcgtcactgcgcgtggtgctccgtcaccgggtctgggcatgtaagtcacggatcgggtttgaatacctgatccattcgcgtttctagctagattcttgaggagagttagcgatctgcgagacatttttgtcttcaattttgggttgaatctgaaaagatttgatcgaaagagaagaagaagattcgccctttggcttttgggagctggaggcggacgaaaagcgtttattgttaaaatttagttatttacacaattcgccccaaaatcttcatctcattaagatatttccataaaacaatagataatcaccgattagaccactttgtttcagaatcgtcaattaagatatttatacaaatccccccaatcatttaacttcatcaacatttactcagtaattaatttagtttgacatttgcttatttttcacttcagatatttacaaaattgccgcaaaatcattgatcatgcagagtactacattatttgcaaaatcataacttgcaccctcgaatttcatcaaggctttggtgaaagaagtcttagaaacacggagattggcaatgttaagagattcgaagcatagtcacgtgaatcaactccttcgtcatcctgatttttagtaccaaatggtacaatcaggtacacttggtctgattctcttgacataggttttttgttttccatgttgttttctcctgtctctgaagtttaggtggcaatgataggttcaggatcaatatcttcctttgtgtcactcactgaatcagaaagaaacaaaaacaaaccaaaacgagaaccttttgtctgcaggcttacttgtttctttaacaaatactgatttgaggatttaacagagatactctggttaggaacttggaagatcactccactaggtggttctctctcttgaacacatattcctgcttaaaaaccaagagaatctctataaatatcatgtgtcctcaccatccaagtatacactttcttctctactttttctgccaaaaatagcttctgtgtttatatgactatcattgcctatataagtaaaacgtctagccttttcttactttcaaactggcataatgttttttcttgtttctttctgaatactaactccttattgactgtaatgtttgtacacagtaagctttgatgccccaaaaagcacccttaagaatttcatgcatagttaagtaagaaaataaatacaagtgacgatgtagaagatatatcaatttaacatacttgcagagcttagtagaatccagaagacaaatgatgtacagacaataataatacatacatataagcatgtttctctggtacgcatcgccttattatacaaaaaatctgctaagccgatgcaggaaaccagtccactactgctgcttgcaaaatgggggcactgaaaatatgtttacaaacgatgcccattgctataaaatggtgagtaatatttttctaacacactagtaaattagtcgaatctcctgctcttttcttttcttttcttgcaggtaacaaccttatacctgatagcttataacgagggaccaagaccgatgctaccaaaagaacctcccagcttgacttgagaagcttcatgaacacttatcttgatcgtgcggctctgtgatgatctataaatgtcgatacattcctcgagatccgcttcacatgtcagaagaacccattccttgtcatcatccaggtacttaagatcaaagggtgcaatattatctatgttaaaacgcctagcaatctcatgctgcaactctctgaagccccaagtaggaagcaaagtaaaccgtactttggcttcaccaaatgtggctttcacttttgaggcccctccagctttcaacttcctgctactattctccggtaaccgaggtggattttcgaaaagaggatgctcactgaatgttttgtggctcacggttctagagagggactttgtttcatcctgattcatggtatgaagtctcacttcgctacgagctctcttcaagatcgcgctagcattttcagccatcagagtggttacagtatttgaggtagtcccagtattggtactttgattagctccagttgaacaacaggtgcttgaaccagagctgtggctacaagaagatgatggtggtgactttggagctgcagcagttccctgtgctgaaacaccgttctccgtttgagcatttggattcttgaaggaagtgccagtaccagacatatgtggggagcttaattctgggaaacttgtatagaatgaatcaagttgaatagaaccttgaacaccttgaacagagtctataacaagttggagtttctttaatgaatgccccactttcttgatcttccgggaaggccatcgtgttatcccgtgttgtctgcatattcttttcaaggtagttggacaaactgcaacatgaaaatgaaactgcgtgaatgaatcatcactttctgagagattgataagatagacatagtaactataagttttctttcttaccaccaatgctcttggctgcatctttgaggcttcctgcaaagtattgtcgaagaacttctaaaccaattgtcttttctgtttttgttcttctcttctcacctggtcttctactgcctagtaatgtctgcccaacaccaaaggaagctgattcaaaacttggatccatgtcgattctgagtcctgaatttgtcaccttttgaaactgctcagcttctgaaagaaagttattgtggcctgatccaatctgattgttatcccatccagatgtaagcataaactcttcttttggctcttctttttggtactcccaagaaagtgacacgcctttacctttctcatttgcctttatcatgtgtgagatccatgaagaatcttcctgagaaatttcttccaaaggcaatggtttcatatcctctccggttcctgcgttgataagtgggttctctgcaaaaacaacttcctctctaacgggaaatacaacttctagctcaagctctttatcaatgaaaagatttaagctcctgaaatcctgctgaagggtcgcagacagagacttgagcatatcttgttgtgcttcggtgtcaaggcaagcttttggaaagaaaaactccaacacaaactcaaccgaactattgaatttgtttttcaatgggactgctaaagcagcatgtagaccagagatcttagcatggtgtgcaagagggtagttggtcttgctaaaagtggttacttcgggcacgaaaaacagtttggttgcgttgaatgcttttcctacaatgccttccccttgaagcagatggtgttcagaacatgcctctagaaaatgacgactctgatggtcagggacaatgcaagcatcatcaacagttgaaacacactcagagaagttctcatcagaatggcgggatccaactttgccttgccgagcacacggtgcccacgttaaagccagaggcaggtcatatactctgcagaccaatgtcaaaaactctgatacctcaggtaatgcagcatagtagaattcattatagacctgcagaaactgaaacaaaaagggcatatgacatttagcaaccaaaattcattgtttctatgtattgatgaagtaagggtttgatttaggagaccatttttacacacctctctgcttgggggattcaagcttcttgaactccttagattaacagactacaaaaaaaaacaagaattttctttacgctacaatacaaacaaaacttcccattgagttagagaaatcaagggaagagaaaaaacctcgagagctttacagatattatcaagctctggcctgtaattcatcttctgagttgttgtaacaatctcaacaacacccaaacaagttccactacctctttcaaacacaggaagggctaatgatccacgaacatcacattgctctgcttctttgatccgcggatactcttcgcttctaaagaaccgcacatcaggtgtccactcaggtagtttcttaagaaaaacacgaccggggagaccaacagactctttagaatcctcatcagccaggaaattataagccgctgaaacatctctatatcttttaagactcgagtatttcgccnnnnnnnnnnnnnnnnnnntccgaagttgtaaaaaagttaaagccttcttgttgaattggtagccatatctgtatgaggaagtctttt

SEQ ID NO: 15965 - DNA, 1679 bp, Arabidopsis thaliana landsberg
ttttccaagaaatatgtagtaatgctacattgctaaaaatcaagatatttttgtttacaatatactttttcatcttattaaagtactggatacttgaacaatttctcaaaatgagattttaacctcaaataaattgtatgaaaccggtaaagataactcgatgtagacctcaaatactggatacttgaacaaattgctttttcatcaaataaatggagattttgcctacaatatactttttcatcttataccctaaccggtatggtctgtgcacgaatctttacgtacagctcttaaaagaaagtccaaaaccaacatgacagtctgatcatacataaaacattccctttatgacttaaccacttgaccatccatcctcgcttggctaagtttcttgattatttcacttagtcatgactcatgacttatccttcgtcattcaaccgattcgaactaaatcacttaccatttatttgaggtgatcgatgattcaatagaccgggatcgatatcgtggaatatatgtgtcaattgtatgaaaccggtaaagataaaccgatatttgaagccaaagatagtaaaccgaaatcaaaatggccaatgaaaccggtacaaaaccggtagaagataatccaatctttaaagcgctcccacataaacgtttcccttatctctctctctctctccactccaatggggactctcaccagcgtcgcttttgccgctgccgttaacattagattccgatcatttcaccgggaaaacattaagacaacaattacaactctgcccaaatggcaaaagagactctgtttctcttctacagaggattctcatagatttaggattgcaaagtgtttaggcaatgacgaaaacagtaacagagacgacagtatcggagaaaacggagaaacccacaagtcttcggttgttaaaacggcaacgtttgaagaagaagatgaagagacaagtaagagtagctctgctactagcagcagcaacgagttcggttccgacaagacttcaatggtacacacacacacacttatctctgacttatgttctgttttgtcctgtttggaggttaccaaaatcaaaagcaaatctttttaatggaaaattgaaaacgttgagttcaaggaagggactgtaacacattttatgaaattgctcgatttcgtaggttgtattttggttattagtatcaatctcttaaacactgtgttactaagagtacaagtttgtgtctttttcctcagccatcaactattgatccaacatatagtagcttccaaatagattcgtttaagctaatggagcttcttggaccagagaaagtagatcctgcagatgtcaagttaataaaggacaaacttttcggttattcgacattttgggtgacgaaagaagagccatttggggaccttggggaaggaattctctttcttgggaacttgagaggaaagaaagaagatgtttttgcaaaacttcagagaaaactagttgaagttgctagtgataaatataatttattcatgattgaggagcctaactcagaaggacctgatctcgcggtggtgctcgtgttagctttggtttgcttcgtaaagaagtttcggagcctggaccaactacactttggcggtatgtgattgctttaatattgtttcttttgactat

SEQ ID NO: 15966 - DNA, 3085 bp, Arabidopsis thaliana landsberg
attttaacatgcgaaggaatacacagacgaagcctatcgctattgagcacttttcatcttctttatctttctttcttcttcttcacggaattcaagcacgatggctcgaacttttatcttgtggcttcacgggttgggagattctggacctgctaatgaacccatccaaactcaattcaaatcctcggagttaagtaacgctagttggctcttcccttctgctccattcaatccggttacctgcaacagtacgttcttccttttctatttttgatttgcattcatgttattgatttcgttgttcatggtttatggtttgatttgggctatagggtttggtctcctcttcattccattttgatttagcattatttgcctctgtgatgtgaaggagatttgtcacattctgttcatttgaatgacattgagtcaaatgtacacagtttgatcatttctctgtggtatctgttggtgtcatgcctcttaatccatatgtgtttgaaaaaatcttatgtctttctactctttcttgtgcagatggtgcggtgatgcgttcttggtttgacgtccctgaacttccttttaaagtggtattactttacttcactcttgatctatctaacgtctcttatagtatgaattggcaaatactttgtggactggtagctccaagttaccacctttttgtttgttaaaccttatgaggcaatatctacaatcagcacttgttcagcagtttgtgtaaagaacagaccactcttgcattttcaagagattttatgaaatcacaataagtgtgcaacttttatgtatgttagggctctccaattgatgaaagcagcgtgcttgaagcagttaagaatgttcatgccattatagaccaggagattgcagaaggaactaatccagaaaacgtgtttatctgtggattaagccaaggaggttgtttctcttttcatgaattctttgtcttttcaatattctttgtagagagacctttttatatcggtctgaatccacttatgtcttaagaaccttgcattgtggcgcctaataagaattttcttgtaggagcattaaccttggctagtgttctgctttacccaaaaactcttggaggaggtgccgtcctaagtggatgggttccattcacttcttcaatcatcagtcagtttcccgaagaggctaagaaggttcctcacttatgttttcttataaacattgataaaagttttttatgtttctgaggcttcggattttgcaatatgcagacaccaatcttgtggtctcatggcactgatgacagaatggtactctttgaagctggtcaagctgctcttcctttactcaaagaagccggtgttacctgtgaattcaaggtataacaataagaactcaaatcaaacactcatatatttgctcatataacagagcagtcaatactgatcacatggaaagatcttagaaaccgattcttggaaatgtatatctaaagagagttcgtttatctgcaggcttatccgggtcttggacactcaatcagtaatgaggagctgcagtatctggagtcatggttaaaacaacggatgcagagctcttcttcttcttcataaaatggtttttaaaggcaactttgtactcaaggtaacaacatcctagtacctatcaagattagaagaaaaatgataacatcagctcatctctggtccaagtttctctatcatgaaaaccggttctggttgaaccaatcttgtttggttatgtaaaccgttacttttgttaactacaacattttgcgtactttgcattgatttgaaaaattatatgtcaacactagaattcttttatttagtcaacaaatcaagtgactacataactcgaattgtgttcaaaatgcaaaatctgaccaaaacaaaacctgcatatgttcactcaaatttacagtttttgtcgggtaaatagttaccaatgacaattgtttacaaatttttgtgaaatggtgtttccgtaactataaaaattcaattatttatcgtagaaaagaagacaaagaatcatatcataataagtcaccatatacaaacaacgatctgagattctgaataatgaagttttagcatatatatggtcgacatctaagtttgaaaccatataaatagttaaatattattagatccgaccaaaaaaatccaaatgagtttgcatggtctgttgatagtacagggttattttcgtcaaaacacataatttcccatttgcgcccatattatctctttggattctctccccaagcacccaccgactataagtgattttcaagaattaccctttcaccatctcaaatattacagaatcttgacactatagtgacagctagaaataaagaatctgagtccaaagaaatattcaaatttgatttgatctagcccgctaatatttgtactgtactgtatatttttatagtgctttcaattagtgcaatcattaggaatttgattatatagatcacgtgtaatgtaaattaaaatttgcaattttagacaatatagtaacaagggaaagataaataacaattatacgtgcatgaacttgttatgattattgaaatgctggcattgggccgttggtgatggtcctaccaaagagaagtctattactttgttaatatcaatcgaatctatcaattcttgtgactccaacaacaaaactctaatcatcttcttttgaaacaaaccaaatactaacaaaaatttcgatctttcaatttgaagttcaaggttgtattgtaacaagggtcaaagtttaactttctcgtgacaattatcgaggcaaagatattggatattgatactattttttgaaatatatacaaagaccatagtccaaaatagtaattcttaaaatatcacatgtgatgggttttttcttcttgcattggtcaaattgaaatcattatatttggattgcagtctgtgcatgaacagttttcagttgtgttatataatacatagtttttattcatactactgtataaaattttcagaataaatttgaagtaaattagtttcaaatcgaaaattaaaac

SEQ ID NO: 15967 - DNA, 966 bp, Arabidopsis thaliana landsberg
agcaaaatgttggggataattgattcaatgccttaatagcttcaatgcaacaagtatggaataaagggttcacttcaatatgctttgaaagtgattgcgaggttgttatccacgttgtcaatggacgatcggatgatgttttaactgaaggaatatacaaaaacattctctatttgggcatcccgattccaatatatcagctttacttttgctagatgtcattataacatttttgttcatctcttggctcaacaatggttgaaatctcgctagtttttattctgctagttctaattctacttggtgaatggctgaacaattctacaactcaattgttaataaaatttatttttgataaaattgggtaagtctaaacttgatttaaataaataatatctccgacatatcttatagaaaatttgatgattatcaaaacataaaattttaaagaaaagaaaatcatagaataatttattcacgatgttcccccaccgtctctataatttagctattaggttaacatcaaatctttctttcctctccaaaccaattcacaacaaaaaaagagagagagagagatagaacaaaaataagaagtgcttcccaaacaaattattcctacaccgtgtcagaaatagtgaacggctatccaatggaaacgtcctcagccattcctcctcctcctcctcctcgtgttggatggtggtcacgaccaatagtgactgtgccgttaggtaatgatcgtgaacccacttgcaaggaaactactgtttgccttacaccctgttgcgccggccttttcaccatcgtcgctgtatatttattgatctttcacgtcgtcaataatgctcactgccacgccaaattctccatccaatccatcaccgtctccccctcctccgccacgtggcacgtggatttcctcgtcaaaaaccctagccctaggtattttgtctaaaccagtcc

SEQ ID NO: 15968 - DNA, 3528 bp, Arabidopsis thaliana landsberg
  unsure (1)..(3528): unsure at all n locations
ctaccatgaagcacactagtttctggaagattaaatggaccgcaactaaatactgtgttcaatatctttgtaatccccataagaattgcatctacttgactagattaggtgtatcatatcatttgatgctaactcttggggttataggctaacctttaagcttcctcctttacgttatgagccactgacagcatcaggaaggtccttaagaacctaaccaaatgtaacaatgttgccattagcttctaactcaccaaagataagctccagattttcgacaagttacaagtagtataatttgaacgacgtgtgacttttgtttcaagatagttaagtataagaagctggtttttcnnnnnnnnnnnnnnnnnnnnnnnnnnnnaagcataagcatccgttgctgcgtattgtaactgctgctttgatagaggatgaacctcccagttcccaagcctgattctgtttggcttcaagagctgcaaagtaacagacaaattttcaaagcgaaatagaatcaagattcccacttttgatacagcagaacagaatagtgttgtactgctatttctaggaagactggaaatatgataaatccagttctcactactgttatcaaaacttaaatcaagcttttgaaatcaaccagacaaggtgaataacagatacctctttgcaaacaagtgtctcagttagtgaggcaaggccccattttttatctccaccaattttttggttggctaaatctgaaagatcctcaacatctttgatactaactccatagtcatggaaaagcttcacagagtcaccatcaattccaatacctacctatatatatgtatcagaactacgttaattgagcatccatggcaaacaacaagaacttcgaccacttcaaaaaaaaaaataacaaacctttacaagtgttgaatcttcaataagatgttggagactttgagggataccagaatgaaaaatatgcataacatcacaataattactatctacacatatctggacagtcgcaaccttccccgggagaacacctgaaaataacacaaagtttcacaaaatattattagttaagatcacaaaaacctcacaaaggttcatgaatgtgtcaaaaagcattatcaagcaactatcattacaacacatatgagtagactagtctaagagatattattagtagaacaaagcttgcagcaatgagattctagactacacaaaactgcaatagtaggcatctacactttcctccgaacattcagaaaggaaacaacgaccataaagctctattcgatataaagcaagagcatcatcattctatcatcaagatatataaagagaaattagaaaagacaacatatgatccatagagataaaatacagttcgagatgcatatcacattgcatactttaagaaatgcaatcgaaaaagacaaaacttgcaatcagacacaaaacggaaaacattaacgaaagtaccttttctaaaacttggtctccactcaatatccaagccaacaaaagctattccagattcatctctcttggtatcaagaactttaataagctgcattgctcgcttatcaacctcagtagcagtcttgctatacaaaatcctaccaccaaacctcattgctggaaaattcctagctgcaacaaagtatacacattattaagttgctccgcccacataattcaaacaacacactattacgaaaaaaatcttaattctataaattacggcatgaacagattaatacattgtaaagaacttggaattcgaatcaaatggtgagacaactaatgaattgacattttcaaagcaaaaagaagttgaaattggaaaatagaacagaaagatctctgggatttgaagaagtttcatacctcggcaacgggagagaggaaatcgtttataagatgtagaagaagtgatggaacgaggcaattggcgacggatattattggggatttgatttggatcctcctcgtggccatggacggaggttgtagcttgtacggtcggagcagcagaggaagaagaagaagaagaaagggagaaattgtaggaagcttcgatggcgtcgatagcgagaagctcttcctctgtaaaagcgttgtcgatccaatttgacgatgacatttcttttaatgaaacaaaaatcaacaaattaatgctttggacgagtctcgtcggcccctttaaatgtttgaattgtttgtttttaattttanacgttcccacactgtacaatatagttgtgtgttttaaattgcccgagacacgctttatacaatttttgtatgattttgattattcatcaagtaaccataacctttgcttcacattagaattgtcccatattagggatattggcataacgatgtatcagatcatgtcgatgagaaaccaaattcaatctttcagaaacttaaacccatcccatacaaacaaccacacttttgttgacaaatggagcaaccaattcctcttattttcattcaacagtagacactctttcattttcaacaaaaaaacactcctttgactaggtagaaactgtcgatggccacacgtgaaaaatgatgatgaattcttataacactcctccacagatgtaataagtgtcaatccaaggatctagcaattaagagtcagatattcaattttctgtgtaagcaattatccttcccaggagacttgtcaagtcaagcaacgatcaattcgtttcacagaagaaataaaacaaggatgcattcctgtagtgagaggaggatgatgacagtaatatggagcttgtgtttaatcttcggcctctctaactcaatacttgtcattgctaaagacttgtgtcttcccgaccagagggatgctcttttggagttcaaaaacgagttctacgtccaagagttcgatccccatatgaattgtgaaaaggcaacagagacgtggaggaacaagactgattgctgttcttggaatcgtgtctcttgtgatcctaagacaggcaaggtcgtcgagttagatctcatgagcagtgatctcaatggccctttgagatctaatagcagcctgtttagactacaacatcttcagaagctgtatcttggctaccggaatcgtattgttttaacgattacttcattcggaagtctttcttataatgatggtttgaagggtgagctaccggattccatcggcaacctcaaatatttgaaggttttgagtcttcgtggttgccatctctttggaaagattccttcttcactcggaaatctttcttatctcactcatcttgatctttcctataatgatttcaccagaggaccagattcaatggggaaccttaaccgactaaccgatatgcttctcaggttgagctcgctcatctggatcaaccttggtaataaccagttcagaggtatgctcccacctaccatgagtagcctctccaaactgaagaatttaaatattagtggaaattcattttctggaaccattccctcctccctcttgatgct

SEQ ID NO: 15969 - DNA, 1456 bp, Arabidopsis thaliana landsberg
tgcggataataataaaaaaaacagtaacggatatccggatccgtatatatctctattaggctttgatatttgttgggcttaggacaaaatatgttacttccaaaaaaatataaagtccaaactttacgtgacttataataaagcccacgaacatgtgtcatactctaaatcagcttgtctcaaagtcaaaacaattaccccacgaccaaacaattagcccacagccatgttttaaaacaattaagcccatgttggttttaaaacaattaagcccacgaacatgtgtgacaaactctaagtattcagctttgaactaggtattgcttattgatttgtttgtttaatttcatttgatttaaaattcctatttcaaaagttttttttctccagattatatggagaatatgaagaggaatgaaggaaggggagaagaagataagaagatgcatcatttgagtcttttgctacttttattaaactttttgcttgttttttttatgttttgtaatacttgtgatgtttgatcaacgttttgttactttatcaaacttttaacactaattataggacaattcaacttttaatatgaatccggatccggatatccacggatattcgatttttttttatggatatccgaaatccgaatatccggtattgacggatccggatacggataacaaaattacggatccaacggagccggatacggatccggatacgctgaaaaagccggatatccggctccgttacagggctaactatcatcatgatgatagttatcatcataccccacgttaaaattaaatgcatcgttcaccatatccacatatggatcttctacaacattacccacttcttcatgattctcactaaaatacgtcctatcggtgtaactcgttcctatatccatattcatttcttctccatgcttataccaaacataataatcagacataaatcattgactaaacaaatgactactaacttttttacccgagacgatatgttttttattctttcacacagcacaaggacagtggaatttacctcgacaactttgtactataggctggctattagcaaatgtcaagaactcctccactcctgcgacgtattctgctgacaaattccccgtcatttcatcgaacatcttgtacatccaatctcgattaaaaccaccgctactcggataattatagtttcccgccattataagactaataataaaactaaatatattttaacgtttttttcttcaaaaaagtttattttttttaaaggtattatttgtattgtgtttgtgttgtgaatgaatattgtgtacgagaaattttcattatataggcaatttttgggtgactaaaacacgactaaatagtgtagtcgtttaaaataggtacaacaaagatcaaaacgaattacatgtgtttttttaatcgtaaattacgtctat

SEQ ID NO: 15970 - DNA, 971 bp, Arabidopsis thaliana landsberg
  unsure (1)..(971): unsure at all n locations
tgactgcttggagaagttctttgttgacccccaaacagaaggtctcggtttcggacaccataattgattccatacatcttatatcttttcctatttgtctaaattcattgtttcctgttagtcacttacttttaatatgtagttgatatcccaagactactactagttcttaagtatgtagaaaaaggtgattcatttgcagtaatagacacagctttatcgatattacagtctcgctctgttttgtagattagtgaaagaatccagcattgttttgttactaagaaattattgatttattttcaggtatcgttctcattggagaaatcggtgggactgcagaagaagatgccgctgctttgataaaggtaaccgcaatgcttctttctaaagaatcaagagttaccatttttagatgatcaagcgtaaaaacatatcctgttttcaattaaacaggaaaatggtacagacaagcctgtagttgctttcatagccggacttactgcaccaccagggcgtcgtatgggtcatgcgggaggtaaataaactttactcagctctttcattcattcacagtttcccactcgaacccattattaaatcttgtaatgttttttttgggatcgatgaagccattgtttccggtggtaagggcacggctcaagacaagataaagagcctaagagacgcaggagttaaggtggttgagtcaccagctaagattggtgcggcgatgtttgagctttccaagaaagaggtcttttgaagtgaaactgaagtaatatcataatacaatgagttgtntcaggaatcaacctctctaatacacagtttgccgaaatagagagagaacggaattctaaaatcttacatggagatattcagagaaaaaaatagccttnttatttgctatgcatctatgtcattatgaccgtctatttttttgcttgtctggtagtcaaaatggacga

SEQ ID NO: 15971 - DNA, 763 bp, Arabidopsis thaliana landsberg
  unsure (1)..(763): unsure at all n locations
ctatcttactactaacccgggatttttcttttcttttcgcggttgtcttatcggacctcttggttaatgaatgatacagctctacagtacggttacgttaaggcaaggagagaagaaacactataatcataaagtagatgcttacagctttgccattgtcttgtgggaactcattctcaacaagttaccatttgaaggcatgtcaaatctacaannnnnnnnnnnnnnnnnnnnnnnggtaataattcatctctcaatcggttctgaagcaaaactgaattacaaactaaaaccgaatagacgaactcatcatcgacacgaaaaaccaaaccgaaacttagattgaactcccttgtatctctgctgtggcctctctgcatttgatctttacttatttggaagatccttggattcgtgtatcaaagtttgtcatttcttggttaccaaattgatgaattcaaagtaatgaaaccggcattgcgactaatttgtgtttgtttttatgatagaacttgaggccaagtgcagaggatttaccaggggatttagagatgattgtaacttcatgctggaaagaagatcctaacgaacggccaaattttacagagataattcaaatgctccttcgttacctgaccactgttttggcaccacagatcattcctccactaaatagaagaggcttctcatcagaaaacattcgtttatcaccgtaatctcctggaacatgctctttgatgtttggtagagacggagacgtttt

SEQ ID NO: 15972 - DNA, 970 bp, Arabidopsis thaliana landsberg
acaccttgcaacctggagaatatttgaacattgaaattttcatgattttatgctgttttttttttgtttgaccttttagatgtaaacgtacaaaaacaatcaaatctcatatagttgggaatgccagtacgggtcgacatttggtccagaggtttcaaatctcataaaatttttggttaagccaaaagcttctgataggtttgacaacacatctgaagctttataagctgcagctaaagttgctggagggacattcaagcaaaggtcaacgagattttttgaaagctatttgtgaaggtgaagccttagatgtggctgatccaaaagcttggaaatgtgatcaaattatttcaatggtaaagtgggactatacacgaggagcattcccaacaacggagttccctttgttcttacagcaacaaatacaatctcatttgtgaaacataaatcttgcttgcagtttaccttttctacaagtttccttttccagttagggttttctccgatgggatatatatatatgtatatatatatatgttggccgcttggcctgtaaaatttaaacaagaaaacatcacgtactcttgaattgtcataaatacattcagcacaatcttacattacattcagtgccacgttaggccgccgtccgtgtctgtagagatcaatcatgctaaccgatcttcataacgatttggtagatgagatactgtgtgtctgtgtcgcgttccggcgaggaatctgaaacggttacgatctaccagcaaacgatggaaccgtttattcaaagatgataggagattcgcaagagagcacatgcataaagccccaaaggagtatctacctctcatgttgacaagcgagtacaggatctgtccggtgagcatcaatctccaaggagatgttccttctgtagtgttaaagagagagcttagcctacagatccggattatcacatcaattcgatata

SEQ ID NO: 15973 - DNA, 3405 bp, Arabidopsis thaliana landsberg
agcgtcttcctttccttggtagaatctgaaatgctcctacggggccccgtttgaacctggtgaaaacatatttgtagccagagccaagtcaaccctatatgtagaatagtgtaattcgccaatgaagaccttcactgtctagctcagctctctttactctgctgtcaagcaactctgcaaaaacagctgaatgcttaattttgtgtgtacatagtttcgacagaaacaagccgatctagtactcatacttgagaacggttattcacttttagacagacaaatctgttacataccttttttttaactgtctccgccgtcttctctctagaacagagtcaatgacatgcttcgtaattaggaacacaccaaaaacagtaaaacccatggaggcatatttgtaccacctgtaaattatactcttatcaatcagtttggctcatcgccgtttttctacaagagtataggaggagaagaaccgagagaggagagagacacgaccttgaccattttcccaaattagaaatgagctgatcgagtgatttaggagagacgtagaaaggtcccctgtcaggtttttgaatcctgaattctccaatatcgtccttgacagcctgttatacatggcagcaacacaaattagatttaaactcattggtatgcctctatacatagatcaatcccgcttcctacaaatattgcttttaaaggaactttgagaaaatttcaagaggcaaataccagactgttgaaggagttagtgtgctatgtatctctatcaacagttacaacttaagcaaaagagatgacatgaaacactgagcatacgacatacctcaccaacaattgttagtggtattccagttggaagaacacgctcaatgcgcttaactccaagcatctgaaacaaaacaatggccgcttaagcaaatagagaagccaacaaacaaagaaccggaaagaaaagtaaaaaccttaagtccttgaagataatcaagtgttcctcgtacaagcgagcgtcctgactcttcaaaaacttcactaccaacagtcaaggcaaaacccgtcgcaccacgagctcccattacatggacacggcttgtcccatcgtcctatcgcaaacagttttggaaattgtattaagaaaacatccaatcacagttgtctcaaacactatgctactatactagacttaccagaaaccaaggaaccttcttgctcattgataacatcaatgcactatcttgcacccaagaacccgtctcattatgtttcagaaaatgttgttccgcctgaaaagatcatgcagatcatgcaattactagagtttcacataccagcgaaaacaaactaggttccatgcgctaattatcagtctacaacataccgtttcctcaacaataacaccgcgaatgccactatgctcgcatttgataggtgtctcagaaccgactcttcctgatacggcaacaatgaaaggtagaatcttgctatctaattctagcaattgagctacaaatacaatgcaatccaaaaaataaaggatcaacaaataattctgatagtagatgaagtaatcaggggagaagaagatgacctaattccttgagctgattaactctagtgacagttttgagtacttcagcatccctgcgctcaaaaggataagaaaggatttgattgatagataatctacactttgcgaagaagaaatcaaaggagatcataagtaacaaacctgccactactccggccgagaagataaagagcggcggcgctaaggcagcaagtaactccaccccaaggaatcatcagactctcaagtcactcttactggtttgaagaagaacaacaatacctttgaattgattgatgaccagagagagagaggtagtgttcgaatctggatgtagtgaaattgaatgaaatagagatgagagcaaacgaatcaggattagatgtagaacacagagcgatggaagaagatcatgagaaaatttgctaatcgaggaaacgtttgaagaaattcaagactagaaatattgaaagaagatgagagattttcaaaaggggaaagtgaaatattcagtgttgaaaattgaatgatccttctcttgcttcgatctctctcaatattctcaagttcagggtttggggaagaagacgaagacgacataagccggaagcaacgaagccacttctcaatccattgggcctagattgttttttactcttttcaatgtttaagcccaattataacacatgcgtcgttttaatctcttgtttcattaggcattagctaggtttcatattgtttaagcccaattaaaatgctcctaaactttctagattttactacaatcgtaaaagctgtctattagttgctgcctacgcaatttgcaatatgaggcggttctttacttgaaatttctgtgttatcacggaattaaagaggttttgaagagcgagtagattaaattgtaaacaacatgtttataataagtgatagatctttcgaagcaatgtgtaatctctttcgctttcttgaagagccattcaaaaaatttggagcaaagccttgaatcattcaaaatttgaattcttctctctttatacccacaaaaatacacgttatctctttatttaatattgcctctctgatcatttttatagacagcttttccaaagacacattaacgttaaatatcttatttttgttatcttcaacatttcatcatggcttctccttcttctttttcttcccagaactacaaattcaatgtcttcgcaagctttcacgggcctgacgtccgtaaaacacttctcagtcacatacgtgtacagtttaaccgcaacgggatcactatgtttgatgatcaaaagattgagagaagcgcaacgatcgggccttcactagtagaagctataaaagaatcaaggatctcgatcgtgattctctccaagaaatatgcttcatcaagctggtgtttggatgaattggtggagatcttggagtgcaagaaagctatgggacagatagtgatgaccatcttctacggagtagatccatccgatgtgcggaaacagatcggagaattcgggatcgctttcgatgaaacttgtgcacgtaagaccgaggaggaaaggcaaaaatggaccaaagctttgaacgaagtcagcaatattgctgcagaagacttcttaattagtgctgttttatgatggaggaggtattacgattattggaatttaaatgattaagggaaatgtttttgttgaataagtattaaaatgtcatacattgttgggaacatgcaatgttatctctgtatctatttgatggaaactgtacttttcctttctttctcttttgttagggacaatgaagctataatgatcggaaagatt

SEQ ID NO: 15974 - DNA, 4157 bp, Arabidopsis thaliana landsberg
tgaatgcagactcaaaaatatacacaatgcaacacacacttcgtgagccctcccccaaacttaaatcacacagtccactgtgcgaataaacttggaagagagtactcaggacaaatccaatcacaaaaataaaatgaagaaacaaatcaagacagatggtataatacaatggtgaagtgaggtgcttacctcagtcgaagaatgaacgtagttgctcgtcaatggctgcctgcgattgctcccaggccatagacgaactgccttgttctgtatcagctccaccaggtgggtactcgacctcatcagctctgtggcggccaacaccgctctgaggaaactcgacctctctccttctgctgcggccagcaccacggtcgcgtaaactacgagactgcagaagtcgtccgctcctactgctagatcgagagagtgtggtctcctcttcctcccagattcacgaggctcgaatgatgaatgcctcgcagggacatgcggaatcacttgctctctagggtcaggcctgcgccgacttggctcgggcgcgtcatatctccttgaaggcatgtcctgagggagatgtccctgcggaataactatagtggaagaggagcagctgagcttgttcttcataaacttgatagccctgaggcacttggcgagtaacttgtcctgtttcatgcaccacttctgcagcttgctgttgtttctgttagcttcgctcaaactcctgctttccctcgcaggaggtatttgctcactgaaatgatacatgctcgtgtcaaactccgcctcatctatatcatccgtctcatcaatatcttctgctgtagctccttcggtatgactgatctcctcagttggcggactaccctcgaaaaaagttcttcaagcgtaggcctgaagtcaatgttcctgccctcgagaatcctagtagcgtcaatgcaggggagaagaatgttggcgattttaatcgatgaatgctcgaacctgtagcggtgaaagtcgccagccatgtcaaactccaagaactcacatctgcgcaaatgatccaagtccatcatcctcggtgctaaacctggttccttgagcggtactccacaagcttccagaattggcgacacaacgccacccacgcatagtgctcctctcaccttcttcttcccgttcgtcaacgcccacttcctgtatccacacagatggatcaacagaggtattactggtggtgcgttgttgagatcgcctctcaagacattcttccccttcgtccggtggagaatccctgtaagtgcataatctatcatctccatgtccatgttagacacggtgcctgtcgactccctggagtaaaagacgttggcgactgatcgctgaaagtagtggatcacaggacttctgatttggttgctcttagaccgcgccgagtttagcggtagattgttccctatagtggcccacaaatccttaagctcctctctgttaaatctgggtttggttccctttccactagggaaaccaaacagttccctttccactagagaacgtcaaaaagcctaatcccatggtatccagctcaaagtctgtgagtgcttcatacatctccacttgcagcgtggaaagaaactcgattgtctcctccttataggcagggtaagggtaagacatgagtgtctccagatgacacttctcgaacaaatgctgcacgttctctagtaaccccagttgggctaaagtctcataacacggatacctcgttccccagaaatcattcatctcgaagaatctaatatactcctccactgtaacctcgtcgggtttgttcagcagcttcgtctccctgcgccatgactctggctcatactcagtctcgatatcctcatcaatcagctcatatctacttgacatcgccctctttcctctggcgatttcagctcttctctgattctctgttcactagaaaaatccccaggaaatcccgcaatcttttgtaaacttgatgaactctttgtaacattccatagcttctgttggtcgagtaaaatgatgatttaaaattttttaggtttttaaacatcactcaaacacgcccaatatactcgatctctaggacatcagtagagtaaaagttttgaatttttactctaccttcatgttactcctttcttcctgagaaccaaaaacacaaccaaaacaaatcaaaaataacaagaaagtaaaaattatttacaaggatagtcatgggacttcctcccaagtgagcttgttttaagtttctagcttgactcctcacactcatcaagaagaaaatgaactgtagagagggtctgcataatcctctctgataccatcatcatactcagcgtcctccctggagaggtctgtagcagaatactcaattcccctctcttcaaaataaacttctttctcttctggagggtaatctgtttcttcagaccatcttgaagtgaacttttttctcgggatagtgttaatcccgtatcttgattgagcttccttctgcatctgattcagcttactcctaagttcctcaacagtgtgggctagcttctctatgggttcttcttgcttatcagacctctttttaagttctttcactctttcagtctcatatccttctcctgagatcactctatcatttccagaggtttttccatcttctataggtgacccttgtggagttttggtgatgtcaaactgcaacttgatgtgctttccaaggttgagacttattttcccatctctgacatctatcatcgctcccactgaggctaagaagggtcttcctaggatctaaggatccctgggttcttcatccatttctagcaccacaatatctgtaggaacctccattgtgcctatcttggctagtaagttttctagcaaaccatgaggtattgtgatggatctatctgctagaatcaaagaaatgttgcaagccttgtatttactgaaaccaagtctcttggccactgagaggggcatcaagcttacggatgcgcctagatcgcataggcacctattgaatggtaaagggacaagtgaacaaggtaaagtaaacgagccaggatctcctaatttcttaagtgtgatcttctgttcgatgatcgcactacactcgtgactcaatacgaccattctctgaacttctttgatcctttctatgatgatatccttcacatattggttagggtctagtataagcgcaagatagtcaacaagaggcatcgtgacttcaagatttttcaactctttttccaggagagctttgtacttttgtatcatgaccttcttgaatcgactaggaaatgggagtgggggcttctaaggtgggggaacgaaaatgttatctttggttttagcagcacctggttcttcaacaagaggagatgctgtaggagctagttgtcgagtaggttggtcgagtataggctcttctattgctttttcaccataatcttcattctaacagaaatcctccccatctcgctccacactgtcctcactgttttggttcggactttcttttgtgggtaattctttaccggttctaagcgtgatagcatgagcatactcctttgaattttgcattgattttctggaaggtcctgtaaatttgggtgccgatgtcgacccaatttggccttctatgtatctgatcttagatgtcaatgcttcaaccttgatattgatatcattgtaactgcagtcaaccttgttgtgaatttctgccatctttttgcacaaatccattgctcctgttgcttgcccttggagaatctgctgtaacatgttcttcaagtctgaatctggagttgttgaagctggttgttgttgctgctgtgtgaacccaggtggtggaagttgctgctgatagttgccctgatactgctgcttaggaacatacccttgaccttggttgtacggaacaaagggcttgggttgattctgctgctgagaagggtagacttggtcctgcgggtttgcaacgtttgtacttctgtaagacagattgggatggttctgcttgaagttgttgaaacctttgttgtaacctccttggttctgcacatagctgacctcttctgactgcagagtctccccatcctgaacttggaacgtctcatcatcacccagaaaat

SEQ ID NO: 15975 - DNA, 467 bp, Arabidopsis thaliana landsberg
  unsure (1)..(467): unsure at all n locations
ccacttgatgaacaatcttttaccagacttaggcatgagctcaatattcttgattctagaaatttcttttgctaaacttgcacacatagctcataaatatacctttgatcatgtctctttcatatgctatgactaatgtgttttcaagtctatttcaaaccaagtcataggtatattgaaagggaattggagtnnnnnnnnnnnnnnnnnnnnnnnnnnnnnnnnctcatcgttcgccatcactccgagcaactctctatttctttgggggagaaatgagcaccaaagaaaaggacttcatccttgggggagagagtaaaagctcaaaagcaaaaggaccggacttcgtctttggtataatcttaactcatttacttatgaccaaagcggaagaaattacttggagggctctaatgattccgtttttggcgattcatgccaaaaagggggagaaatgagcccaaagc

SEQ ID NO: 15976 - DNA, 304 bp, Arabidopsis thaliana landsberg
tcattgacacacaactacatgcgactattttttgaattttttgggttgtccgctaaattgtaaatatcattaatatgaataatcagaacttacactttggttaaacctatacaattgtgtacttggccaaaaaaaaaaaagagtaaaaaacaagaaaacaaacttatgtgggaaaatctcgggccagtttatttttgtcttaggatttcagaagtgacccctttgatttttttggcggtgatagcgttcttaaggggacgatcaattatttttgaagactgagtggagagagaatgcaggtata

SEQ ID NO: 15977 - DNA, 2272 bp, Arabidopsis thaliana landsberg
atgtccatacaatacatctgtttgctatcatctgttccccgttcttgtgccacatcaacattgccatcatttctatttgctgaaatgttcaaaaaatatatcagtgtacgtacacttccacgaaaaatttaatcatctatgtacaatttataacaaggaatgtacgtatataaatgcaacgtaccgaactttcgacccattcaccaggtgttagaaggttcgcaaaaaactcgttgggcactttgcgaaacccgaaaagagtgtgaatcctgtaaatccagaaaattttttgataacaactttaagacttggaaaatgatgattcagatattaaataatccattttactataatgtacttacactgagggtcctctaatgatattgctgaattcctctacttttgaagggtcaaccatgtccagggggttgtatgagacatttctagccctgataacaacctctatctgttgagctggtacatcgggcaccaagactgtttttgccttaaaaccatgaggatgggcatcatcctgttcatagacaagttgcttcttcactttttttgggacctttggggacgattttttttcttcttttgctgcgacaccaccagcatggtttttacccacccacaacaaaaaaggatcgcacaaagaatatataaattaggcaaaagtagaaaagaggaacacacattatgtagagaaagaccggtgtagtcggcttcatctgaccctgggttaggatcctcatttcctacaaacccctcgacaatacccgactcttccatcactccctgtgcaagttaacgtacacaagcctatataatgtacacatataatcctatgtatgttattccgagattaggaattgaaacacacaaattgttacctccacatcagtagctgcagccaaatcaccaacggctttggtatccaactcccgtatgaccagcataatataaattttatacatttgaacagttaatagtacactttattttcagctagagttagcttacattgttaactacttgaaatggtgatgggggatcactgtgggtcttctcaggtatttcaacttccatccctgtcactaatttggattcttctgtcgcctcaacctgtagaatttatcatcgaaaagcagctttttagttatgtatgaaacaatctatgtacacagaccatagtgacaaaaatgtacgtacacttgtggcaggtatgtgagctgtatctccatcagcaggctcaaaagtttcttctgactcgctgccattagcttcagtcgtagcacaagcatctcttgcttcttcctgaaacaaaaataagtttcaaagtcttatgggcgtacacatatagaaaaagaacaagtgactaacacatacctgtgcagatgttgaaggtaaacctgatggattgtctaccatctctgtgtcagcatcagctatttcatcggcccctgtatgggtaccaactaagccaggttcaacaacatcctttggtccattatcatgaaacataggctacaatagagttaagcggtagataagtggagaaattaatgtaatatatatgcatatagtcatggaaatctgtatataacgattaccacaagatctacctctgaaactcttgcagacacattagatggaacttcttccatctcggtgtcaacagtagcttcttgcacaggcctcccttcctgtgtaacatagacagtcccagacattgaacctaaaaggacagtcttaccaacaacaacatttcctctatcctgaaacatagtttaactaacttcttaagcgaatatgtacgtacaccattaaaacagattggtaagagtattagtagacgacataccgaatgggattgtgtggatccagcataaagaactaataaaaatctagtgtcaactatctcttcttcagcggccgaagaatccactccatcatttgtagtaaaatcactttcattattagctccatactgtaccgaagtagacagtacagttatacagacatatgaattagaaaatatttaggaatgtacttacatgccatacctattcatcaatgaatccttgcatatcttccttattggaatcagatagctcagtagtgtcaacagcaaaagaaacacttttcttcggctttgaaattattcttctttcggcgacagcaatggtaggtactccagggacatccaaatcttcctctttggaattaccaccaacagaaagcgcatgagtgtccacattatgagaaacac

SEQ ID NO: 15978 - DNA, 1163 bp, Arabidopsis thaliana landsberg
gctactctctcaatggtttcacattggcgctacaggtatagacaagatgaggatgttgtagaagatgattacgtggaaggtgaatgggatatacaggctgataagaaagaggttacagatcttattgctgaagataaagccacaagttcaaagaagagcaaaaacatgggctgtgaaggtgcagagaaaaggaagatgaaactgttatgtgaaagagccgcaatgacaaatgcttttgatagtgttgagatgaagagatacatcaaagaaatgtttgaaatttttttcgagcagtttgggcaagaagtaggcaatttttttcgatgtatcaacactcaaggaagttatgaccactattgcatcaatgaaggaaacattgactactactgctgagacttcattaaaagaaaagccaccttccattaagacaaaagcaatggtacgttaaaacaaaaactctcccttctctgcttttgtagatgtatttgtaatttgtacaacagacatgtatttgggctaattgtgtttgttatgttgtattttttgtactatcaaacactttaactcggctatttagtgacttattgattgtaatagtccttgatatctattgcaattttaagactttgtaaagtttatgtcctgtgatttttacattttctttgttgtattgacaggagataaatgctttgtttgatgaatattacaccagtcagggtgaacttgacattgaccttaatttggattcactagaatttcttcaagaagaaatgggtcatctttctcaaaaaaacacaggtacccggatttgatcaatcacagagtcaaacaaaaaaactctttcgatttcgactggcgttacaaaccagactcggggaagaatgacccagatgctattttggtgtacgtacctgaagctaaatggagtgttttcgatgaatgggtacgcatcttatggtaagtctttttcttatcatgttattttttttaattttctgattctattattagtcaattatctaactatatatttctcgtataacatcgttgcagccgcggaattccaaagcatggtccatctcatcttagtaacgcattatttgatcgacttatgaacaacaaaaaacattggcttgccaatgaaatttaaatgtttttgccct

SEQ ID NO: 15979 - DNA, 933 bp, Arabidopsis thaliana landsberg
tgcgccgcagtagccgttgcgccgaagtatctgttgcttcgatgtcacaccggacagtccggtgtacaccgacatgtccgatgaattatagcggactaccgttgcgaattcccgaagctggcaagttcctgaggcgccgttcattggagcaccggacactgtcgtgtacaccggcagtccggtgaattatagcggagtcacctctggattttcccgaagtgacgagtttgagttggagtcctctggtgcaccggacactgtccggtggtgcaccggacagtccggtcgccagaccagagatgccttcggttgtccctttgctcttttgttgaaccaatacttggtctttttattggctaagtgtgaaccttttggcacctgtataacttatacactagagcaaaactagttagtccaattatttgtgttgggcaattcaaccaccaaaatcaattaggaaaataggtgtaagcctaattccctttcaatctccccctttttggtgattgatgccaacacaaacaaaagcaaatatagaagtgcataattgaactagtttgcataatgtaagtgcaaaggttacttggaattgagccaatgcttataagatacacatggattgtttcttcatttttgacattttggaccacgcttgcaccacatgttttgtttttgcaaattattttgtaaatccttttcaaagttcttttgcaaatagtcaaaggtaaatgaataagactttgcgacgattttcaagatttgaaattttctccccctgtctcaaatgcttttcctttgactaaaacaaaactccccctcaatgagatctcctcttagcgttcaagagggttttaagatattgattttgaaaatactactctctcttccttttgactcaatgaggtgccaattgaaaacatacgattgaagatc

SEQ ID NO: 15980 - DNA, 527 bp, Arabidopsis thaliana landsberg
gacctcactcttctcatccttatggagctgcccgccatgaaggtcacaactatgaccaaagatacttgcaggaggtgatgagtgtagatgttcatccgaataattatgcttaccaaactaatgagccctaccaaactgctgaaccagaagatagactcattggtcttctccaagactttgttgatagccatcaagaagatgtgaagagaatcaacttaaagctaatggagatggaagccaaatttgaggagaagttcgatgacctcactaatcgactcgaacatatggtggggacacttgttgatatcgataacactctcctcaatcatcaagacgatctccacgaccaaaacacgagaatcgtcaatgttggatttgttgttgatacagttgagagtcatctgaattggaagatggaggagctagagaagaagctcaccaaatcaaacgaattgtcggaatggaaaagcaaccaatcttgccaagaagaagatgagtttcctaaggcccaagcccgatatgaggag

SEQ ID NO: 15981 - DNA, 394 bp, Arabidopsis thaliana landsberg
tacgtagggataaactcaagaggttcactatcttttagctacttgttgttatcatattcacgtgtactgccccacggtcgagtatataaggcctagggggcaccccttcagatcgatcgaccctgctctacttagccacccacataaactctctgcgccctctatccagagaaccctcttgtaaccacgctcgtatactcaccaggacgtagggtattacgcacttctaagcggcccgaacctgcaaatcttgtccattgtccctcgtgcgatcggcacgaaccattttgctacagtcgttgacaccgtcctactcctaaaaacaccttgaggggcaacccgggtgtgcggtcggacccaaaacaccgacagctggcgcgccaggtagggggtg

SEQ ID NO: 15982 - DNA, 1782 bp, Arabidopsis thaliana landsberg
  unsure (1)..(1782): unsure at all n locations
tccgagggactccacgcgaaaacgttggcgttcgcgcggagaaagtcgacgagcactgcttcctatttggggtcgagctcggagccgatccggatctgcttggaggcgtcgttgcaggggtcaagagggacggacttgaccgtctccgctggttcgaagttgccggcgtggcgcttcacgtcgggcgcctccctagagaggctctccaggtcagcgatgagggcctcggattcagcgagggcctcggcgtattccacgcactccacatcgcattcgtatgcgtgtcggtacgtgggcccgacggtgatgaccccgttggggcccggcatcttgagcttgaggtaggtgtagttggggacggccatgaacttggcgtacgatggcctccccagcactgcgtggtaggttctcgaaacccgaccacttcgaacgtgagggtctcctttcgacagttggagggtgtccgaagcagacgggtaggtcaagttgtccgaggggttgaacgcgcttcccagggatgatcccgtgaaaaggcgccgcgccggcccagatcgaggacagatcgatctgcaggagcccgagggtctcggcgtagatgatgttgaggctgctgcctccgtccatgaggaccttggtgagcctgacattgccgatgacggggtcgacaacgagcggatatttcccgggctcggcacgcggtcggggtggtcgccctggtcgaaggtgatgggcttgtcggaccagtctaggtagactggcgctgcacctttatcgagcagacctcccgacgctcttgcttgcggtgccgagctgaggcgttcgccatttgcccaccatagatcatgaagcagtcgtggacctcggggaactcatctgccttgtgatcctccttcttgtcgttgttgtgggccctgcacctccgcgggtgcccggctttgtgaaagtggcgccgaagcatgacacactcctcaagggtgtgcttgacgggcccctggtgacntagcacggccccttgagcatcttgtcgaacgaggttggcacctccggggggtttccgagggttcttgtactcggcggcggcgacaaggtccgcgtcggcggcgtcgcgtttcgcttgcgacttcttcttgcccttcttcttgggccgcgctgagttgacgcctcgggggcatctcctggtgccggccctggggctgcttgtccttctggaagatagcctcaaccngctccttgccagaggcgaacttggtggcgatgtccatcagctcgctcgccctggtgtggtcttgcgacccagcttgctcaccaggtcgcggcaggtggtgccggcgaggaacgcgccgatgacatccgaatcgatgatgttgcgcagctcggtgcgctgcttcgaaaatcaccggatgtagtcccggagggattctctcggctgctggcggcagcttcggagatcccagtagttcccagggcgcacgtatgtgcccaagaagttgctggcgaaggctttgaccaggtcgtcccagttggagatctgcgcaggaggcagatgctccagccaggctcgggcagcgtcggagaggaacaggggaaggttgcggatgatgaggttgtcatcgtccgtcccacccagctggtaggccagccggtagtccgcgagccacagctccggctttgactcccccgagtacttggtgatggtagtcggggttcggaactgggtcgggaacggcgcccgtcgtatggctcggctgaaagctcgcggaccgggtggttcgggcgaggggc

SEQ ID NO: 15983 - DNA, 864 bp, Arabidopsis thaliana landsberg
gatcccctccgcacaactccgtcctccacttcacgcacgaatgcggctggatcccggccgcacagatccaacgcgaaggccggactccgcacttgctgctcacccagggagggcatctggcaagggcatacttcgcccagcgcccaaccatgcgccaagggccacactccataaccgatgaattcgtcaactaaatcgcgcccgctacttatgcgggcaacacaacgaagggccccttcgtccctatcatcctccgccacctcaaacggtgggaacgccacataacagtgggagcacatcacggccgccgggagtcctgggaggtcttcgacttcgcctccacgcacataaaaccaataatcataccagttgccccacttgttacgggcacagggaactagctccacaacttccgccgaagtcttcccagtcctcggcgtaaaggtgcatgatccaaactgtgcaatcttgcttctaatttttctcttctgccagtgcagacaataattcttggcgaagacgtctacggagggctgaccacatacgaagtcacgcccagacatacttcgcaagagccacacgacattcgggtcagctgatgatctgaatgtaaatctgcgcagacttctccaacaaatcggtgcgcaggcagcggacgaccggcgcgaagaacgcctcgaacacaaccaacgtcgttccggctcggggacttcctccgtccccgggacagcgcaagtccgtcgccaaagtaacccagccgctgcatatctcgcacgcggaccgacgacatccgtgacacaccaaaatccaccgtatcgccggcgcgcaactcctccgccgccaaagtactcagcgtttcctcag

SEQ ID NO: 15984 - DNA, 341 bp, Arabidopsis thaliana landsberg
  unsure (1)..(341): unsure at all n locations
gttatccggtgctgctgagatcgctaagagtgtcatcactggtatgaggtggcaatcttatgtggcttgtagttttccccattggttgagaagtctgtttgaagaggaaagaattcatcagcagaatatttgagactggcttctgatatctcgcaggctaaattataagtgtttggcttccaattgtgttgatccagtcgtggcagaaggttgacaggtgtaagcagcgaatgttttttgtatttggaggtcttatgactggngtaggtttttgtcttcttatcttaaagtattcctaagtgtagggttttctctttattatgagtcggntagttttgttt

SEQ ID NO: 15985 - DNA, 2868 bp, Arabidopsis thaliana landsberg
  unsure (1)..(2868): unsure at all n locations
cgcatatgttcagtgtatgttacttgactttctaatcaggttaactttgttttctaaaagttttcagtctaattaacttcagattaagtattatgaagttaacaatttcatatatacaacatttaggtttgttactgcttatcaaacaataggataatatagtttatggaaccaagcaatttattataatcaaaaccatcgacatacaatgataaaacaaagtgaactatgtttattcatcaaattcgaataggtgaagagtaggtacttagcaacttcaacagttaagaataacagtatatatttttagcaactaaacaaaggtgttattatacttaacatcaaactaatctttttcatttagctttctgtgaagttccaaagactaatctttttcatttaacattcttagaaacaagtgacgatgtataatttaggtgaggaaaacttttcaagtcaaagaaatctttacatttagaattctggaaatctccaaggtgaacatctaagccctctatcgtgtttcgagtagcttattatcaagaaataatagttcggaacacgggaaattgtagcacataatgattttgttagctgtagtgttaaaagaaaacgaaatcaaatccgtctcatttgatctacgactatatatagatttcaaaataattacccatagcagatcctgttttttgacaattcttggggacgatctattatcaaacaaattatttcaaagattataaatttaatcgacagatttgaaaaccaaaaaaactaatatatgatgcaacaaaaaacatacttctttatagaactaaatctgtaaagtatatacaaagtataacagagactaaaataggtggattatctgtgaattttgctacagatttgtcgatcgaccgacaatgttcaacaatttgggtttgcaccaaaagacaacgtgtcttcaaacaataatttaattatctgtccaaaataagaaaaacataattcattacaaacataattcattactaaatcaattacaaaacattattcggcccaatatataaatgtttttcggcccacagcaaaatatcccaaacctcttattgcttggtttgactctgtaaactctgattgcatcaacaatcaaggtggctacaaagggtacaacaacttcaagactaacaaccccaacctctcttaccgaggcactaatgttgctaatccataggatcaagtgtatcctccacaacaagagcatggtgagagcaaaccctttgttccctacaaccaaggctttgctcctaagcagccatttcaggagaactaccagccgcaaccaccacttgggtttgaacctcggcaacactaaggtccttctgctcttgatactgacatgaaacaaatgctacaatagctactccaaggacaagcatctggctccatggagattgttaagaagatatctgaattacacaataagctggactgtagctacaatgatataaatgtcaaggtggagacactgagttccaaagtccgatccttggagggacattctgcatctacttccgctcagaaacagacaagacaacttccaagaaaagcgattcacaatccaaaagattatgctgatgctcatggtatcacccatcataatggaaaagcacttccaactagggaggaaccaaagacggtcactgaggacagtgaagatcaagatggggaggatttaagtctcgagcaaccactcgaccgtgctacttgacctatcttcccagcagtatcatcaactcctccaaaacccgttgctgtcaaaaacaaagaaaaggtctttgtccctcctccctacaaaccgcagcttccatttcctagtcgtcacaagaaagcgttagcagacaagtatagagctatgtttgccaagaatattacggaggtcgagttgcggatacctcttgttgacgctctagcgttaatcccagactctcacaagtttttaaaagacttgatcatggagagaattcaagaagtgcaagggatggtggtattgagtcatgaatgcagcgctatcatacagaagaagatcattcctaagaagcttagtgatcctggttcattcactctaccatgctctttaggtccattggctttcaatagatgtctatgttatttaggagcatcagtcagtctcatgccgctctctgtcgccaaaagattggggttcactcaatacaagtcttgcaatatatccctcatcatagctgacaggtcagtaaggatcctgcatggtttactcgaaaacctacctgtcaggattggagctgtagagataccaagtgactttatagtcctggagannnnnnnnnnnnnnnnnnnnnnnttgattctggggagacctttcttagcaactgtaggagctatgattgatgtcaagaaagggatgattaatctaaaccttggcaaagactttaggatgacctttgacgtcaaagacgcaatgaagaagcctacattagaagggcaactcttttggattgaagaaattgatcagttagctgatgagttactggaagagcttgtagaagaagatcatcttaacggtgctttaaccagaagtggtgaagatgggtttatgcatttgaaaactttgggatactgatatgtctataatttgcatgatttaggcattcattcttcaccactttgtcattgtttcatccacatttcatctcattaggagtcgttttagtgtgttttacatacttaggacgattttgcattaggattgcatgtgcatggcatatttggttgttttcaggtactttggatgcttttggagttcaacagaggaaaaacagaacatgaagtcagaatgcccaatga

SEQ ID NO: 15986 - DNA, 2564 bp, Arabidopsis thaliana landsberg
actttaacctcagtcttcactttgatctccgccttcgtcccttctccttgcctctgcatcgatatgatctttgactccgcgtcaattttcgcagcgttctgtagcgtaagcccagtccgttccttggcaccgatctctcccttcatcttggcctcagccacatcgatcctggcctgatttgctgcttccatttgggttttctgacccaagtaagagaagtactcatgtccaggcacgtcaacgagctgtttcacgtttgcattgtagattacgagaccaaactggtctaattctaattgaaccttatcaaacacttccttcttaaactctttcgtcccttcaaatccatataaacaaaaaaaaaactttttaatcaaatcgttcagaaaattcattgtgttagtatagcctaatggtttgtgttacattgtgtcacaccaaatgttttgggaccaaaaaaaatatataagttacctttgaagatctcttccatggtcatggaagcagcgagaacacgagtctctccctcgataacaccttcaacaagctcattgacatgatttgactgtttgtcatgaggagaaatcagcctagcgtacagaatcagcgcttcagtgtcatcgacacgagggccgatagtgaagacagcagggagaacgaaagggagcttctctgcactcatggcttggactttgaaagtgtagttcacgggagaaacgtcgaaaacggtgcaagactgccatggaaacacccatgatttctttgcaagcttgatgtctgtgatcccaccaccggtgatcgcaaatattgtgaggctcttgcaaccttgaacatgtctaggatctaaagatttgatggtgtaagcttttcgccaaaatgattttggagacgaagaatgagtagctatacttgttttttgtttcgtgagaagtgtttatatattacatatagtcgttgacatgttaagaagactttgtctgtcactgttagagaaatgttaaagaaatttcacaaacttgtatgtatcacaaaaaaaaatggatgattgtgaagaatgtttcattcttgactttctatttagattttgtcaagctgaattgttattgcaaattttctatttagattttgtcatatttgttaaaatttggtgaaattgtatgtacacggtttagcaaaaaaaaaaaatgtatgtacacgatacaccaaatacatcaaattcaaaatcttttaaactatatataagtacaccatatatataaaccaaaaaaaaaaagtcataattcattaaaccatatacataaaacctaacctttgaaccaatagatctagatcctaatctcgaatgtttacgtataagcatatagttacatcttatattgaatgttgaccatgaccaagcttatatacattacaattttctgaattttcattttgataataagacgttgagtttgccaaaatctcttcaaacttgtttgactatgacatatgatattttagaataaaataggatcggagactttttgccaattcctaataagataaaacttcaacccacttccaagaaactacacatgaagaagacttcagatagtcagctagtagctagttgcccctgtcctggtcgatgacccaagcgcgtcctaattctccaaatgactattcctacctttcaccttccgctagactacacgcataacacaattcctagtcagtcagtgactaaagcatctcccatcagactatgcgcatagctcctttcagtttcatgatatatttttccgtcaaaactgtaaaatcttattttttttaaccatcatctgaacctattttctcctaatagaatattcaacccacaatttggaaggcgctggttttggttggtccccaaaggacgaacaatcattccgtgaatttgtaacaattctagactccaacatagcaaaaaaagaaaaaaatcattctctggttttggttgtccctcattttattttattttcaacatatacgaatacgatcaattaagaataaaaataacacacttcaagaaacacttaagaagaagccaagtcttccaacaggatttaaaaaataaaaaatttacattttcatggatgtatcttcaaccacaagtaaacgaccaaaccatgccactatccaaatctcaaccgcttagttgttgacgcggggtcacttactttggttccgcaccacgtagagtaccgatccaagcaggtggctgcatcccagtctgctcataaaccgtatcaagaaccggaggcaacatcttgtaaagtccagctatatccttcatagcattcccactaccaccaccctgttctccaccatggttccaaacactaatcttgggctgcaagtctctaaccgccatcgcattagtcttagcgatctcctgataaataccattgttaatcatcaagaagtccctaagacaagaatagtcattctgaacagcgtctaagagggttcttagataagtcccttgcgcactagctaaggcaacaagtccctctgcttctttctgctttgagtagaaagccgca

SEQ ID NO: 15987 - DNA, 1063 bp, Arabidopsis thaliana landsberg
gtatgttaagttcttgtaatgttgcgttgaagttatgttgcatgttcttgttattctctagttacgatgttttaagggtttttgttatgattctatgaagttatgtttctagttcttgttatcctctagttatgaagttgttcggtttaatgtggctatgcatattaaatgacaatatctagattttgaatatcctctagttatgaataatatacttatcaagtacttacattctaactttgaagtttctataaatgtaagtattaatgtcattgaattgactcaaaagaaagatttgtaatagatgtgacatgccctaataaatacactctcagtcggcgtaaaggtttataactttggttgcatcgtaaattgcaaatttagttatagacgtacatgtgtatctctatacgtacataaatctatttagtctaaaattgaacctaggtttataccggaaatattttatactttattcttatcaaataaacacagttaatggcctcttcttttaaaaccacctactatatgtaagtggaacgtctaacatttacttagttgtctcctcgccattagttctatatactgtaacatgtttactccacattacacattcctctaactacgacaaatataacctaaatacacaaacctccgttttatttggtaatggatgtctccacacccccaccagcagagatttatcttgccattcagttgccgaatccactcagcattcttttcaactacctacccgtttctttaactccaataaacacgctcagaagtctcgttaacacgctggagccgaccgctattaacatggatgagttcatgacgtggcttgatttcgtgttgccgaaaacacctttccaaccatatttcaccctcttgcttgaacggggagcaagtccggcgctttaccttgaaggagtccgtttagcttgcaacttcgtcaccgtagcacatggtataaccatgttgggatctatctctgccaccgacgcatatgcatgcttccttcatggtctgtttctaaccgcaactggcaacggacgggagt

SEQ ID NO: 15988 - DNA, 1058 bp, Arabidopsis thaliana landsberg
  unsure (1)..(1058): unsure at all n locations
cttgacgattccgagaaacacaaatttaaacacaaagacttgttctttgttgaacctgttgtttgacaattccgggaaacggtaatataaacacaaagacttgttcgtagttgaacttcttgtactagttgacgagctaatctcaatcatcattagtaggaggctgcaaccacctctccaagttgatgccaggcgtagctttgttattagtcttctttcggcgcttctcacctgtggatggaaaccgggtttcttgattccttcctgtttttagagtgtaatccggcgtttttgcgatcttctccacatagtgagcctgatgcggcaccacatgtatcgttctgtaatatgctaatgcccacgtctcgatcaagtaatattttgagcaaagaccatagatacttacattcaagatcgaacggttattccatcttagatcgctttatggttgcagctattgcatggacgcatgggtatttatctatatcaaaacatgtgcaagaacaagttatcttttccaagtccacgaaataagagaaaccatcttttcgatatacgatgtattcttgtcggaagctgtttagttcagttgcacttaactttgcagcaattggacaacagatgtgtaatatattcttcacaacaggcatcacttgtcttgtgnnnnnnnnnnnnnnnnnnnnnnnnnnntgtttgttgaaccactcagaaaacttctccaaaatcacatcgatcattagtaaaagatggtacttccttatttcctgaaaacacagcgttcattgactcaacagagttgctagtatctatgtcgtacttgtctccctcggaatagcacctagcccatttctcaagcccaattgacttatcgagatagttaggtactttaggatactttctcataaaatctccatacttaatgatgaactcagcctgattataaatatgagcacattccctagatttttcaatacctacatccttgtcacctgtcaaccatttcttaatgttttgagacaaatgtcatatacaatgttcatgtgatgcctttgggaaca

SEQ ID NO: 15989 - DNA, 2833 bp, Arabidopsis thaliana landsberg
ccacttgcagtttttggttgagagtactaccattcctccacatctctcctcacatattcgtgacgccttgtacatagatcgatatcataacatggaaatactagtcccaagggaatacatctctttctacgaacaagaagaaggtcatgatctgacgcttctcaagtttgcaaagctaagcttcaattattgtcgtttacattacatccaagagctcaaaactctcaccaaatatgctaatcaccatattatactactcttttctttacttttattaattgtataaggatgatcgggaagatcttctaaggaatatattgatctttccaccaccaaatacctagtaatatttgaagcttttttttttcttctttctagatggtggaaagatcaagatattccctctaagcttccttacgtgagggatagaattgtggagacctatttccctacattgggactatattttgagccacgattttcacttgagagaattataatagctaaaatgatcatcatcgtggtttctttgaatgacgtgtgtgattcatatgcaacttaccccgaagctaaaagtctcatagactctttgcaaatgtactactatatgcatccagttatcgttcgtttatgccttgtggatttatttattaattattttattacttttcttaaaacacttattttgtcttgaactaaaaacaatatttttatacgaaatggcaatattggacaggtgggatattgaagcgattgacgaattaccaaactattcgagaatagtcctctgattaatattagaaattataggagagattgaaagagaaatgaagcctcgaggaagatctgctagtgtacaacacacgatagatgaggtgattaatagaccaaaaaatatacataagtgctgtgaaaagagtaattatttttaattaagtttttttttttcttttcaaatgaaatccttagactaagagcttagggagagcgtacctagcattatcaaaatgggcaagtgaaggctatatgccaacctttgatgagtacatggaggttggggaggtcactggggggatggatggttttgctttgtacaactttatcgcgatggaagattgcgacgagaaaccattgtactaatggttcgacttcaagccaaaagtattacaagctttgagtgttctatatcgtataaacaacgacatagtcacctacgaggtattaaaccaaatgaaatattaagaggaataattaagactaggtcaatttgtacattctttttcgttgccatgtgacgtttgtcatgcatacttagaaattatatgggtatatatatacaatgtgcagagagagatgagaaaaggagaggtggtgaatggggtcaactcttacatgaatcaacacggtgttactaaagaagaagcggttgaagaattgagaaagatggctagagataactataagatagtcatggaggagttgttgacgataactgatgtgccacgaccagttttggtgcgatgcctcaatcttgcacgcttgttcgatgtgttttgcaagaatagtaatgatgaattcacctatccgcatggaaatctcaaagatctcatcacctctatattcatccatcctattcctgtttgatcatatcaccattttttggttatgctacttaaactcatctttttaaacctggtttttgttttttctttttccaaaataaacgatgaaatttgccaatacatttaattattttcatcaataattctccaaaaatttaaatttgacttcatttattaacaaattatgatgtatccaactaccaacaactctagtgagaaaatgtatgggaagtccctttttgccaaacactaaccccatatatcctctaaaagaacaaaagggaattttgatttaattttaattcgaacagtgtggattttacttgtatacccaaccaaaatccaatattacagtcaaaacctggatctcttcgacccacacccgacccatctctcccaaacgaatatttctctggatctattcggtttctctttcaaaacttcaagtttcgaaaacttttcgatttctcttccacccgttctcttccaaacgcctctcaatcgagactctcaatcctcttcgttctcttctcaacattctcaacattctcaacaagaaccctaatctctcttctcggaatcttattcttctccttcttctaaccctaattacaaccgtaaccctaactgcaaccctagagaatcctaatgccgcctctaaggaaaaaaactgggttaaagaggaggagaggaacgacggaggagccgacaacgaagccaatagatgggggaacgacggaggagccgagaacgacggaggagccatcatcgacggagaaaaatttgggaattgagggaggaggagttgaagaaccaatcccgaccataagtccggttttagaggcaatggaagaagagagtgaagaagaagagaaagaagaagaagagaacgaataagaagggaatggcgccggaggagactccttgtccgatgagaatatggaggatgagattgcagtggaaaatcgagtggaaaatccggcggctatggtaagtatttgaatgatgtgaaactggtaggacatgataatactattgtttctgggtaatgctgtcattacttggatataactatgtgtatgaattctgggtaacattggtagtactaagattggtattatgtgtatgatttctgggtaatattgtcattactaggaaataactatgcgtttctgggtaatactgtcattactaggaaataactaagtgta

SEQ ID NO: 15990 - DNA, 835 bp, Arabidopsis thaliana landsberg
caataacatcgtgccacacggcatatcgtaaccccctactttacaatcttctgatgagatgtgcgggactaacaagggcccagcgggatacaagcgcaacgtttcagagacaatgttctgaagataaggaaggtttggaatatctgattcttccaaaagcctgtccaagccaatttgattgtcgatttcatctctcgccttttttagtacttcaggattgttcaaaaggcttgataatgcccattccaatgttaccgctgatgtatcagtccccgcaagtataagagactgcacattgcacacatacacgaaataaaccaaatgtgaccattaacttaaatgctcttaggggattacttacaagcatggttcctttaatggtatggtctgtgtagtactcaggttgggatacttgcaaagaaagcaagtgatcaatcatcgtgttctccttcttctcctttgccacacgtttctcatcaaccaatctttggaaaaactcatcaagcctagcagcaatcttctttacccgcctctcgaaatctgtaatccatcgcaacatcggtaaatgatcagccgcatgtcctgcaccaaaacaactcatcgcctctgcgataagctgccgcacacgtttagcctcaggatcatcctctgcaccatctccatagtaacattttcccgtcaccattctaataatgttgttgaatgctaagttagataacattgaattcatctcagcctttgcaaattcctgcaaattcagtgacacaactcaaaaaaacatttaccgataaacagagactgaactagagattactattattatggcgaccaataa

SEQ ID NO: 15991 - DNA, 1826 bp, Arabidopsis thaliana landsberg
cagttggggttcaggttcaggagtagctacaacttcttccctgccactacgaacatcaaacttttgatttgctctttcatacacatctgcccagtccagtgagtcctcaacatcatcatcaacagacaatgaatcttctattcattataccctgacgtatacccatcaaggctgtcatattggaaagctccttcttcgctatccagaaattcgaccactgtaaatggcatttttcctttgcctttaacacgagccttttccgcttcaactctttctaaagcctctagctccctcagaacagcctcatcctaagagtagttggcaaagaaatcttcctcgcatcttccatcaatgttagtacacaaagatggcgtgcatgcatcagctagacttataatccccgccatatctaaatcatggcaaacatcagacacaggttcagtccacagagctttgtcgtgatgcctatttcctcaaacaagccactcccaagcaccatcaactgcttcaccatttgtctctgttgttggagcactaacagacttaaccattgccgactcaacatgaacgccctccacctcacttggaaagtatttccctacgccataatctacgtcaccattggtctcttttgttggagcagtaacaaactgaactacttgagctcaacacgaacgctctccagctcccttagaatgtatttggtagttccagaactttccccaagatcacgcccatcatattttcggatgtccccaccaacactgggctcaatagagaggcacaaattttaaatgggcctctgtctcctttacaagcaagaaacttttcagcgcgacaatgctatttaaagctactagaggccttttagacgttgaaaatatcaccagcttctctggaagccattaacttaagttagtaatccaagcatttgcatcgacatgaaactcaccagctacaaccgcttcgaactcttaaatgtcatatcataattaacgcatatgctcctagcaaatcgatcattttctatcacaaattcccactttctttgttgtgaacattctcactttccagctatggcaaaaactgtaacatcaacaccctgcaacaagcgataaaaaaaccccagcaataaacacttgaacttcatttaaaacgactagcaataaacaaaaaaccaaaccactaatctacattatcactgaagatcacatgatctacattcctaacaacttagaatctgctaataaatcaattatacaaccttattggcaattaattctattcaaccaaatatcaatcgagcaacagcgacttataaattctctattccaccatatattacctttcgtttcatcgattcttcggatctggtatgatctgtgaacaccgatagtaccacctttttcggatctgagaaactatgaagtttggctttttctttttcttaaatggtacactacacactaagactatccaccccacagtaacgactttcatttttatccacatatttcggtgcccttatcttctctgattcgcgcatctacagttgaacaagtcgcttcaaccgtcagaactaatttcgaattatgcagatcccgcttaatgcacagacaggtagaaaggtcaaatttcggtaacagaaatactctttttcgaagtacactggccaagtacctaaattcaaagtttttataaaaatgggcctatattaacaataatccgttctattatattgggcttgtccaacagaaaatatttggcgtatccggtcggttttttattgcaaccttaattgaccaataaaacattattgaaaaacg

SEQ ID NO: 15992 - DNA, 494 bp, Arabidopsis thaliana landsberg
  unsure (1)..(494): unsure at all n locations
agcggctattaaactgatggacgaactattggtcaattcaccaccatcaccatgacttttgcttgttatgataccgttagggttttaatagagtgttcgttaggtttccgtctaattaactctcatgcgagcatacatatatcaaactatttagcccgtttaagaaaaaacatattagatttcgcaaagtcttcagtttactaataaagcttcagtcatcatataactctaccaatgtaatggcaaatgtaaaatttgactatttaaccacccactatggactactgagagagaaatacatgaagtttacgtaaatttgaaaccgagtgatatatcacttgtgctatttgcatgttaatgtaatgatcctagtggatagagacgagttgtcaatgctagtgttgcaacaaatcagacgggacgacatcatcggtgcgaccttgagacttgggtttggcgaatcanaaagttgggctgtcaaatcaaagaaaagc

SEQ ID NO: 15993 - DNA, 3884 bp, Arabidopsis thaliana landsberg
tgagggaagttgtttacataagtgatatgaagcggttcggtacgaacttttcatgccaaatagtcccctggatgagtttttttaattaataattattaattcatttttaattaagaataatatataaaaattggattatctatgtcattaacccacatcaccaatctcactctcctcaaactcactttatttcccctcttctcctttttgtctccaaatccaagaaaagtctttagatctaataatctgcaacttgggtataacatggacagagatcttcaaattgcaggaatgggctggatcttcctaaacctcacagccacaacgcttgccatagggtcccaaatcaaaagcttcgtcagatatactcgcaacctcgctcacaaaaaacgtcatcaaaaatcaaaaccccaatcaaagagatatatagaattctacatgattcgttacaggtttgagttaaaatcaagaatagctacttttttactttgattttacatgtctctcatttagtcttcctctcgatcgatctctttggagatatttctacttctatctatgttttgattcatacggctttgttgactagtgattgttctacttctatctatgttttgattcatacggtttagtcttcctcctacgtatccctcaaacatattcttacgtttcttaatttgattgttgttatttggccaataaatttcatattgtcttccccagaaaaatgttgcttttccatttgtattataaatcagccgtaaagtgatgtaactcagccgtaacgtgatgtaactcagccgtaacatataatttacacaacctttcgtcttccctgaatgataactcagttgtgacatgtaatttaccgaacctttcgtctttcctgaagcatataactcagccgtaacatataatttacactcatctttcgtttgcccttgaacatataactcagccgtgacatgtaaatttatagatgtcttcccttaaacatataactcatctgtaatgtaattttaccgaacctttcgtcttccctggaacatataactcagccgtgacatgtaaattgattgaacgtttcgttctcccttaagcatataactcaaccgtaatgtaattctatcgaacctttcgtctttcctggaacgtataactcagtcgtgacatgtaaattgactgaacctttcgtcttcccttaagcatataactcagccgtgacatgtaaatttgtcgcgaaacaataagagatacaacatttcgtctaactttatcatcgagcaccaacttcacaagtttgtcgtgcgttgttttcgcatctatctgcacaagtttacaccctttttcatcagtgttaaatatgtatttgtgtttctatacccaattcccggaaacaacaattaccgaaaccagatcaaccatatcgggagaaagatgaaagaaattgaagaaaaatgaggaaaacgatgaagaattagaagttccggtgatgtgaaaaactcaagtgaagaagacgagttgaaaaaatttgactctattttttttgtcctttgatgatgctaacatggaatgatgacatggaatattacagccgacgtcgttttgaattgatgaggtggcaactaagccaccaaacaaacatttgataactcagccatcaagcaaatctataagtcagtcgcaacatgaatactattacagtaattaaaaaaggaaaaaaaacaaagttaagtcagccgtataatgtcgtaactcaactaactcagcagtaacgttttaaaattcggccgtaactgcatgatattatagtaattaatcttttgcacataagtcaaccgtaacaaggctgagttatatcgtaatccagctctttacggctgatttatatcactcgaccataactcagccgtcacatctttccataactaagccgtccaaaaatataactcgaccgtgtcgaggaaataagtcagccattttctcataactcagccatattgttggctgggttatcgtataacttcttataactcggccgaacattccttaactcagccataccgttgcttgagttatagtataactcagacaacatttttcaactcagccgtaacgtctggctgagttatactcatacttcgccgttttgttatagttcatatgtttttgtaataagtcagccgcaacataccgtaactcagtcattactcccgttgtatcgcgttacggctgagttcatttaatccacgtcatcaatttctgacgtgacagtggcattccctataattacgtttagtagaggcacactgagtattaaaaatatgactgtaattaaaaaaagttatgttctggtaataacacctaatttgtactccatcacaatacatctctcatgaaattaagtaaaataaattatagtgaaaaaattattagaagtgaaatagatgattaggttactcgtgaaacactacatatttctttcttcttcttccccgacttgagtttttcggcgatgggagacgagcagctggcgattgtgatggccgatcgtgaaagagatcgagaactttgattcgcttcgctgattccggcaacaaagacgatggttagtcgttttctcatttcaagattcatgtgaaatgaacagtagctttggatctggaattggattgtgatcttatgctttaactattttctgcaaactttaagtttgttcattaagggtttggcatcgaagaagttcatgaaaggctggtaagcaaaagtatcaactttgcatttgatcaagttgtcacagattcatgatttgtgctcatagtttgaaatctcaactgctttttgcatataaaactctcaattcaattaccatattcctctttctctctcagattactggcagctctagcgcgatttttaaatcagatcatcccgccatgacctcacaagcttgtctcttcagaatcagctcaaaggtatacacaaaaccacacgaatctttaacaaatctgtttgttgttgttctttgttattaaattcgatttgttttcggatttgttcagatctttattattagcatcatgtcgatggattctctctgctagtctttttttctgatatattgtccgttatttctgatatatctctgaatctgtttaagtagttatgatgtgaaggggctagatttggatttacttcctgtgagtgatttatatccacgtacttaactgttcttgtgaattttattgtcttatgttctaacgtttgtagttttggtcatatgcttttgtgcggttcagcagacaggaaagaggcgttaaagattaagtgcaaacaacgactctgtgatcacaactccacaccaagattctcttacatcgcactcgtcgctcctgcactcgtagtttctgtgaatagccaatgaagagtaaagttcaattatgtgtgtcgtgtttagtaatttgacttgaaaaaagagtttgctagggtctcttgtgaacaagctgttatgtctgcaattcgtgagttttggttaattttggatttgtacttcttgcaatggctgccctcaaaccattgattaatgtattatataggtggtgtggttaatgatcctctttagtttattcgatttttttttatcatattgcttctatttttgtattgaattgaaaaacttgattgcaggagctctgatgtcaagcatctctacaagaaagaagaatgggttcttatcatataaatatgtgcaatggagaaaatacaacacgtttggatggtcaactctatgaatctgataatcaaataaatttcaagcttcttaattcttttagtgtgatggaatgtaaaatactaattagttaatttcttcttgttcgtgcaag

SEQ ID NO: 15994 - DNA, 804 bp, Arabidopsis thaliana landsberg
tcactccggcagaagagcttccgaacgtgaagacttgttcggtccgcggaatcacttatccgaacgcgagttacttatcgcagaaggtgatgagtgaggtatctgtatcccggaggcgtaggagtccctcggctcggtcagccttggctgcttacgtgtactccgtcattttcaggatccgctttcgaagtagtcaaaaagcacgaaagacgttctggcagaaaggatccttttttttcgaggaaaaaattcgacgcagagggggttcccccttttagcccccgagggagggtcgggctttgcgaggcgaggcgacccttccttgatgactaaactttgcgtgggagcgaggtatataaacaacttgaaaacatcttaagggtagaagcgacgtagctgttggatgttccaagcgttgctgtagacctcgccttgactgttggccagcttgtacgttccgggctttagaactttggcgatgatgaacggcccctcctaggaaggagtaagcttgtgtcgcactcgggcatcttgtcgcagccgaagcaccaagtctcccacttggaagcctcggggccgaaccttcgggcgtggtagcgtcgcagagactgctgataccacgccaagtgtagtaaggccatgtcccgagcctcttccagctggtccaaggaatcttctcggatggtctggttgcctcggtcgtcgtacgcctttgtcctcggggaaccgtatttcaagtccgtgggtaagatagcctcggccccatagactaggaaaaacgggggatcctctatctagagtcga

SEQ ID NO: 15995 - DNA, 507 bp, Arabidopsis thaliana landsberg
tggagtcttagttgcatagaccgagcgcactaagtaatcttagattacgtatgactccattttgttttgtaggaaaccttagtgggaaccattagagggatgctcaggacgtaggaaagccggtatagagtttgttgctttttgcaaaacttaataattatgatttttgttggatttgagagtgtatgctcaaggggccattgttgaaacattttggatacttggttgtctgagaaatttatatattataaaagattattttcatataaagagtgtgtttcatgcgatattagtcttgtccggactgacataactcacggtcatggcaagggttgacaagcctaaaccgcgttcgtgagggatgttcatgtggataatctggctaagggtctaaagccatttggaacctaagttgggttgtccgtgttagctatcaatgtggcgtttccgggttgccttggcttgtctggccatagagcgattcgggggcgttataggcagccccca

SEQ ID NO: 15996 - DNA, 1640 bp, Arabidopsis thaliana landsberg
taacatgtctgattgtgaaattctgattgatagggccatggttaaatcgtatgatatatctatcgccagaattgatcaagatatttattactgggctacaaaattccgaaaatttgaatttagcttcccgaaaaaagttgtaataaagcagcacccttgttagctaaaaagggatgtcgatctagttgttatttttctgattgtatgtacccgccattatggctcagtgaacaattgtatcatgacgttttaaattaataaaattctcttttagatgaaaaaaatatgtcacctgttataaatattttaaatatatccatttaaaaaatcaaattagaggactaagatttaaaattttgatttattaaataattgtgatattatttaaaaatattaaattacaatatttataaattttcaaaaaaatttattttattattgtggtatataatattatttcaaaagacaattgtacgaaatcgaatataaattttggtccgtcagtcagttaaaaattttgttgaatttattttctttaagaatatatattacctaagtccgaaaatctatttatttttatattttatggatgatatgatgatctatgttttttataaaaataaaataataaaaagatgtgagatgaaatataataattaataacaaattaatatggtaagttagattaaaaatcttatatgtttattttgattggttatttaaaaaaaattaagaatgcattttcgttttatttaagtaaatttaattcattaagttgcataaaaaaatatttgacttgtttactgaggtgagttaaattactttttgaaatttgtttctaatgacatccatatgaaatatcttacaaatgaaaggttattttaaattatatacttctcaaataatattatacgataaaatcttaaaaattataatttagctaatcaagatatataacatacttacaaatccctaaacatgctcttaaaaaatctttaggggctgttagtggattgaggtttttaatggacttgaactgattttaatatagtttaactttctcattgtgtgttcttaagatcaattttttaaaaaacaaaagtgtataaaacgtgagttttttcttcttttaagtcactcactaatttaaaatcctatagcatgtaaaagtagcaaactgcaaactcgatatcccaagtcccaaccaaaaattgacccgacccgattcctaaacttgacccaaaattgaagctgaaatcaaaacatacaaataattggaaaagttggaaatcggtttaaaatcagaacggagaagtaaataaaattcagaacattttctttggttgactttcttgctctctcgatgggaaagcttcaacatggatctcatgaatgcgagttgacctcgcggggaatcgtcgcaaatgggatctgcaacatttgcttcaaagatgaacttgttgaattcgcatgtgacccttgtaatttcgatctctgcaaaacttgctcagatcttccccagaaaatgtctcaccatcttcatccggagcacccgctagagtttcgtattggcaaagttgatcgggaaaccaaatacatggtgtgcgtcgggtgcggaaacatgtcttctggaacctact

SEQ ID NO: 15997 - DNA, 554 bp, Arabidopsis thaliana landsberg
  unsure (1)..(554): unsure at all n locations
ttttagacaattcacacacattccaaatcctcaatttgaattttaaaacgacagaaaacaaaaattaataggcaacaattttgatttagtacaaaataattccgttggaggaatttcagttgatacttaagtaaaagatcatgcatgtgttagattttaatgcaattttattaaaaaagcaccttgaaaacttttaatagtatggacgacttaccatttacttacgattatgaacatagcaaacagttagacggattatgttgaatgttgatcgtctgatcaccatacaatgtagatttcttacacctaataacacgactgtactatgtagcaataaacgtctgaacagtaggtgacaatccatcaactcatttggacatccattatcaaaactaaatatatgtaaagcagactaaatattggactaactaattttactaaaatattcacctaaactaattacactgaaagctagganatacatcttaattatatatatatacgtctatatttattttgtttataaaataactatgatatgttacaaacaatat

SEQ ID NO: 15998 - DNA, 569 bp, Arabidopsis thaliana landsberg
ccccttagcatgttatacttgtacattctttttttgttctttctttaatactatgaagtaattggaatctgtgattttgcaggctgagaaggctaggaagagaatggtttctagtgaaaatagattggcttagtcgaaggatgtttctgagagctatctcaaactatttttgtaggtcttgagcaaattttcatgtatggtatattaatgtgttaaaaaaatgttcttacaaaataatttatatgtatgattttttctcagcctatctttttcactatgttgtgtaacttgtaagtgtataatcatcatttatccataaacatgcttttcttaattttttcacatgtcattcccaataaatttattttatggtatttgtgactataaccacaatcttctaccaataaatcttagtgaaccctttccgagagagcttttaggctcataatacaatactattcagattttgaaactcggaccttcacgacaaatctctgacgaaactttggattctacttgagagcggctgtcacttttagtttcaacacaaatgatttctaaaactgtgt

SEQ ID NO: 15999 - DNA, 2012 bp, Arabidopsis thaliana landsberg
taaaattagggtgaattaactaaataactaaaatctggaaagaaattaaataagtagcaccataagttgtagaatgcagagagtaacgcatctgtggtgtgaagttacaacacaatccctaacacaacgttgtgtgattgcttagacgtgcgtgaggggaaaaggaagatgaattctttcagctgacgtgggcgctggtaaagctagtaaaaaaaatttcatagcaccgctttacaattgtccgatcactaacatagcctgcagtgtataagattaatttgaataaaatactccccccaaaaatatgagaggagaatatgctctgcttttctattattgacagttaatgttgtaccttttacgcaaagatctcaaactgtaaacataacaatatggatggtggtgcaaaatagttcagcagttaataaggagaatccaacggaaaaggtacaaaaccatcgctttccagtttgtgtttttactttctgcagattccatttaatattcaaccctttccatgtcaaagcagttactttcccttttcgaatcaagtactttccgtgatcgtagatctgataaacaagttgttaatattttctaaaaatcgaccatgcttaactgtttctgaatatttgaccattattactaaccatatttaaagaatagacttactgatataggaaatgtctgaatatttgtctaggtttatatttactctttgtttcttttctctttaacctaatgaactcttcacatactccatgtagacggcagcacaagatgaggtattgctggtaattggcaagtgggtgagagttgataatatggcctggcagtttgaacctaagactgtggaaggatcgtcttacatacgtctccgggccaacatgacgtacaaggagctagttcagaaggttaaagagaagttttctttctgtgcaagagacataactataaaattggcttaccaatatccagagtggatggcaatcgatgaagaaaacgggtctcctcctcaatacatcagtgaagacggtgatgtgacaatgttcatccaaatgagacgtcatattgtagaggtcaatctctgtgttactgtcgtccaacattccatgccagtttctcctgttgatgttgcgtgccatgacttcaattctaacagtgaggacacagattatgactctgaagaagaactagaccaatttgcacttgaaagtgccttggtgggtgcaacgcaagacccaactccgggtggaacatagccagctcaaagaagtggtacaaggagggaacttttccctacaggaggcataactattagagagcctgaagactgcattcgtcttaagagcccagaatgtggacctacggacaaagggaaaggaataatggaaacaagtgctaaggcaacgactgctggtcctagtaggcaaagtgtgacagaagacaacgacaatgaagatgatttgcttatcgtcccattcacaatgctacataatttgccagctttcaccattccagaaaatgttgatgttgaaggcgttgattcatgtctctcctattacaaatgatgtggaagaaactgcaattcaaaggcataacattcttttttgggggcgggcacaagaagcattaaacaccatcctctctgatttcagtgatgatccaatcctattcggtcgagacgccccaccagtatttaatgatggaaaaggtgaaggtatatcctgaaatccgtctataaatatataagtgctttactgattcatctgaatgcattggaatttgatagttcatttaaatattttatgttttctataccattcagtgtataaatattggttctatttcagtagcgtatttcatacatgtgctgaatgatgttcattgtgtttcaggggtaaactctgcattctttgatgttaaatatgaaggagtcaagcggtttgttggcagagtatttaagtccaagtctgattgcaagattaagatagctatacacgtcatcaacc

SEQ ID NO: 16000 - DNA, 853 bp, Arabidopsis thaliana landsberg
  unsure (1)..(853): unsure at all n locations
acaattgatatccttgtagctttcttccgggctaccttttaaatcataaatcgcatgatatttcttccttagcgctgtcaagtatgatactttcacacctaattttgtctgaactagctccatgataatccttggaaccagagtttccaactgtcccggaaaatgatcatgaaggagagctgcgactaattgtgggttgcctttctttttcctgagcctactactacctttacttagtcgagtgcaattatgcatcttattgtaccttctaatcgagaatatatcaatattactgatattggacgctcgtaaacgccaagaacaactttctttggaacactttaggacatagcgctccttatccgacttcttaatcacataacctaaactgttagcaaatgcagctccatccaccacctcgtgcaatgccaccttgtttggaaattcttgacgtaaggtcaacccaattccgtcttctcattcttttttaaacataccaggttctacagcaggtggcgactcaacatactgttcccccctatcagaattatctatagactcatcatagtgtgtttcatcttcttgagtcacgtgatcctcctccactattgcctcaagttgttgttgagttccttgttcctcttctcataagacgatgagtgcaccatcatccactctcatttcatcctcctctgaattcaactccgtatagttcttaccaacagaacttttannnnnnnnnnnnnnnnnnnnnnnnnnnattttgggcaattgctcgggcggtttagagatctcctccagaaccaaaacacttctccggttattttttgcggatgttaaataacaaagacat

SEQ ID NO: 16001 - DNA, 527 bp, Arabidopsis thaliana landsberg
ttgatccaaggatcatcccagataaaggtagaagacccattacctattactttccccaaatgcgattataatagctccttgcctatgcagattccacaccacccatgagaggtagaggttggaacagagctctcaaggaaaggcgtggtatggtagtatttacccgagagtgttctagcaagaaggcttgttgggtttgagagtattctccaactgacctttgcaagcagcgcatcattaaagcactgtatgtctcgaaaccccaatcctaccacacctttaggttgtgtaagtttttgccacgaaacccaacacattttatttttgtccatgcttgaatcccactagaaacgtgttaaagcggactgaatacgtttgtacatagagtttgggagtttgaagcatgacatagtataggttggcatggctgctaaacctgactctaacatgatcattttgcctgcagtagagaggaatttggaagaccagctacaagctcgctatcggatcctatcaataactagagc

SEQ ID NO: 16002 - DNA, 4180 bp, Arabidopsis thaliana landsberg
agttgaaaatttgagagcttgaaatagagaaaaatgcttgaatacataaactaaaaaacaaaaaaggaccaaagagactcaacaatatgtcccaaacaaaaccgttgaaaagattgaagccatttggtgaacacgaccacgagatttttatcgtacacgatgctctaaattaagacccatcaccaagaatcatataagaacaaaagactatggcttacattaatatagatcacacagtcacacagctacgatccacaatcccaaacaagatcagttggagaaattttatgttttaaatagtaaacaacaaaattcgattttcgtgatttctccttccctacgagtatatgtatgtaaaatcacgtgaaaagtaagatcaacaatacaatgaaatccaaaaagatcatggaaacaaacaaacaaacaaaaacccaaaatggatgtccccactatcaaactgtctctttatcacttgatgaaaataaaacagagaaaaaacataaaaccgatctttacgaaaggaaaattccaacataaccttaaaaataaataatatttaacttattatatttgatcaaagatgttaattttaatagaatgaaaataaatatgtttgagagtaaggacaaaaagttaccaagaaaagcggaagcgttgactggagtagatgtcttgggatgaaccttagcaaaccaaatggggacaactcttgaccgtccgatgaagcaacatgtaccgagcctgacccaacatggctactatcaacgacgttaatatcccgaaacttgctccaatcccaaccactctcgtcacccattcccatccttccgatttactaaacgccgccgaatacggtgcctccgcatctatctgcttacgtacacacaaccacaccaaatcattcacccacaaaacccatagaaaaaagcttaaattaaaaatgtgtatttgatggtacggaccagatcgtacgggagaagcattgacatagagatagccattaaacagtaaagtacaatgacgattgcgactgagccagagattcccattggtatgtctttgactgggtcttttacttcttcagccattgtcgaaacggcgtcgtatcctatgtaacttagataaaccattgctgctccgttaaacacacccgaaactccaaacgggaagaatccggatgggttttccgggttatcgggtcgggttaaattctttacgtctcctttcgagaaacccatgacgatcacgaatactataaatgcaatgtgtaacgccgataataccatattcaccttcgaactctctctcgtactgtaacagatgacgaacgtgacggcgaggacgacgataacggcgatgggatcgatttcgttgaatccgtttgggagacgggagacgatgaatctccactccgatggtgagattccgaatgcagatccgagataagcggtgaatcctcttgaaacggcggcgtttgacagtacgtagtccattatcagatttgctccggttataaacgccggaaactcgcctgtaacggaaaaaaatgaatgatcggagaggaaaaaatgaaatttgaatttctctgcgatttgggagttttgattttggcgggagaatgttactgaccgaatgtgatacggatgtagctgaaagcaccgccggcgacggggaggtgaacggcgaactcggtgtaacagaaggcggagagtagagcacagagtccggcgattgcgtaagagacgacgattgatggaccagcgtagagacgactagcacggccggtggtgacgaagactccggctccgatcattccaccgattccgagtccgatgagatcgtaccaacggagagtacgacgcatctgctcgccggagacggcgcggacgcggctcatctcgtcgtaagaggtggaaacggaaacggctcggcgggaaaaacgggagggagtgtcggagagagagttgaggtagacacggaggctagagaaagaggtgtctccgtcgtggttccggtattgggcctccatttcgggtcgggtcaatatgtaacggattataatgtttttgagagtaatttgaaacaagtggttttataatgtgagattgcaaaagactgagagacgaaaaaaagaattagacgctttttggtgtaatttattacaagctttggaaacgctaattattattattattttggtcaacttagttttattatattaaagtagcttctatttttttgtattcataatgatcagtgatcacataagcatcgactaaaataaataaatcacgtaagcattaacacaaatattctataatctgttcggtctcccaatttttattatttgagtttagacggcaaatatttaattcctagtataaataatgaatgcttatttttccttcgacaatggtcgataataatcacaacttgtttgtttaacgaatgcaaccaacgaacatggataaaaatgttactcttttaagtatcagagtgaccaaccagtaaccgggatcgttgcaatccgtcgcaatattcacaacttggtgaataattatgattgattattctccttttcgtgtgaagagagtttgaaaaaataaacaattttttgtttctttcatgttaatgaaagttcttaatgtctgagagttttgactatttattttatttgtgtggtattaggtctataatcttttgtatgttaagtttttaatttttaacacgtgtgaaaacataaatttgtttatacacgtgttataatctaattagctgtaacacgtatcataattctgattgctaacacgtgtgaaaataaaaatttatttgtacacgtatcataatctaattggctaaaatcgtcaatattataaaacaaatttaataaaaaggatataggaaactaaatgaatgacaataaatcagtagaaagaaataaaataaagactttgtatgcaatatagcaaaatctgaaataaaatttaccctttgaatataagaaaaaggaaggaaacttaatacaccccaatttgagagaagagaagccatatattttttgttacttgagttgatttataagctgccatatcccttacatgagttattatatatactgtagttctccagattcacaccattctgttttgtagacttcattttccttaatttgttttgggaatcatggctgaaaattcatggacgacagaggagaacgagatgttcaaggatgcactggtgatgttcactgcctttttgcttactcggtttgagagtgtcgccgagtatgtggatagatcggtggatgatgttaaggagcattacaaggaattggtcaatgatcttttagagatgggatccagtcgagtagcttttcctaatgaattgactaaggatatggctcaaagttcgtaccaggccgagagaactatatggaccaaagaaacacatgagtaagtatataagattaatgagtgatgagttatgatttttgttagttagtggaatttacatacacgtataagtttcaattataaacataatgattgattagtactggtattggtttgtggatctagctagacgcattctcctcttagactccataattcacatagttcatttctgagattaaaatgtatttagtcctatgatcttacgatttacacattctagcattatttttttaatgtggacaatatagtttttttttttttttcatttgactcaattcatatcgttaactaataatgccatggtgaagcttgattaaaatgggctgatctatgaactggtggaaattgtaatgcagatggtttctgattgggttagaccgatttgggaaagattggcgtaaaatagccgtcttattggattgcaagagcccgatccaagtcgagatatatgcagaaaacttttaccagtggcaaagctcaaagaaaaatgtgattaacgacttaaatgtggcaagcaccgatgtgaatgtgatgaaacggcagggagcaaataacaccaatgtggactcaacaggccaacaagagagtctcgtcgctctggaaatcggtcaccatgctaaggcccccaactcaaagtgatataaatctctatgactgtattaacaaccaaaaaaaaaaaaaaataaagatattgaaggcccttgattattttttttgggtggtat

SEQ ID NO: 16003 - DNA, 3007 bp, Arabidopsis thaliana landsberg
tatcttctttactaattacaattatctatagagaacagagaaaaacagagatgggctattttgatatgagaagagaagtctccaaactctattaagtaccaaaatcaaaacttgtactgacagacaaatacagaaacagaaacacagtcatggaatcctctactggaaacttgttattaccagtgacctcttccttgtcctcttcctcgaccacctccacgtcttccccaacctcggtttccgcctctaccagctccataggatgatatcccctcaaaggccttgttcacaagctggttttgcatagtacccggcccacgtcccttctttgctgcaacattgttaccacttccattgttgctattagcaggccgctttcctctgtatattattgcaaaggtacaacaaattacaaatagatataagacaacagaaagattgtggattgagtaaactttgcacaaacccaattgttgttgttgttgttgaggctaacggctttgtggcttctttccaagacaggttgagattagtgtctcccataaaaggtggcacttttgcatgcaatggctgtttcatatcaaaatttacttcaagtttagtttatatcatcatcataactatatgcttccaccaaaaaaaggacaaaaaaggggaaagacaagtttctgggatttttacctttgtcatagccaatatgttattacaggtcctaagtccagttgtagtgttctgcctcttggttttctgaaataataaaatcacaaaggtgaattagtcatgaaaacaaatagcactgggaaaaaaagaagagagttagaggttactgtacttacaatgctcgccttctcttcatctgtcttagcagccaacatggctttgttgtgctcagtcattccctaagttaatttcttcatcgttgccttggttagatcctcaacaatggttaatctgcaccaatggttggcaaatcacaaaaacaaaaaactttatgataccaagaactctcctacctcttattaatctagattgccaaagttcttctactctaaatgacagtatactgaagtttctaggtgcaaaaatttgaatgtcatatcaaagaattaacaatacctttcagtgaagtctttgttcaactctgagaagtcctcccccaatctgtctgatggctggccggtcacaatcttgtacccacacaagctgtttgtagcatttggaacctatatatgttcaacataatcagataagtaaaacaaggaagaaaaaaaaaagaacgcgataaatcacaaaataagatcttgttggcaaccttgtgggcaaggtgatgaaacgcatacaacaaacactcgacgtatgtgaagttcatttcctctccagtctttctggcaggcatgtatatctaaaaacaaagtgtgtaacagtcatcatcagaccacatgtaaagcttttacattcataagtgtatgactgcagtaggatatatacaatataagcaaggatgtccacaaactatttctcaaaggactcatgacatgctgacacttaaaagaggtacctttaaaagctcaacgattgaaggaagcagctgccttgcttcctgagcagttgtgtatggagaaatatcagcaagcgctttgagcaaatcaagtttcctctcttctgggagctatttaagaagaaaaaattggaattattatggtggccaagaaagctccctttttggagagatgcggatatttacatgcaagaaggcaaaagagaaacaagcaaaaatacctaaaaatatggattaaataaacgttgcaataaattagcattttacttcatatcattggtgtcataaactattcttaattatgtctaagagagtagataacagatgcctaaaagaacacacagggatcatgtgctgatatgaaacacaagtatgaaaacaaagcaatgaaattcacgataccttgtcaaaaacaggtatgatatgtttgttcaaatagataagaaacctgctgcttggagcacctctctgttcagaggaacgcaaagttagtaagacaaccagtcaagtttatagaatggactctatctagctactagcagcacttattctgagttcgtaccgcaaaaaagggaagagccagttgcaggcatgatatcaacctgtcgatatggtctgtatctgaaaactgggaaaaacaatatttattatcaggagtaataccacagtacatggataatctcatataaatttggctgtccaatcttatacttcaaactattatactcaccatatgggatacagagaaatctaagattgagtgttcacatggtaatcagagcagacactatcaagtttgtataactcattatggtaatactatcatttttaacaattttatgcatttccttgaattcaaaccaaggacaaaccaaggaccacagaatatactggagttgaagggaaattaacatcactcaagagaaacaatgcagacgggggtacatatattaaagctttttgtcaacaggatggagtttgtacaaggatgaacatacactgctgccacggaacatgtcaaacagaatagtgatatgcaactatagagaacatcgatacacagcaggaagtagtatcatttcaagcaatcaagaaatttaggttcatcttcgggatgatgcaacacaaccaacaaacaccaaattgcatgatcatacaactaacttacttcaaattgtgcatttaaatccgcctgtccttcgataatttccacaagttcttgcattctttctggaggagctttgcctccaaatatactcaaacttgtcaggaaatccataaacattttaaactctcctccagttacatcttctaggctctgcgaaaatccaaataaagtcagaataaatggcaacaaaataagaaggcaaatggaagaaacaaaaggaactgcacacacacaagataatggccttacctgttgatcaaatctgttatatgtctgtccat

SEQ ID NO: 16004 - DNA, 3574 bp, Arabidopsis thaliana landsberg
gacaaatacggtaactttccttctcgtgcccatctcacgatatccgtgggtagaacaaggcgctcccgcgttggtgacaagcaaggaaagatatcaccaaagaactcgataaaggcatagtctttttaagtataccaaaccatatcgtcactgctcttttaccatctatgttacgcggctcagctttgtgtcttttaagcctcttagcatcttttacttcacctgcaatgcgggacaccaaaaagagtgaaacttagaaacaaatagaatcacaccaaaaaagacaacattgtcaatagatttctaccatcttctgactgatgctcggaatcacgaatggcgttactggcccaatctttatggtagacgccagagagagccacgaaacgtaaagagataggtccaaccaaaccaataatcaaaggagtgacattaaacttgtcaaccaaagcatcacactgataagtgatcatcataagaaaagctttaacatatctatctcttgcttcatcgtaataattctcataactcaaagtctctgctgcaaaatccacaggctccgttggctctttatcgacgtaactgtcaggcgctctcttcacttcccggggcaattccttattcccgttttcagattcaaactgagatttaaactgagagtaacggcttgtgtcatctgtaaaacgaggctgtgaaggagtgattggttgtggttcagtccggcgatgtttggggttatacagagcgccctgagtacctccaccttcaccgattaaatcgccgtcgtcgacgccggtttggatcagattttcaacctgaacaccgcatcgttggcagtagtaatatccgtcgtcttcttcgtcaaaggtgtcgttttcgcactctgtgcagatcatcgtaattgaagagactagaaagaaactttgggaaggataaatgaaaccctaaaccctaaacttcgtcaagagatgatccctcaaatcagattgatgaagacgaagaggaagtgaaggaggaggagaagctttggcctttgggggtttagcatttggcggcggaagagttaaattaggaggggttttgatatttgcaaaaaagcccctaaattgttttattgttctattttgttctatttctagcctctcaacccgtgaaaagagtttttttttttttttggtgaatcaccggggaaaaaccccgaaatttattaaaaaacaaacagaaaaattacaaacgaactcgttttaggcgcgcagacccgtcattatcctcgttcaaaagcatatcaagagaaatcgggatctcatcaaaaacatgaagacccaacgacaaagaaaacgcatggttagctaaaccgtctgcaagactattagctttccaatatacgtgagatatacggactgtccagtcctttgataaaaagtcatggcacaaacgtaccaagaaagacaagggatgagtctcacctatccctgtcttgaggaaacctaccaccacctccgaatccacttccagctccaagtgtgtaagttgtttagcccaagctatatacaacccataatacacaccccacagttctgctagcggtgccgaacaccgcccaatgttaaccgcaaagcctccacaccatgcacccgcactgttcctcaacactcttccggctgaagctaaacccgggttcccacgtgaagctccatctgtattgatcttgtaccatccctccataggaggtgtccaacgtatcggtttgttcactcttaaccccgacgacctgagctcgactacccgcgagtaagctatcgacacctccgcagctaggtcttttatgaagcgcacccgatcacggcatgttttattctccccaaaaatattgctacaccgccatttccaaccccaccaaaccgccatagcaaacatcgtcgaccagtcactaccctctgccataagaccttgccttagattcgagtagagtcactccaataaggacatagtgaagaacgactgctgcaatctccttggtacaatacgatcccatatgcccgacatagcgggacaatccctaagaacatgtaggattgattctatgcctcctcgacaaacttgacaaacatcagaattacacaaatgccttctcttacgctcggagttcgtcataattgcttggttcactatcaaccaaagaaaaacccgtacccgttccggtgcctggactttccacacacgcccatataaactactcatatcctgcctcggagaatcatcattagtcaacaatgcaactgctgatttgactgtgaaacgcccatttgaagtcattccccaagctaaacgatcatgtgcacctgtgacactatctactatcacagccaatagatcaagacgcttattttcagtcacaaaaggtgctatttgtgacatgtcccagcctgtcccatctctccataagtctcgggccgtacacaacatctgagccggggaaagaggtacaatagagtcatcagcaataggcgtttcagacaaccacctatccgtccagaacctgatctgtctcccatctccaattacccagtgctgtccccgccaaataacgtcccgtaaacccactcgtacacttctccaggttgaggaccagttactctttgctacagtccaatttcgatcatgaacatctcctactttgtacttactcctcacgacttgtgcccaaagacttgaaccatcatttaaaactctccaacctactttagctatcaacgccttattcatcgctgtggctgaacgaatgcctaaaccaccatccctccttagtaagcacacacgagtccaggcaactaaatgttgtttcttcttttccagagtacttccccaaagaaaggctcgagacaccttgtccaaaccatctaacgtcgactgtggcagtttaatagtactcatggtgtgcactgggattgacgtcaaaactgccttggtgagtgtgagccgccctgcgaagctcaacatacgacctttccagcctggtaatctcgacgaaactctttcaataacttccccaaatgtctctttgttaatccgtttctgcagaattggcacccctaaatacttgcccaagtccttcgttgctttcataccgctctcctcgctgatccgcttccccaaatcccgcgaaatatttttagagaagtaaattttttacttctctaaactgactttttgacccgaagcgccgcagaatttctctaaaactcctctaagcacccggatttggtcaacagaagcttcagcgaaaaggattaggtcatcagcaaaacatatatgtgataatcttggagcggactgagatatctttatcggtttccattttttttctgcaatagaacttttaatcagatgacacaaccgttctatacacaacacaaaaagatacggcgacagtgggtctccctgtcgcagcccacgcaacggtttaaaggcatccgtcttctcaccattccatagcaatctcatagagggaccttccacacatttcatgatccattgaacccaagttcctggcaggcctgcaacttttaaagta

SEQ ID NO: 16005 - DNA, 872 bp, Arabidopsis thaliana landsberg
cgcccacggcgtagaagggtaacaacggcccatgctctctgcaccccaacggtcgccacagcgccgcggagtgtcgcgagatcattgatctccaaaatgtgtcaacaaacggcggactgtcctccaaggacggctccccacctcgtcgccgacctggcaaggaaaaggtcgacgacggcgaggtggccgcagctgaacgggacctcgggtatcagtcacctgagggggacctgaaggatgtcttcaccggaggctcctactccgtggagacaactagacggatccccagagggaccctatgctccccggtctgcggggctggagcctgccttcccccggaaacccatctggattccccacggttccagacttccgacaggttcatgcaggaatggccatagccaaagacgagggctcctcgtcaaacgcagatggggacccagggtcgagacctaatcttacagtaagtacctgtcggcgtttcgagaccggggggtccctgggccgacgagtgaaatgtcgccgcgtgccccagctcagatgggtcgagcgcgagggcgagcgcgaaggggggagagcgaggccgccggagaccggcgtgagagaggtgggaatcccgtggccttcatgttcgtcccgcgcccaggtcgggtgcgcttgcagtagggggttacaagcgtccacgcgtgagagggagcgagcggctgcaagcgagcgcctgtctcgtcctcgtccccgcgcggccaaccctctctaagagggccctggtccttccttttataggcgtaaggaggggatccaggtgtacaatggggggtgtagcagagtgctacgtgtctagcggaggagagtgcgccctaagtactaacaca

SEQ ID NO: 16006 - DNA, 495 bp, Arabidopsis thaliana landsberg
catgcagcgcaacatgagttcaactgattctccaagcagaccagttgcatcggaccacacgactatctatatgatcctgagattatcaaacatgagagctttccttaaggtttgaatgcagtaaattaaaccaaaagaaaaagactatatcggaaggtacttacatcgtgtcagatcgatctgtagctctagtagatcatgcgaatgttcgtgttatcggacaggttactttgaccaatgtgcatcacatggacaaagcttcagattctcaagctggttgaagaaattccctcacaataaaaattcttagaacaaataatgatttaagctcaatatgaaagtgttcatagatgagagtatatatatagatggatggaaataaattacctcttccgcagagttgactcttacacataatgaaagccggttgacagatgtgattgatgttacaaacttgttgatatcgggggtatggtcgtttcgatatccggctcc

SEQ ID NO: 16007 - DNA, 1069 bp, Arabidopsis thaliana landsberg
ctctatgtcttatttgctacatacacatataaaaagattatagaaaaatgaagcaaagacctctcctttcacataatcacattcatggagatttagtttagttatgttaataaaataccagtgaatgacagtaatccacgccacaaatcagctgctgaaagaagtatctagcctgaaaaaaatagcaagatggagaaacatcaatcaagaatttgtagaaaaatcgaataagagaaccaagtaaggattttgagaaaggagcatatatatcacacacctcagcttcactgaatctaccagcattacagattctttcaaagagctctcctccagaagcatactccattacaattgcaagatgagttggagtcagaatcacctacaaaagtttctctgtttttaagttccttaatctcaattaaagtactaacagattatgcaacaaatcaacaaacctccttgaatctgatgatattaggatgcctaagtgatctatgattgataatctctcttgccacattctcatcaatctgcaatccaacatattaccatcaaatcacaatcctcaattatcccaaaagttgaagactttcatctaatttctaaccaatcaaagaaagatcaaaactttttctgagaaaccaaagaggaaaaagatcaaaccttgcgacctctctcaatgtatttcatagcaacgagctctttggtctttttgtgtctaagaagacgagccacaccaaaatttccagctcccaaatccttcacaacctcatacttgtccatttttccaaatcaataccgtaaatggatagagttcgagtatatccgtagtttatctatctaatctacctataaaacgatttggatggggatctgagaaagagaagcgagttccattgataagaaatcgtgagatccaatacacacgcatgtgtgtataatatcgatgtaggaaggagtaaacgaagaagatggtggactggaccacgtggagtgtaatctgctagatttttcaattattaagctttgattgaaagtgaatccaacggttgtttcaattcttctgaaa

SEQ ID NO: 16008 - DNA, 706 bp, Arabidopsis thaliana landsberg
  unsure (1)..(706): unsure at all n locations
tatcccatgcattatatctgatttccccattccgcgggtgaaggtgggctgctgagtacgtttgtactcacccttgcttatttgttgtttttcagaaaaaggagatcgggtaagagttacgactgttcccaaccttgcctgtggtgttggaccgctgatttgctttgctgcgtatatcgggctgcttcagccccactctgatgatatgtcccgagttgtggaccaactattaaagttgttcgccacctttataggtttgtatcgtttaagcagatctgtaatcatctgatgtataaatgtgtttactagcctcctgggactagaaattgtatcacatttgagtcccagaggattggggcgcttcaggtggtatcagagctgttaggttggccacaggacgtaacccttagcctgatcaaaagtttttgagtcaaaactattttcttaaaaaaatctttctctcatcccttcatttcaaaaatgctttccccctttccttctctcagaagtcagatggaggtccgctaccaannnnnnnnnnnnnnnnntgaagatggtttccccaagttgctgaaagcatgcacagtccgcctcgaaatcaggagccagccagagtatgatggtcgtgaattcatcgagcatggcacagagaagtgtgtcgtgactgtatacattggatccagtctgcaccatgtggaatggagtg

SEQ ID NO: 16009 - DNA, 646 bp, Arabidopsis thaliana landsberg
  unsure (1)..(646): unsure at all n locations
gtctgaaacccaagggaccctcaagcgcttcctcaggagagctcaaaatgagtttgagctcaaggtgaagaagataaggagcgacaatgggtccgaattcaagaatcttcaagtggaggagttccttgaggaggaggggatcaagcacgagttctccgctccctacacacctcagcaaaatggtgtagtagagaggaagaacaggacgctcattgatatggcgaggactatgctcggagagttcaagacccccgagcgtttttggtcggaagccgtgaacacggcttgccacgccatcaacagggtctaccttcaccgcctcctcaaaaagacttcatatgagctgctaactggtaacaaacccaatgtgtcttactttcgtgtatttgggagcaagtgttatattcttgtgaagaaaggtagatcttctaaatttgctcccaaagctgtagacgggtttttattaggttatgactcaaatacaaaggcgtatagggtcttcaacaaatcatcgggtttggttgaagtctctagcgacgttgtatttgatgagactaatggctctcaagagagcaagttgttgacttgatgatgtagatgaagaagacgtcaaacggctgcgatcncaccatggcgattggagatg

SEQ ID NO: 16010 - DNA, 3045 bp, Arabidopsis thaliana landsberg
tcgtactttaggtttcatctgattttgcttaatctttcgtaattagacttttctattccataattggaggaattgaagcgtaattttgtatttataagtgtttttgggattgaaatgggctttagtaattttttggtttgaatagtttcaggaaatgcgagcttgaattcgcagagaagaacatggccaaagcagtacaagtctaaaaatggttacaggtctcttcgagtgaatggattatttggaggtggaaacaaagataataacagtgaagatggacaatcaaaggttggtacattacattggttttttcaaatagcaaacagattctgcaataggtgaacattttaagttaggcttcatgttgtaaagattcaaagtttatgattttggaactaatgaagtttgtgtgtgatctttcctaggcaggaatatttggtaatatgcagaatatgtatgagactgtgaagaaagctcaaatggttgttcaagtggaagctgtacgtgttcaaaaagagttagctgcgtaagtccggcacatttatcatacaaaatttgaggaagttttcttctatgagtaatgagttttgcatgttggttttgttccaatttcgcagcgcagaatttgatggttattgtgcaggcgagcttgtcaaggtcagtttagagcttgttttggccttaagatagatcaatgcacataatagatcagtgaagtattaactaacgtttacttgatgatgtaagaactgtgttttctgatttgttagtctttggatgatttggcaagaactccactctagaatctcaaaactttgtttagtctttattgtttctgtcacaaagtctgatgacctaaaccttatgaatttgtgtcaggttacgttatcaggtaaccagcaaccaatccgtactgatattaccgaggcagcaatggaactaggttccgaagtgagtaaccatacgtaccttgttatggaacagtcaaagctaattcatcagtttctcttgttgatgttgtgtgttttcctttggcagaaactatcacaacttgtcacagaagcatacaaggacgcacacgccaagagtgtggtggtatagcaatttgcagaccatttatcacaatgcaactaaagtatttgtttctatccatttcttctaattgaactttgtgaattttttcacaggctatgaaagagagaatgagtgaccttgcgcagagcttaggaatgccaccgggtctcagcgaaggaatgaagtaagaagctgtttttgttgtttcatttcaactttcaggtatgagaggttcggctttttttgtttgtttgtatatcagtcaggcagaagcaaagagctttgtactctactcttatggaattatatataaaagatttgaaacttttggttttctgcaattttattcccaaggtatcaacacaattgttctagtatcaacatatatcttcttcgaatacaagaatgcttttagtgtcttatgaaatcaagttgatttgaaacataaaaatttcaaaagaaaacacgcagttaactcgggttttggagggagccttctatcttatgtgtgtgactaataagatcttggaagctctttgccggccaagaacgatcttaaaagagtgagagcacgctcgggttgcaacaccggcacttcgtggcccgcccctcttatcgtcgcaaaggtaagcccctcatatacctctgtccatcctcccacctgacaccaccaccatgagaaatcactggctctgcataataagaatagaaccacgaatttgatgaaaattacctgcttttcggagtaccaagggtaccagggagttttcaccggaagattgagtttactgagggcaagtcgagtcccagtcactggaaccactgcgtctgtatcgccactacatcaacaaaatgtggttaaaggacacgaaaggtactttacttgcagctagtttcatggtttacctaaagacccagatcctcaaaccagcggtagtgagttccttgtatatcggcaacattgaaaactcggaatctttccagttgttattcacaaccatattgcacaaggtccacttataaggaatggaggtaagattagcgtgcatagctcgttgcacatcaggacggttgtaatatacctcagcgtagctttcggtacaagggtcgtactcgtattcctctaccaaaagccgtccatgcaggaacttggtctggttggtttgatgtacacatgagggtgagtagatgctgtacccattgactttgccaaactctctgtaggcgaagtagagtgcccaattgcacttgtccgaggttttatccgcagtgaagctgcagtgtttgaggatagacttgtaagttttgtcagagatcattgcgtgtgaccacgcatacatggcggctcctaatctgtcgtaatgcttgtccatatctccatttcccacctgtgcaaaagaatatatatgcattaaggagggattaaggtttcggaaatgtgataaatagaaccgtagttttaccatgaatcctttgaggttaatgatgggtgtattggagaaagctttgttgtagagatggatctttttggcaagctgaggaacataatgacctataaaagatatagacatgaaaataagtctatggtctagtaaatgtcttcaataaaaaccatattaattttgacttgcttcaagagtgacataccagtgtagctttcaccaacaatgtagaaatatctatattggtactgaggaaatcttgacatccatttaattagaaatatcaaattttcctgagctgcatacacaattacactattaattaattagtttctcttaaaaagaacaaaaacaaaaaagaactgaattgtaattattaaattttatagtcttatgtctatttgcaatgctggttaatgtcaagactcatattgagaattaatatcttcatgtgaaattttagtagtcaaatccatagaaaatcgattgctaacataggccatgaggttaacaaattgacactaaggaa

SEQ ID NO: 16011 - DNA, 3192 bp, Arabidopsis thaliana landsberg
aaaattccactaatgtcataaaaaactttggaaagaacgaatcacaagaaaaggccatggcttcccccaaatttctcgtctcctctcaaacttgtcctctcttctccctaactttctgctcgataaaactttgattggtttggatcgtatcaagttggtatatatcatagtcgtaagggtctctcgactccgtgggtatagatagtaaaaacatcacagtgctctaatatatagattcatgataaattgatgcatttggaggctatcctccattagtgggacgataaacataagatgcatgagctttaattcacaaccaaaagacgagatatgaaaaaaacccaagaaatttctcgagagagttttgtcgaacactttgtgagaacttcaccaccagaaggttctttcagtcattgggtctctaagcttcaaatcataggaaaaaatcatgaaaatgaaagatcacagttatacaaagctatcacaaagtctaaaatggagaagatggaagagatatcaagcgatctttcctgaaccacaaatcatcaaacgcactatgaaaaaacagtaaaagacctcaatctgttttattttgactcttgatatagatccaagaagatgttacaccgacatatttttgtttttttcattataactatgttattgtataaatggtgatcatctccaagcggcagtcaaagaacaatcatcaataacatattgcataagattgagctaagtttactttttactaagtaaatcaagcaacctcaaatccacaacaaattcgcaacaaaccacataatcattgaccaataagagttgatatagtaacataatgaaaaacctaagccacaattttttctctaagaccactggctttccccgccagtgctgtgtgaatgctctttctctttcaagtagttttcggctttcccctcgtcaatgtttccgtagtttcaggtggtggttttgtaagagctttatcattgaggcgaaagtgaaggctgaatcaacattgtttcaaagtcggtctccgttcctagtatcttcaactggttacatgtgtcctcttgtcccagttagctagaagacttcatctttggtttgagggaatcaaagtctcggttgtctcacaatggtagtctcgtctttcttgtggtttgatttagttttggtggcggttaggattctcagatgtgaataggatggcttgggtatatcgtctccaatttttagcttagctttctttgtctctctcctaagggtataatttttggcggatctagggctcattatacggtttattgtggtgtttctccatcattttgtggtcatgcagcattcggagcactgtctggcatttgttttcagatattcctcttcttcgagatattctcttctcctcttttgtccctagtttaaactctttcgagatggttttgtctagttttcgtgttgtcttctgctcggtctgcttatagagcttgatttacataagtcgttggtggttcatatccgtgaatgttggtcatggtgtagcgttcaagctttttcagcgaatcgtgatggctcccactatggtgagtctgatgtggctttggtgttaatcttctcataggtggttgtggggatggttggtcccttctcagctcgagtcatttctaaacttagaagctggaagccaaggaaggtaagtttcataaagagttctctccatataagaggaggtcttgatcaaaggtttttaaaatttcaaaaaggaaggagtaaaaaaaaactatagatcgaagacataggttgaggctcttcgcattgattcgggaaatctcaaagagaggtcaatgaatttctttcaaagtccaatccatatctgaagggtggaggtggttaggagatgctttggcagagactcgacagagctattgaccaaatttagagataatgatatgctaaggtggtgaccaatgtcacaccaaaaatgactcaaatttagagatactatgccgaaaaaattagatcttaaacactcagtcgaagagctttgagtgaagcgttggacattggtttgggaattattatcgcaacaccaaaataaagatgtctacaactctacatcatgcttggatggtgtcttttgtcgtacaaggcataatgtcgagacatcaatgtaattggaattggcaacatgaatagtgaagcagaggccaagatggagataaagttggggtgtgttcaagaaagcgggataggcgcccatgtgctgctttgactttcttaaaatcggttttattaggcggtgggatagatttggcgggctatgcttttattaaggggataagacggacattaggcgtgtttaagcagactagacggacattaggcgtgtttaagcagactagacggatctaaatgtatcttaatatttttgattatttttaatatatttaaattgtatttaaagaatcctatatttttattattttattttattttacttttaaaagtaaaatttaaatttattttcaaaaatttgataattttcaatttttataatgctttttcaacattgtagtagtatagaaatatacattgttttattctaaaactgcctaaacgtcctaaaatcgcttagaccccgacaaagcgttctatgtgctaggcggaggattatcgtccacttagcacctagagctttcttgaatacatcgcaactacgtatgctggattccattaatgaacatgatggatctgaaaactgttgcttgagcccatgagtgagtctgttcatccatatcttgcgtcgtcgacaatttcaccgaacgaggcgcaacttacggtccaagaggctagactcttgccatcagcgatattcggtgagagaaaacatctgggaaagccacatatctggaacgagagcataagtgtcgaggagggacgagatctggtttgtcgaaggcttcgaggtggagaaccaccatggaggagaacgataaggggggggggggggaggagagagaaggggagagatggcaacaacgcttttcaaactaaagctgagagaggatatgaccatagaggttgccgagattttgcggtgaaaaattcaccacataaaaggaaaacaaacagaaaactgagaaacacccactttaaaaagatattttctgacgtagtgagctgatcgcgctg

SEQ ID NO: 16012 - DNA, 792 bp, Arabidopsis thaliana landsberg
cgaggctggagctgtggctcgatggactaccgactagcatgccagttgggaggggtggacgatgacaacctcatcatccgtaatctaccccttttcctcttcgacgccgcccgagcctggctggagcatctgcctcctgcgcagatctccgactgggacgatctggtcaaggctttcgcgggaaacttccaaggcacgtacgtcgccactgggaactcgtgggatctccgaagctaccgccagcagccaggggagtccctccgagcgtacatccgacggttttcgaagcagcgcaccgagctgcccaacgttaccgactcggatgtcatcggcgcgttccttgtcggcaccacctgccgagacctggtgagtaagttggggcgcaagacccccaccagggcgagcgagctgatggacatcgccaccaagttctcctctggccaggaggcggtcgaagctatcttccgaaaggacaagcagccccagggccgcccatcggaagatgctcccgaggcgtctactccgcgcggcgccaagaagaaaggcaagaagaagtcgcaagcgaaacgcgacgccgccgacgcggaccttgtcgccgccgccgagtacaagaaccctcggaagccccccggaggtgctaacctcttcgacaagatgctcaaggagccgtgcccctatcatcaggggcccgtcaagcacacccttgaggagtgcgtcatgcttcggtgccacttccacagggccgggacacccgcggagggtggcagggcccgcgacgacgacaagaaggaa

SEQ ID NO: 16013 - DNA, 598 bp, Arabidopsis thaliana landsberg
aaactttaaatttgacaaatatgaatgttacgcttacgtcatattgtgaaaaagagaaaggtacaaaatgggcaaaaatagtcaacaaagaacagcttctccgactttcgtagcctttaaaaaagcatccgcgtttgcttttctataaatatcttcgaaaccccattactctcaaatccaaccaacctttcaaaacagaacacgaagacatggaccgaacacaatctccaaagacagctctgttcgccgtgttggcaacactccttgtcttaaccgtgaacggccagtcactttgtaagacacacaggttcaccaataacctcgccttcgcagattgctctgacctctcggccttaggctctttccttcactggacctacaatgaacaaaacgagtacgtctcaatcgcctatcgccaccctggaacctctgcttcttcttgggttgcttgaggacttacccaagtagtactcagatggttgggacgcaagctctcgtagccttcacaaacacaacaactaaccaattccaggcctatacctcttccgtgagtcctatggtacgcggctcgaacgtagtagcctaagtttcggtgtga

SEQ ID NO: 16014 - DNA, 3431 bp, Arabidopsis thaliana landsberg
  unsure (1)..(3431): unsure at all n locations
tgctctctctatatcgttttcttcaaaatgtaacctgattcgcttaactaatctattttgaagttgttgttatagcaaagtagagtttggagcgaagagtggaatcaaagattctaaaagattgtctcaatcctcacctaaagaaagggaccatcgaaacaacaattgtagaaattaggatattagtaacaattacttttgcttaaacatgtatttttccaaattatttacttgtataccaccaaagtttccgattgatttacatttttgtttcataaacataatgttctatgaaacataaggatccaacatgaatttaatgtctcatgtgccagttgatctgattatgtttccgggtgtaattcaccaaacatgcatattaaagcaacaaagatcagttttatattaaacacaagtttactcctcctaatcaccaaatctaaaagtagattagtaccaaattaatcttacgttttgggataagaaactaatctttcgttttctgtaacaatcatgtttccatcgcatgttgagggtgaagcatcagtgttcgttaagagagaaatagatgtatatatgttttgcaaaatcaaatgaaaatttaaaaagacaggtcaaatactcaaaatgataatagtatgaagctttctgtttgaaagaagtaaaggttaaggattctcatacacacatatatgaatcgggcaccaaccattgccattaccaatccatttaattaacttcttcttcctccatatatatatatatatatatatatatatatatatatatatatatgcgtttgggacctagtgatcaattttggcatttggaaccctgtgaagaggttttggtttttggcaaccatcaattggattatttttttctgccctctttatcacttttaattataggaaatgaaatatccggattcattttctgggacccttattggccatcattggaaataggggtggggagaaggttaatccttaaggatttgggggtaatggaaggatccccagggcctgaaccattcttggggggagccaaaccaatggtagaaggattttttcttctaatttggttaaaaaccaaatcacttaatattaaataagcctcatataataccaaaatttcggatctaacatacatgctacgcgagcctcatatttcatatgcgattgagatatcttttaccttgtaggctgtacttgtaatttttatcaaagaagttacatttactttactgtcttactataaaattactaacttttgctgtataaatatgaccactgaacgtctgtgaagttcacgaccaaaccagtcttactctctcttaactaagaacattgagatggcagacaatttgaatttggcgggtgttctgggagtcttattggtattaaccatcttccataatccgatcatcgtctacgccggcgagggtgttcccaacgtagctttgttcactttcggagactcttactacgacgccggaaacaaagtgtttctcagccaaaggaaagatcttccacaaacctattggccctacggaaaaattccggactaccccaacggcaagttttccgacggccacatcgtccccgacttcatcggtacgcttttgattattctaagatatctatttgattattacagatgtgcatatatatacaaccataaatatagaaacaagataattattaaacatggtgactaatgactatgtagctgatttcatctctattccgaatggagtactcccaccggtgcttaaaccgggcgttgatatttcacgtggagtcagctttgccgtcgccgatgcttctattctcggagcgccggttgaatctgtaagtccgttttcaatatttgttgttttgttttaaagagatagactttagggtttctaggtaaagagacaatgttaaaaaaagtattagataaatgaaatcattacaaaaaaacgttattttaaaatcttatgaaacactattttttaatgtactaatattaataagttttattttcttgtgtttatatccagatgacactaaatcaacaggtggttaaattcaaaaatatgaaatcgaattggaacgacagctacatcgagaaatcactgtttatgatatacattggtacggaagattatttgaatttcaccaaggccaaccccaatgcagacgcttcagctcagcaagcttttgtcactaacgttattaaccgattaaagaacgacatcaaagtaagttgtcaaacaaccaatgtacaagctttttcgcactttaattatgttcaaatgactaactataacaagttattttacagttgttgtactctttgggagcgagtaaattcgtggttcaattgctagcaccattgggatgcttaccgatcgtgagacaagaatacaaaacccggcaacgagtgttacgagctgctcaatgatttggccaaacaacataacggaaaaatcggtccaatgttaaacgaatttgctaaaattagtactagcccctatggttttcagttcaccgtcttcgatttctacaacgccgttcttcgtaggattgcgacaggaagaagtcttaactacagtaagaaaaaaaactaactgttccattaactaaattcgagtgatacgtacatatctcttttcaaactgtttatttaatacaaatgtatcataaaatatttgtacaggattcttcgtaacgaatacttcgtgttgcggtgttgggacacacaatgcatatggttgcggaaagggaaacgtgcactcgaagctatgtgagtaccaaagatcttacttcttcttcgatggacgtcacaacacagagaaggctcaggaggaaatggctcatcttctatatggagccgaccctgacgtggtccagccaatgacggtccgtgagctaatcgtctacccaactggagaaactatgcgtgagtattgggaacccaacaacttggctatccgtcgtcggccgtctcgtgacttttacttgggcctctccgcctattattagttggatggctttgagctgaatatttcgatatatatgagagctattgtcttataatgtataatcgatatcgtaacgtggaattatgcctatatgacgtcaaattatgcctttgacgttgtccaataaactgcttttgaatatctgttgtatcctctaattttggtaatctatgcaaaatagaataaatttataattgtcgttgtttgtacaacttgatcattggctcattgctacgtggactaataattgtttttaatgaaaataaataaataaaacaaaattccatttaaaacatcaaagttgaaacattatcccaattaaaacttccaaaatttgttgtttccatataaaacctccaacgaattaactntgtcttttttttataaaaggttaaaattt

SEQ ID NO: 16015 - DNA, 907 bp, Arabidopsis thaliana landsberg
gatgatttcagtatgtatatgcgagccatgagttcataaaaaatgcataaacatgataatttcatattttgttcaggttctaatagatagggaatggcatcagataagcgagtttcgatcaaagtagtatagtcaagttacaaattcaaagcagggtgcggtcttacttcagagatacaatcggttatgcaacagagaactaacaaccttggcattgaacttacttcattgaatcaaaacatgcttatcggtttgaaatcatcattatcccctatgcaaatgagcaatcctaaacgcaaacactctatatacaatcctaaaatgaaatgcaatctacatgacactctgtttttgatgaaatcattttctgaaaagtttcaaatttgtatggtttttctatgccttagatgatgcaaaatttgaaataagaaaagagaacacaatgttaaacatgtcttgaaccctcccccaaacttaaattatacagtcccttgtgtaataaaatttcgtaagaaaattcaagagaataaccacataaagcaaaaatagaagaaatgcaatggtatatacaatgaaatggagtgtacctcatcgtttagacgaagaggttctgacaaactcatccaggtggtcttgtttgtactcaggatcatgggtggaagtgttgggttatacacggttgaccgaccgagcatgtagcccgagtataactccactcggctcgggtcggcattcaaaaccaactagttcactggaccgggtgggcgtgcgatgaaacggcaatctgagaaggtgaagctcctcccgagctcgtaagatgaggctcttggcgggtcgaaacgaacgttcctttttggcgccacactcatcgagttgcttctcctgaactctggtggaggtggtggcg

SEQ ID NO: 16016 - DNA, 892 bp, Arabidopsis thaliana landsberg
ctcctcccatcattcgttaccgaccctgccaatatttcgtgattcagagaggtttggaccagaagaaacaaaacttccaccatgaagtctggagtccattgcagaatatcccaaagtggcagaagcattttcatacattggagaatagttattagttccaagttggttagccatcatagaagctacagctggatttaatgcgtaatagtttgggctatcatgatgctggtaaggattagctactccacttccactattatatgcagatccttgtgaccctctcatttgtgaattcctgcacgaagcagttcccctagcttgatcagatctgtttgggaacccatgtggattgacttcattatgcccatcttgcagtccaaacatatagttcctgaccttttcgacatcttgctcagcctgaccacgttcatctagcccgccagtgcctgacaggttcaagccggataaagcattgacaagatcagaagactcgttgagaccagatgtaacaccgttgaacgggctttgattacttgtgttcctcttatcatttgaactcactcttccactgccaatgggagtaaggcaaggactaggcaccctagcaatgccctgtggatctggagttccatttctagacaaagatgaacccagaacagctgcatagctgtatggagatggcgctccaatgccttgtgatgcagatggagacaggttattattagagtcaacattctcatcaaaggtattacgactagcaggacgtgagggctgctgtacaacaggatgccccatatccgcctacacaaaagtaatccaccaagtttatataagcaagagtattcaggagaactatacacaacacatacacacagagaaacattagcagagt

SEQ ID NO: 16017 - DNA, 448 bp, Arabidopsis thaliana landsberg
tgctatagacatatccaaagtgtcctggattttgaagtatacacgaaagtggtctaaaaaatctaagaaatattgtctgcaaattataaagtaaccacaaaatcatgtccaataatacaaggaccgcaaaccataaaatgaaatttgttaaaaatgtataactttatatgatcaacgtcaatgttgatttccggttgcgtctttaacactgaatgtgattttgcagctgtaacgccccctagcctggccatgaccggactaaccacggccgacccgggaggcgatcacaaatggagagaaccactcgcaactcggcaaaatacccggggttccaagtcctcggccaactcgcatctagtcatctccccactggattcactgcgtaggcttgccaacccttgcggcgaggtattgtgcgacttggacaaagccttgtatcattacgaaa

SEQ ID NO: 16018 - DNA, 548 bp, Arabidopsis thaliana landsberg
agaaaggggcaaaataggaaattcaagtgactcatcttcttcaacgcctgcacctagtgatggtgctgcatccacggctgtaaggattcgcctgagctccacgctggcagttgtagtacgacgcaccacgccgtgaacaaggcacactgttcctcctcatagcaccgtagctaatgtacttcttctgtgctaatatacgccggcttatgtctgaatcgaactccatctcttcttcttccgctatacactctgcgatcgatcctgtgcatccagagaagagcgatgaagatccggctctcacgaaatctagcgaatctccgaagtctccggttgattccacggctgagattactatcgccaggatcgcgatgacggcgtagatcgcgcgagtgttcgtcatctttaagccaaaaccttctcggtgaatcagagtcttcctttgttaatttgcttgtactctctttctctcttggaaacttgattctgtacacagctgaagacaacaggttaagcgttggtgtgtagcttcttataacctgaggtttttg

SEQ ID NO: 16019 - DNA, 2204 bp, Arabidopsis thaliana landsberg
gagtttctcatatcaaaacttcaagacacatgtctcttctccaaactggaaaatcctctgaaagcgtaacgggtcctcgatgttccagaggattatgacccgtacgtagtctgtgaggaccacgccatctctgccaaagtctgtctcaaggaacaatcccatacgctcaccaattgaagtgatcattttcaaggtgaggaatcgaagtgggattcctctgatctgaaccgagaaagggattcttttgaattcagcatccgtatgcaaagcagtccatcgttgaatgacacacatccaatcgttgaaagaccaaggccctcgccggagaattgaggacatggattcttcagattggaaaaggaattggatttttcgattctctagaattctgcctaccacctcttcacctacgccccagaggcgaggcaaagcactcaccattgcccgaagattttgttacattgggttcacaggttttgcaatgagactaaattgagtttcctgaagagcctcatcacaaatttcaatcgggagattgattgcttcctcttgtatttctacgcaatatcttgcagttgtcgtcggagattatcagcattgtcaatatgacaaaggaatttgtgtactttcactctgatcaacccaacgagaacagagacatgtgcaaggtataaataggtttggttgagaagcagttatggggtccacaaccgttctaccgttattcatccttgaagtaaccgccggtaaccggcgaagaaaactctcggcgagcgagagacagtcgtaggaatcaaagagatgcaatcgttcgtcgtatcgcctctcttctcttatttgattttgatttagagagagagagatttttcttgatattcattttttgtgtgtattattatgtaattaataatttcatatctattttatataattataattaacccatacacggtagaatgagggatactagtctcccatattattaaaaaacagaataaaaaaattacacacgaacattccgtgggcgcgtagcaccactagcatcctcaaaaataatcgaagtagcaaaatcaggcctaaggggaaaactatgaaaccccaaaggtaacaaaaaagcatggcttgctaattcatctgcgagacgattagcttccctatacacatgagtaattcggacaatctactccttcgaaatgaagccataacacaaacgtactaggaaagacagagaatgcgaatcgctaatccatgttttaagaaaacccaccaccatatctgaatccacttccagctacacctgcgtagccttcttctcccaagctatgaaaagcccgtaatacacacctcataacttaactaaaggagtcgaacaaactccgagattcccgcaaaaccaccacaccaaataccctcattatgccgtaaaacaccaccagctgttgctaaacccggatttccacgtgatgcgccatccgtgtttaacttcagccaaccatctcctggcggaactcatgctatttgtctctccaccctagttacattacctcgattactcccaagcagcgagtgagcctccaccacctctttcgctgaatcctttaagaaacgaactctatctcgacatttcctattcttctcaaacacattttttgatcgccgcttccaaccccaccatgcttccaaagcgaataaagtagcccaccgattacctccgacaagttttgttctcccaaattactatttacccattcaagcaatgattgtgtaaagaacacatataaccgcctagggggaagcaagcgactccaaatgcttgccatcgcctgacaatctctcaagacatgtaaaatagtctcttcgccactcttacatacttgacataaatttgtgtcacaaagatttcttctctttctttccacattggtcataatatcttggttaaccactaaccagagaaaaatcatcacacgttcttgtatcacagctctccagactcgctcaaacatcctccatgattgttgaccgtggtacttcatctctcgtaaggattgagtggtgttgacctcacggtgaagcgaccatctggactatcactccaagataagcgatctcgagcacctgtcacaacatctacccaacagtagacaacatcaatcttatagattccgaatatatggcaatatttttgataagtccattgtatc

SEQ ID NO: 16020 - DNA, 1079 bp, Arabidopsis thaliana landsberg
tcatgatgtccaagacatccacatagtcattaacaataatcaaagtgcggaaaagaaaagtagataaacgcggccttcacaggcagtcgactgggggtttgccgctaacccacacctagaactcatcgtactcttggaactcctggatgacctcctccacggcttcatcttctcctgaacagtggttgcaatgtggacaacctgggggttggtgtgtaaagcaagggtgagtacacatcaacatactcaacagttgtcctgtttggctgtagtggactagctttatgtggggttaagtcaagcagttgcttttagtttgttaggttattattactagtagagagccaggttttagcattaacacaagttgttaacccaaaagtactctttccaaacggaaagaataccagaaaccattaccataatcataatcaaaatcatcatcctcgtcatcgcatgtaaaccaaacatctctgatcaagtaccactaatcaatggagctcccttggccgctcaacagcgagcacggctgatatatcagtttcataacaatctgcagaggttgcgcactttacccacaagccgtgattccctctctagcccgggcttgcaagacccttattcactaccgaggtgaatggccagggattcactacgaagcctttacaaagattccctgaggctgtagccgcccgttaggtttcctaaatgcaccgcactcctccccaaggggcgaaccaaccttggcagagcgagccgcatacactgagccccattaacggcacgacggcgaacgcactacaccccagttcctctaattattcagctaagggcatcccattccaccctcatggttgcactgttttcccgggcggtcatccaacgaacaggtccttacggagaggcactcgagaaatcgctcgagcccccttgaataccacaagtaccacatcataataaaggagagaaacagtgtatcattgataattctcatcatgttcattgattagagttgagcaatagcataaagctaaatagtaataatccgacccaaataggtaacaaggacatggatacaa

SEQ ID NO: 16021 - DNA, 2500 bp, Arabidopsis thaliana landsberg
ggcaatttgagttatataagatgttatgggtcaagtggttaatattggtgagcttgagactctcgaggctaacaacaaacctatcacaaagcttgacttcgaattaagggacgacacgtaagtctatgtacctagttttttttgtttagagcaaaagaatgcaactattgtttcaatctctctaatatattgtttggtttagtgatgagagaatgtcccgtactttgtggggagcatttgctcagagtatttttaatgcatgtgaatctgctgatggtctttgcaaagattaagtcttacaaaggtacatgtctgttatcaactttattgacattactcaccaattctaacaattattacctgaaataaatgttatattttccgtgtatgtaggagttaggagtttgtctaactcctatgatgcatctcaagtccacatcaacccggatttccctgaagttcaagcttttgtttctcggtctgttttctttgatcatttgtttatttgctaatggtttttaactcacattccgtttatatgatgttattgaacagtttacatgctgatggtctttctctcacttttcgtgagagtgttccaaagtctcaaatggttactgtgaaacaggatgatgactgtaagcaatatgagagaaagtcaatctgtgatctgcttcattctatggaggtttgagttcttaatatacatgtactataaatttgaagttatcatatacttatttatataaatttgtaatttcagattggaaaggttagggttgtctgcaccatctatgctcttgacttggattggtcatggtattactttagttgtcgtaattgcaacaagaaagtgattcacattcatgctggtgttaacacaacttcactgaagtcataaaaaccaaggttttggtgtgatgtctgcaagaatgatgtcactaatgtgcaagccaagtaattatacctcatagttcatgtcctttactaactcagctagccaatgcacacataaattgaatgtgagtaattttaggtacatgctttatgtgaaagtcatggatggcactggtgaaactaaatgcctcttgtttgataccatctatgctgacatggttggtgaatcatgtacatccatgttaggtggctcttttaatgaggtatttatactatcaaaatagtttgattatagtgtttggctgaatctaacatgttacaagagtataactaacaatatatggtctcactatttagactgaggatccaaatgatgtccctaacggtttaagaaatttggttgggaagactttcctatttctggtctctgttgagaaagaaaacatatgggatagtaaggattcttttaaggtcacaaggctattgtttaacgatggtctatgtggtgatgaggtcctggaagactcagaatactctgtcaaccctgcatccattatttctagggaccaggtatgattctacacatgttatccttacaaagtcaggtgtaaatgaaacttgatcaatgaaacttttctaaactatattttcgtgttaccagtgtcttatgtaaactttgagttaggagacttcagactcagtgactccattatctaagcgtgtttatgctacaaagttgtcagactcagaacaatcatccagttccaaaaagttttgtgatcacccgttcgatttgaagaaatctgaacctgagtttaatgatgaactcgctactaaggaggtgaagaatgcttagatcacagacattgttgatggtgctggaattacagataaaggaaaaggtgttaggatatgacccacggtataccgctggttaagtattttttatttatttttacttttataaattgaaaattttgttatgtataatgtttgttgttatttgtgttagttaataattctcgatacgtttgtgtacggtttttagtgagtcgtatgtttacgatattagtaagtctaatactgtagatttgacccgtggtacacaacgggataatattttgaattttattcataatgttttgtatttaaattataaaattcaaatttttaatgttttaaatttaacctgtaaaacatatgtaattgaataactttgtgtcaaagaacattaacatttagaggtgtcaaagaagattaacacttattttgatatactataatgttgatttttaaaagagccaccaaaaatataataagagtttaattgtatttgttatgttatttttttgttttattttctgtttaagattctatagttgtaatttgattgttaattttaaaattcaacctaatttaatataatatttatttgtttagatttgttatttgagatatttttttagtgtcttttgttctttgtcttttttgtccgcaaggtctatcataattaaggtgaggtgacctgtaaagtataacatcgtttacatatagatcaaagaatctgtagattatatttaattgattagatgtgaccttataa

SEQ ID NO: 16022 - DNA, 770 bp, Arabidopsis thaliana landsberg
cccaatctgaatgtgtcgatttaacaaattaacattgcgaggggctactgttggggagcctttgctccgaagtcctcaaaaacaggatttaacagtgtttctggagtataatgtgtgaacaggtatgtttggacccgaatcggtaccacagtgggagaagctcaaagaatacgaaggttgatacagcaccgaagaagtgagcaggaaagcttcggcgtgactgcagaaaaggaaaccgacttaaagatgaaaaggctatttaaaccccggtggattattatagaactactaccaaatgtaaaggatatggatgtaattttatgtgggttgtgttccacgcctataaataggtgaacagtacccccgtactgttcacgctgcatggtaatcgctcctgcgtctctcacattttcaccttctgtcgaaccgaaggtattaatgaaccataaatattatgagcatttatttatgcttataagaggaaatgggaatgtaactaatctatttctatgttgccattatttacattcttatatgttttatgtctctttatttgtatttatttaccgagatgatgaaggtacacccttcatgaccttcgtccgaaaatcattatatccgaagggagataatgtttcgaaggacgaaggttcttacccatttaacatattgtgttgctttgtttttggcgtatagtatccgagaacaaggaccaacagctagcgaactgtttcaagctgtgcggtgtcgaatttgtgtgtgtatatata

SEQ ID NO: 16023 - DNA, 756 bp, Arabidopsis thaliana landsberg
gtttttcacatttttctatttctagagcttaagcatttttaaccttaacatgcttcttgttttctttaataaggaagtcctcttgagagtccaagagttcatccttctcatgaatagcactaattaattcatttaatttttccttttgttggcatgtttaggttggcaaaaagggtgcgcaaattatcctcctcatcacaagagttatcctcatcactagaggtttcatatttagtggaggattttgattttaccttcttctttttgccgtcctttgccatgaggcacttgtggccgacgttggggaagaagagtcccttggtgacggcgatgttggcggcgtcctcgtcagaggaggagtcggaggagctctcgtcggagtcccactcccgacacacatgggcatcgccgcccttcttcttgtagtatctcttcttctcctttcttctccccttcttgtcgtcgcccctgtcactagaaataggacattttgctataaagtgactgggcttaccacacttgtagcaaaccttcttggagcgaggcttgtaatctttccccctcctttgcttgaggatttggcggaagctcttgatgacgagcgccatttcctcattgtcgagcttggaggcgtcgatgggtgttctactcggcgtagactcctccttcttttcttccgttgccttgaatgcgacgggttgagcttcggatgtggaaggactgtcaagctcgttgatcttccgtgagcccttgatc

SEQ ID NO: 16024 - DNA, 467 bp, Arabidopsis thaliana landsberg
gtccgatggtttatgggttcttcccattcaccgccgaaaagtgttgggttctttttgtatgtggattcgatataggtaaattcggagtcaatcagatgtgaattcagctttagattcatcctcttttcagattaaagattgtgaaatcgactctcgacaaatgaaaaattggttttgggttgttgtagatctacatgttcttcttctccggccacacaaacggcggcgaattgtgtttctctcaatcaggtctgacggtttctctcctctggtggtggcagtttctcttctctacattcgttataggtaaacacatttagaatcctgtttttgataaattcccttttcgattgaagtttacgaataggactttcgagtaatgaatttttcctctgttgcagatcttttttctaatcgccggcgtcagtggtcctaagtcggtttagggtatcgacaattttaactca

SEQ ID NO: 16025 - DNA, 868 bp, Arabidopsis thaliana landsberg
  unsure (1)..(868): unsure at all n locations
tgaaccgaacaaaaattcggttcgggtcggttcggacatcggttttttcggttcggttattgggtataaattaaattccggattaaaccgattttttgttctaattcggttaatttgaaccgaataaaccacaaattaaaaaaatggacttacaaaaatgaaatctaataaaaaacaaacaacagacccaatacacaaatatacagttacaattacaaatccacaacacaattataggtcaggtccattacaaaattagggttttgagttttgacaaaaaaaatatgtacgactgcaactccaaactgcgatgtcgagcagcgactctccaatctagttaatttggccgatcgagaaccgatccgaaccgacttccgaattcttaaattaatttggccgatcggttcgatctccttannnnnnnnnnnnnnnnnnnccgaaattttcggttttttcggttcggtttactcgggttgaacagttatcccaggcctaaaatattgtatgactcttgaccaaaaactagttagatatattatttattatgacatattaatattaacataatataaaataaaaataaatgttcaaaaaacatgatcttaaagctgacaaagctgatttgattgactaatacttatcctacggtgatttttggttcttttactttttttgacaattatggagctggatgaaaaaaaaaatatataaaatcatatattattaataatgagataaatacaacgaattaaacggatcacagttaatatttccaaaagcaaaacagaacagagtcctaatttcattaatttcaactattgacaacaacattctaaatcaataggattggtttctattttttttttag

SEQ ID NO: 16026 - DNA, 468 bp, Arabidopsis thaliana landsberg
agggcctggcaaaaaggttggaggaagcgacaatggttatgtaatgaggtatattctagcgttcagcatctctaagactctaagactaagaccactgtaaggcttctttgcggtcaaccaatttgagcaaatgctcacgctccggacttgaacaaaaaatgggatgtggaggttcctggatttcaagcattgaggagatcaccagcaagggtttcaactacacagccctgtaatcgcaaatcagaagaaataagctccaggacctcgcggatataagtggtctcaacatgggcattgtcaccggccatgaacacatgcatgcaatcatcaatctctatcgaactaaacccaggctgcttttttagaccgagacccttcatcttccttctcatcttacttgctccttcccatttccatcagcagcatacatattcgagagaatcacataattgaatggctttcacatca

SEQ ID NO: 16027 - DNA, 920 bp, Arabidopsis thaliana landsberg
  unsure (1)..(920): unsure at all n locations
cgttccctcgtagcctgaggcggttaactagaggtagggcaataatgtatcccctgtagcgtagtcggtctgaggccaaggtcgggcgatgcgatgactcctcccaaggccgaggctgaggtccggcgaggcggagacctcctcccgaggccgagactgaggtcgaggcctggggtcgggcgaggtggagacctcctcccgaggccgaggctgaggtcgagacctagggtcaggcgaggcggagtccnctgttacgcccgaggctgaactcgggagtggccgtgactgttattagtctttccctggtggctagcacagttgccggagcagggcgaatagtgttgttttcctgtcagaatggtcagtgaaggggcgaagtgactgcagtcacgttcgacttgccgactgaggcacgcgtgtcaggataaggtgtcaggcgatccttgcattaaatgctcctgcgatacggtcggtcggtgtggcgatccggccaaggttgcttctcggtaaagactgggcctcgggcgagccgaaggtgtgtccgttgcttgaggggccctcgggcgagacgtgaatcctccggggtcggctgcccttgcccgaggctgggctcgggcgaggcgaggtcgtgtcccttgagtggaccgagccttgacttaatcgcacccatcaggccttcgcagctttgtactgatgggggttaccagctgagattaggagtcttgggggtacccctaattatggtccccgacaagccacatttcatgttttttggttnnnnnnnnnnnnnnnnnnnnnatgtctaactttttctgcctaagtttagttcttcaattcgagcgactaaagagatgtttgtttcaactttttgccgatgagcttttctgagcacctggctgtggggagaatctgagtattta

SEQ ID NO: 16028 - DNA, 1510 bp, Arabidopsis thaliana landsberg
cgttattcaatgataagggggtttgcgctacaatatcttctgctaccaacgtgtacgtgctagaacgataagcgatagaaatgtctcgcaagggaacttcaagggttttagaagatagcatgtccaaacaagatgcaacagcaaatccataaacaccaaagaagctttcattccctgcaaataaagatttcccaacaacaggggaacttgatagaacatagatctccataaaggagtaacaatgacaaacaaagcacaaccacaaacaaagcatacaattagtatccttgtgaataccaaaagcaattgtgaacaagcgagaatcacaattccaactccatgagttagctgaacatttacccatctcaactttagagaacctacaaatcatatagacatgaaagaaggaagtaaaggaggcataggagccataggaaaacctaatagcttcaggaaaaaggctgcatactgcagtaataggtcgcactatggcgatagaagtgtcaccggaagacacaaaggcaacacacggatctagaaggtttatcatagaaaacacttgcatataatttataataagcctcaatgacgagggaaaggagatggaggatccaacaaacaaggaataccatgagggagacgatggaaaatcgctacaacaacgaggaggaggctctggaggtaccggatctggaggcaccggaggcttgggaggatccagcgatacccgaaagaacagcatccggaggtgagcggtgttcacagtccaaacggaggagctcgacgacgggagagttgagaacgaagcaaccatcagagctgaattactagccaaagactactcgcaggcgacaacgggttccgacgaacgacgaggatctgacccgagaaggaagagcagagcggcttcagaaggaagaggataattgagcggcggagcagcggcggcggaggtccatcttgtcttggagcatggaggggcggcttcctcggagatcgtgcccgggagagaagacctagggcgaactctctttggttaatatttaagatcgcctcgttcttattgttttgcgactttgtcaatgactagagaagcgcaacaactttgtatatttgctgctcagagctctgaggtatggatagcgaataagatggagagtacgaagccatttcatagagcaagttcctgacagtgtcgaaatttgatgaccgctatcatttagggttatgttttgggttgagtttcttagtcgacatagagaacaaagttgtagtgtcttgtaatcaccccgggttctccaacaacgttttacaaattgtgggaaaggataaatacctacctgaggatcaacatggtgctgaatctcctacccctccacgtctcctcatttatgttctaggtttggtcaaatccagcaaggtagctagttcttggaggtggtggtttgtgcatttcaccatttaacacgtcaacataatacctaacgtcaggatgcatctctcattgata

SEQ ID NO: 16029 - DNA, 3097 bp, Arabidopsis thaliana landsberg
  unsure (1)..(3097): unsure at all n locations
aaacccctacgtcctctgttaggcatcaagccattgatagttttgttttgctataaaactgtctcccttatgagatataggacaaaacccctctatttatcctagattaacacaggttagagataagctcaacttcctcttacttacgacttgaatattctaatttcctttatcttcaagattctcctctatctctccgaatatcccggaaatgatcctgtttagctggaaataagcctttgagcgtgaatcctttttacgaatctttgcctcgagtgtttttcacgagtggttctatgaagagtaaccgttttgacgaggtaaaaggaagagcaatgagattagctccagccttagtggattgtgttggaaaccaggatatcctcaagtttgtcggtttgccatctggattttccaatagtcggactgagtcgaacctgcagcattaatcaaccaggcaataaactaaagaaatatagatcatgattcctaacaaaactaaacaaaaacaaatttttttctttttttttcgtttttttttttggactcaataaacttcaaaaacgaaaaataataagaagcaaaaataaaaccaatattcgtaagaacctcccccagacttaaacgacattgtccccagtggtattcaaatccgaagaaagcgggaaaaataaatcaaaaatgaaagaaaagaaagaaagggaaaatgaaaaatcaaaccagtgggttgcctcccactaagcgcttgttttgagtcaatagcttaactttggtggagttcaggatgtgggtggagtggtggaggattggtgctgcctcctcgccttccaaggaggtgtgtaaacggatctggttgaagcagctacaggtgtcaatcaacactcaagggtgtgtcgatcgacactcatctcgtcacctgcaagaacaacaggagaaacaagctttcgaggaactctaggctttttatcttttgaagatgtcttcaaagaatctaaagaattaatcgaagataaagtaggagaagagagaagagaacttatcacaaagatcctcaagtggtgtgggctgaagagaatgtnnnnnnnnnnnnnnnnnnnnnnnnnnnnnnnnnnnnnnnnnaggggtaggggtgtcgatcgacactattgctctgcaactttcgttggcgagctgagcgaataggagcattgtgtgtggctctatggtgggattctgagcagtctgaggaggtgtgcctatgctaaaagcaatgcaactgataggcttagtaagctttgaaccatccatgccaaactccatctccgaatcacaaaccttgagagagattctccctctcttcacatcaaacctagcaccagctgtaactaggaatgctcttccaaggataaggggatccttgggttccttttcatagtccaggaccacaaaatcagcaggtataacagagttaccaaccttaacaggaacatcttcaaggatgctttcagggattcgcttggaacgatccgcaatgagaagagtaatgcgagtaggcttgtagtgagtcatgcctagtctctcagcaacagacttaaaggcatgaggttgatgcttgatcccaggtcacacaaagagaggctgaatctgcttttggagatagagcaatcaaggacaaagctacctggatctggaagcttctcagtggtctgaccaggagtaatggtgcggatgtactcagctatgtctactctctgtgccttttccttcttggccttagttagcatgattgcactaatgtctctggtaatcagcttagcttcatttgagctaattcctttgtcaacaagtcgcttgacatacctgttgagtgaggtagaagatgtctcagaagcatccttaggaagagtatggaggatcttctccattatggttgtgcacttagcagcatgaatctcttgcttagaacgacgcctcctcggataggggacatgaggagtgtaaaccggcttgagctgcataggtacttgcacctgacaaggtgcagtccggatccagtgtcgatcgacactagagggatatcgatcgacaccgtcgtattgtgtcatctctgaaaagagcgtcccatatggtgtcgatcgacactagaggggtatcgattgacaccgtcgtatttagtcgtctctgagaagagcatcccctatggtgtcgatcgacacaggagggtgtcggtcgacaccatcctctgcaactgcaatctccaactcgtcttcagtgtccaattcctctcacacatcatctccttctctgatcaagatggcattgcagctcttccttgggttagcatcaggattaccagaaaaaaaacctcttgtcacttgatagattgtgcagtttgagctacctgtacatctagcttctttaaatgagagctcagattgtcgatctttccattaagatctgtgtagatagcatcaaacttgccattaaactgcacaacaagctttgtttggctctccagaatctggtcaagcatcgattccattcttgtctctgatgagggtggagggggggcttggtaagttgaatttccataggtgctctgaaagttgctttgaggaaaagtcttctggaaaggaggctttggagtgtagttggaggaaccttggttccctgtaaacctggtgccactaaagttgccctatggctgcccaaacttccagtatccctaaccatctatgtagaaaactcattcctcttactcaggctcaggctcaataatctctccttcagctccaaagtgaacatgcttcttccctatgagcaagtaatgtactgaatccagcttagcattcacctctgccatctgatttcctgaaatagctccagcaatcttcttcctctcaaaataagcattcttggtgctgttgctgcaagcaaggttctctatcagggttgtagcatcacctggaaaacgtgtattgaagttgccattgctcgcagcatctagagccatctggtatctccaatcaactcctctgaagaaggtgcctagaagttgtacctcactgaaaccatgatgtgcacaatctcgttggtagtccttgaaacgaactcaagc

SEQ ID NO: 16030 - DNA, 659 bp, Arabidopsis thaliana landsberg
gtgagaacatgtagtgtttcttgtttttgtcacggatgtttaactaatggctttgttgggcaatgagatttgttaggcattgaagagttgtgtgttgtttcgtgtttaagtttcttgtgtgaattgtttcttgtggttgtcacagatgcgttgaagagttgtgtgttggtctctgtttaactttaggtctgatcttagggcttcctaatctcagtttttctcatactttgtagtcaactgatagagattcaagaggcgttccttatgagtaggaagcctgaaagagtctcttgtcaatggcaagcggaaggaagcaggtgacttaacttcctttgtcggtctgcaaaaacagttattggaagatcaacgcaagatagaagagcaggtctcttacaatcagaagcgtgatattgaggttgctttgcgtgaagctgagatttcccgagttgcggatgagcataagaagaagatcgagcacttgtccttggtggagaagttcttgcgcgaaactgatccctggttcctgaatttcctcgagacgcaatcggcagagacaaccacaaatcctccctcatgctctccatcatcatctgcttcataggtctatgtctaactccttactcaagaactcaatgtcagttttcaaagtttttatgtgt

SEQ ID NO: 16031 - DNA, 1410 bp, Arabidopsis thaliana landsberg
tagacacattgtaaaatttgaattggtgagaaggagttagagccgtccgactggggtttgacccgattgaagcggagaggatggcaaaaagttggtttttggttgagaaggcgagaagatgtttgaggacggtgttcttcatggttgctatgttggcttcgctgctagtttcctcgttgccattgttagtagctataggtgatgtgttggttcccagcttcttgttgtcgagctttacttgtgtgacgtgttacggcgccaaggagcatctgaggcgatacggtttcaagagatctttgactgatattcctatcgtctctgttgtcagatctttccttgtcatctgtaaggtcatatcgttgcttttttcttgctcttgtttaggaaactgtttgatctttatgaatttgtcatagtaaagttttggtctttggctgttactgttcaaagctctgttggttgagttagctctcgcagatagctatgattgatgatcaagtctgctcttttaatgatcattagttgtacattttgtggaataggtatctatttactctcggacgttcctgctctctcgcacggtccttaccttggaactgtatctctgtgttctgtggtttcggttcttcttctttcagttaaagcttgccttttcactgttaattctcaactcaacaacgaagcctcgttctctccatctaggaaacggctccacctgaagaagtcgtgggggatgccggttttgttcctctcatctgtggtttttgcccttggtcatacggttgtagcatacaggacaagttgcagagcgaggaggaaaattttgtatcaccgagttgaccctgaagctgtgagtttttgttctttctttcacgtgaatctcattaatagaagtcatttgctttgttttttttttgtttaaatggactgtgtgtggcaggttctttcatgcaaaagcatcttctctggccaccagaaagtcccgcggtcacccactcctgtggttggaaaggcctccaagtttgatggagaagcaaggcgaaagcctttgtcccacgatgaaggagagcttccagtgagattgcttgctgatgttgacagtttattcgttacaatccgaggcctcactgtgcattacaagctttgttcacctggttcaccttggcagtctatctcctcaaatgttctcgaagccaattctagttacaatacgccagagataatggcaggaaggtcgaagtttgacagaaaagtgttgagtatggtcaccaaaagccagcatcatcatcaccacaggagctacaacagtttgtttaacaactcttccttgcacgaccctcttctggatggttatcctaaatctcctcttcttttcaaagagattaaggaaggaacgggactagggattca

SEQ ID NO: 16032 - DNA, 1864 bp, Arabidopsis thaliana landsberg
  unsure (1)..(1864): unsure at all n locations
ggggccaggaatactttcctttttacataggtctcaataacaggtatgaacaaaacgtcaagttctatgaatactaaccgttatgatgaggtaaatggaagagcagtgtgattagatccacccgtaatggattgtgttggaaaccaggatatcctcaactttgtcggtttgctatctggattttccaatagtcggattgagttgacccttctgcattcatcaaccagaaaataatctaaagaaatatagatcatgatttctaattagactaaacaaaaatgtttttttagaaaacaaaataaaatgactcataactctaaacacaaaaaataataagaatcaaaaataaaagcatagttaataagcgcctctcccagacttaaatatcattgtccccaatggcattcaaatccgaagagagaagaaaacataaaccaaaaataaaagaaataaaaagaaaaaaaaatcataccaatgggttccctctcactaagcgcttaattagagtcaataggttcacttggaggagttcaggacttggatggaggggtggaggacttgtgttgcattcgcgccttccaaggcggtatgtaaacagatcggccttgtgcagcagttggtgttaatcgacacagttgtttgtgtcgattcgatactctctccgtttcctgcaagatcaacagaaaaaactagctttcgcgaaactcgatgctcgtttaccggtgaagcacacttcgaagaatataaagaaataatcgaaggataagtaggagaagagatggaggagtacctatcatagggaactgaaatagttgtgggctgtgaaggaagtgcaaaagcatctgtctatgaaacgtgatggtatcgatcgacagggggtgtggtgtcgagcgacactgattctctacagctctcatcaacgcgtgaattgacactgctaggattttcctgcaaacttgtctcaaccaagtacatactttcttcaggtagaaaataattgataggaatgtcatcttcaaccttgatccttgacaaatgatcagcaactccattcttaatccctttcttatctcgtactnnnnnnnnnnnnnnnnnnnnnnnnnnnnnnnnnnnnnnnnaggcttagcatcccttttcttcataaggtacttgagtgctgaatgatctgtatgcacaattacctttgaaccaaccagataagagcgaaacttctctaaggcaaaaaccacaactaaaattctttctctgttttcgcataattccgcagtgcatcatcaagtgttctacttgcatagtggataacgtgaagtttattgcctttcctctgtcccaaaacagctccaactgcagaatcgcttgaatcatcacaaaaggtaaattctagtccggagcttgaactattggagcactcaccaaggcttccttaatcttattaaaagcagcatgaaactcagagttgaagtcaaacttcacatccttacgaagcaaagctgttagtggctcgacaatcttactgaaatccttgacaaacctcctgtaaaatccaacatgtccaagaaatctcttcacagatttcacgctattttgtgcatgtaaacttgtcataacctctatcttggctttatcaacctcaataccagcagctgaaactttgtgaccaagaactatacctaccatgaaatgacacttctcccaattaagaaccaaattcttctcttcacatctagccagaaccttgcaaaggttctccaagcatacttcaaatgaagacaggttgcctgaaatttcagccctatagtagttataatctcagctttccaccccaaactatttggcacttgaaagacaaccaaaaaatacttta

SEQ ID NO: 16033 - DNA, 3554 bp, Arabidopsis thaliana landsberg
tacagcggaatcatcatctaggcatcattaaatcattgaataaattatcgtaatgtactaaaaatgatgtaatcagtcttggatttcacttgttccattatgtcttgtagcaagtatgtgatgttagaatgagaagagcctccttcttccacagccttgtgagctgattctccaagctctttgactcttcttctcctctcttttgcatcatcactctcacccattaactcttccactgccttctttactccttctttatccactaacactcctattttctcctcttctccccatttcatgacttcttcaaccccggcacttacaccggcttttagtacttgaacgaccagtttttggttgcagaattggtctccaaacagcggccaagtgatcagtggaatgcctgaggtgattccttcgagagtcgagttccatccacagtgtgtcaggaatcctccaacggaaggatgtgaaaggataaggacttgaggtgaccaccctttaataagaagtcctctctctttgattctttcttcaaaaccgctctccatcatccactcatatagttcattatacttttcccaacctcttatgacccaaataaaagatctttgggatttttcaaggcctagccccagctccttgagctgagacaaaggtagattacagatacttccaaggcaaacatatagcaccgaaccatcttctttagaatcaagccattgaagacactcatcttgatcaatggcggcctggtttcccctctcagctttatcagcacctgccttgttgcacaaggaaacaggtccaatggaccatacttttccagccctagccttcgtgtagtctttgacataagcaggctccaactcctgaaatgtgttgacgatcacaccataggatgtgtattctgcttctaccatttcgtccaagaacgctttccaatctccacttgcagttgtttccactggaacttgaggctttgtaaattcaactctatcaggaaaactaggaaccaggaaataatctttatccgactttaagttcttcaagatctcgaggtttctgcgtagaacatgcatacacaaaagattaaagcaacccgtgccgtggaaaactatctttggtatactgaatttccttgcgattttgcttgtataaggcaagagcaaatcagaaataatacagctaggtctaggtttcatctcttccatgagcttcatgaccggatcttcgagcatgttaactgattgaaagaaaggtaccatcagctccattgagtcatacgaatctatattctcttttccttctggcaaaccaaattcttgatatggaaaattcacatgcactatgttgatgggtaaaccagactccatggcacgacttaagacattctcgaacctccctgcattataacgtgtcgtgacaatagttactgtcgcaccgcgctgagccaagagccttgctatatcaatcatgggaatcatgtggccctgagccatgaaagggaaaagaataaagtgaagtgcagaagatttggttgtttcggaaaccatgattcaaccttagtaagaaactctcaagtttttttttggttttggttaagatttgtgcgagcttataaaggataagatgcgtggagagtaaaacataaagtgaacagaagacgtaacagatgacgtaaacagttttttacttgccaaacacctctttttaagtccacagattgtgcttgctacttagtttgtccgtatgtgaccatcgtagtgaccttccttctcaggaaaagtttagaaacatatcttcataaagaaaacgaagataattcacatacacaaaacaacaacttggagggctcactgatagtgatagctacatctatcgtcaagtctcaaaaatcaaaataaacatagaggccacataaataaattaccaatgttaccaaaatctaatgtgtgtttgaaacttcaaagaccgtttaaactctgatatgaaacactaactgaagataaatcaaacgttggactctgtcaagacaagtatatccaacactagcctcaaaaattataatcaataaagagaggaccacagcctacaacaatttcgtgtggatttttctttcctgagtttggtaatagagatgacacacaagtgacaatatcctttacaagatgaaaacataatacactttacaacaagcacaaaaacctggatggtttctcattgcacactgtacctatggatatatatcgcaaacccccccaaagttttcggcagtaactggttggtattcacacagaccgtaatgcacatgttatttcttaacagattcgagatcattggcttttctacctgagtcggtcccgtcaagtcgagctcctctccacagtgttgacttgcttgatcttagcagtaacccgaaggctgatgagcatgctgctctcacaactgaatcttgcgaccgggtcatcttgctaaccagcgtttcaaacacctgaacaagatgacaggcttgagaactaataaagacttatgtgcatgttatatgtagtttctctaatatacctgtgggtagtagagagagattatgtgctgatcctctgagagtgacaacatggtggtggagaagtgtattgcattcgcctgaattactggccacggtgcatcaaaagcctgcaacgggtagtactcacttcagtttttcttgtatatatatagtttatgaatttggcaactatgatgcttattcgaggagagccgaacctggatggttgaggccatgtaagtatcaactctttccgactcttgaaccaagtgctttgagagatcccttacgaagttttcatagtcagttctgaaaatacaaaccattttagagataacagtggtcattgtgcacaaaatagatttggtactcataggacggcgagacatacctatcttcagaaccaaaagcacgtgaatcatagagggtagaatagtttattatgtccacgagtggagcaaaccgcttgagggttacctattcaataaaaagggatatgtaaactgaaagatacctcaaagcaaaaaaaggagcaataggctataaagaaaaaatacccgacaagcctgtcttatgctaggatcatcgtcatggagatgcactaccaagcgtggaagggtggaatgaatctgatattagacattttcatccaatgagattaaaactgaaaaaaacttctttcctcgacattattgaaaaggaatcgaaaagggtttgtgtcacctgctcaacaaatccctcacgttgccctccagtagcatatttacttaaagctccaagtgctgaaaatgcattggctctcatcttcgggtccatactaacctgttacaaattggaatttcaagtaaaattagtggcaacgcactcctacagaaaaaatgtatctgacagtatagtgaacttagagaactggttttgcaatttttcttctgttcaagcttgactctggcctaaacgctttatttttattaatttcagttataaaaacattttgggtaacttaaagcta

SEQ ID NO: 16034 - DNA, 2673 bp, Arabidopsis thaliana landsberg
tgttttgtaatatgttgggtgtttctcttccctttatcacccatataatggatgctctcatcaagtttagtcggcatttgttaagaaccgatgatgccgatggtaataaacttcgtgtcgatgtccttgattctaagttcgtctcactattgttccgtctattccccaaattttctcgatgctcttctaaacaggattttcagttcccacctcatctgattgatctccttaatggccgtggagaacctgatcatgtcgaattattcacggaggctgatttcctgtacctgccatttaactttgacaagaagcattgggtggctttagctgttgatttgaactgtcgaaagataactgtcttggattcgaacattcaacgacgcaaagattctgctattcaggacgagatcatgccactcgcggtaatgttgtcattccttttccaacaggctgctttcaattcgtctaagaggaactgttcgatggatccgttttaacctaatattacgttatctgatataagattagccgttttaaatgcttaatgttgtattctcgttgcattgttgtatatttgtcatcgttgttatcagataacgtttgtcgtttatctctgtttttaatagttttttcaattcgttgattttgtcttcgcatgtatcactaataataatatcagatataatgttatgacgttatccaatatcttttttaaaaaaattattgttatgtattattacgattttgtaggattttaccagactcggattgttgatttagcgcagaattactaaataacgttttactagcaaacttttttgtcacccaactttacaatcttttgtttcccagcgtttttctaattgcgtttagcttttgtcttacacctagttatccgattctgttttgtttacgtcgcgtacctcgatattgttagcagctaacgtttgtatttacttaataataagttatctactaagttaataatatatggttagtgttgcagtatctcggtaagcattgtgggatatttatcatcgttgcattcgactcacgttagcagattaactattatcccaatattattccatattagagattttctcgctaacattgttgttatcattgttactcattgtttttaaaattcgtggattttgaccagactcggatcgttgcattaggattgcgctagtagatactatattatcccttttcagcgtaaaggttactagctaactttgttgttatcttacattatcaacgtcgatttcaaatacattttaattactaacgtttatctcaataacaagttctcgagattttatctcactccaaccgttggtctatattgcagcgttagcagatacactatagtccccatattattctactagagcgaaggttagcagacacaatattatcccgctgactactacaacaaagtgtaaatattattctacactacctcccctttaagtttggtgtatccaagtatgatcatacaccctaacaccatcacaatcatcaacctcttactgctcgctttcgtttgagacacagcttcttccactttcgtaagcacttctttttctatcttcatttccacgttctcgtaaaccatcttttcgaactcggacctctatccccgaaaatctttcagctcttgctcaatgtctcgtgtctttgctgtcaatgtctctatctcattgagcaaagcttcgtcaaccaatttaaaagtgtggtcgtcatttcttagctaggtattaacatagattttccaaattaacagcgaattaaacatggcaattgaagaaatagaataatcagatgaacaagattagcagcatttagcctattttttgcagcaaaaccacaccgataatatgtccggcaaggattcggaaccgattttgaaatgagtgacacgactccttccccgcaccaacatattttcggtattcctacaactttaccttttccccgcggccctgtagatccagtcgaacttgatgatagactgctcatcctttgtcgaagaattttggttccaaatttcgggttctggttccaaattagggttcttctgtttttaatttgggggattataaccctgggatactcacggcaattatcgggttatatttgtagctgtacggcttggtttggtttcattgtgactgggtcattgtttctttgtcggcttcatgaaccaaaccgaagtaatatctatctggggacaattagacgttgtgacaattataaatattcttatcaactcggatacgtaaattagccgatacatgaatatactgatatatatttaaaaaagcgaaccttttacttgattcggtccgaagatatgtaacattcagcgtataggtaatgttatttttatcagttatacaatatagctgttttacttttttgtaaaaacaactcgggtgtttattgctttgattgcaactcctacaaagccgggcaataaatttatgttaatattcactagtgaagtctatcccggtatggggacaagtacatatttatgagtttttatttgttatcagataacacgcgttatgattattctgattgatgtccttaataactcgacccactaggtgtctctgtcttcttttaggagtacaacatcgtgattatacaatgacaggc

SEQ ID NO: 16035 - DNA, 3106 bp, Arabidopsis thaliana landsberg
agtatcatttcactattattgagcctaattaattgtttttgtttttacaaactctctcatagcttattattctgcatcaaactatccaggattcggtaaagacactacgatcctcatagaagagatctggaattctagtttcagttgtttatcaattccaataaagtctacacacatagacataggataagattattattaagacctttaaaaaaaaatgatgggaagcatattattgttactattattcttttctctggtccaatcacgttcagacacgtcatattcaaaaattcaacttcccggcgattctctgaccctctccgttaccgatttcggtgctaccggcgatggtatcaactacgatacttctgcgattcagtcaaccattgacgcctgcaatcgtcactacacatctttttcttccatctgccgcgtcgttttcccttccggcaactatttgaccgctaagctccatctccgatctggcgtcattctcgatgtgacggagaacgccgtgcttctcggtggaccgagaatcgaggattattatccggcggagacttcgtcggattggtacgtggtggtggcgaataacgctacggatgttggaatcactggcggaggagcgattgatggccaaggatcgaagttcgtggtcagattcgacgagaagaagaacgtgatggtgagctggaaccaaaccggagcttgcttgggtgataagtgtagacccaggcgtgttgcattcgttgattctataaacgttgagatctggaacatcacactacgagagcctgcgtattggtggttagttttgaaacttctgcttttcacaaagaactctatgaacaaatttgactttgtttcactatcttagatcgaagataaagtaactctagctgagaatttaggcttctgtgctaagtaatctctgatttgattatatacacactctcattgcagtttgcacattgtgagatgtgagaacacatcagtccatgatgtatcgatccttggggacttcaatactccaaataacgatggaatcgacattgaagattccaacaacactgttataactcggtgtcatatcgatactggagatgatgcaatctgtcccaagacttacactggtccactttacaacttaaccgctacagactgttggatccggaccaaatcctcagccattaaactcggtagtgcgagctggtttgatttcaaaggtcttgtctttgataacatcactatttttgaatctcacagaggacttggcatgcaaatacgcgatggaggtaaacaagtttcttcttttctttggctgcatacaacacagaaacttatgtaatgtaacccgaatatgtgcaggaaatgtgagtgacgttacattttcaaacataaacattagtacaagatactacgatccttcttggtggggaagagcagaaccaatctatataacaacttgccctcgtgactcatctgcaaaggaaggctcaatctcgaatctcctattcgtaaacataacaatcgattccgaaaacggagtctttttatcaggttcaccaaacggactactctcagatataaagttcaagaacatgaaccttactttcagaagatggagtaattacagtgcagggcttgtggactatagacctggatgtcaaggtctagtgaaccatagagccacgtctggaatcattatggagcatgtgaacgggtttcgcgttgagaatgttgacctgaaatggtcagatgatgatgatgtgaatgctgcttggaatgttcctctcgaatttagaccttccactgtgaataatgtctcgtttgttggtttcacttctggtctttacacgaaattgtttgagtctgattacgttatggttggtgaaaacaacattgcttttgcttagtaaagagattttggattcttatatttctttgtgagagaattggaaatttggtttttgttttctccaaaatgactacgttgtgaattgtgtgagcacgagttctccaacgacaccgttttcaacaagtaattgtaggttttctcacactagagtttatttacgtctaatcatcaatatatcactgagagtgaaatcggaatcacaaaaatggcgtcgacgaagccattgattgtcgcagcgaagacgctccgaaaccggatccacttccgatctggatccacatctactggtccaagccggtgggcgacaccgggtcacgaagaacgacccaaaggatatttcatgaaccggactccgccgcctccaggacagtcgcgcaagtgggaagattgggagcttccatgttacatcacaagcttcctcacgattgtaatcctcggagtgggtctcaatgccaaacctgatctttcaatcgagacctgggctcaccagaaagctcttgagcgcctcgagatggagaagcttgcatctgccggagattcatctggttaagcatcaccgttggatctccggttgcttgatttggtatgtccttattctccgggagttgaggagtttttttaccgtttaatgatgatgataacgaagactggagagttagggtttcgtttggcccttgaactttgtttcaattctcctttgttttgtcgataatgatgatgttcatgaaataagtgttcttttaactgtttagacgcaattgccttcactctctacttcttattacaattctcaaatttggtcacttttgatttactcatttctcaaatgattcaatttcgactattgattgctgcattactaattggagaaagagattaaacgagagttgtatgctgatgttgtgtgcttctcttccttagttcatggcttgtttatgttctctgtgaatctcaggtttgcttgtttcactcagtgcagtgcatattgattagattaatagctactttatgttagtcgattcttatctctttagatcatcttttttatacttgtcatttgttgtagtagtagtgataagctgatagtgtagctctaactagggcatggattgttcctttgtgttgtagacatgttcgtgattataggttattgcagcgtgcacaataagttttgtaggcgttcaa

SEQ ID NO: 16036 - DNA, 883 bp, Arabidopsis thaliana landsberg
tgcgccctgggaactcctcgggatctccgaagctgccgccagcagccgggagaatccctgcgggactacatctggcgattttcgaagcagcgcaccgagctgcccacatcaccgactcagatgtcatcggcacgttcctcgccggcaccacttgccgcgacctggtgagcaagctgggtcgcaagactcccaccagggcgagcgagctgatggacatcaccaccaagttcgcctctggtcaggaggcggtcgaggccatcttccggaaggacaagcagcctcagggacgccagcaggaagacgtccccaaggcgtccgctcagcgcggcacaaagaagaagggcaagaagaagtcgcaagcgaaacgcgacgacaccgacgcagatcttgtcgctgccgccgagcataggaaccctcggaagcctctcggagggccaacctgtttgacaagatgctcaaggagtcgtgcccctatcatcagggtcccgtcaagcacacccttgaggaatgtgtcatgcttcggcgctacttccataaggctcgggcccccggcgggagatggcaaaggccaagacaacaacaagaaagagggcgacaaggaagaggagttccccgaggtccacggctgcttcatgatctacggtgggcaagtggcgaacgcctcggctcggcaccgcaagcaggagcgccgggaggtctgctcggtgaaggtggccgcgtcagtctacctagactggtccgacaagcccatcaccttcgaccaaggcgaccaccaccgactgcgtgccgagcccaggaaggtacccactcgttgtcgatcctgtcatcggcaacgctaggcacaccaaggtcctcatggacggagacagcagtctcaacatca

SEQ ID NO: 16037 - DNA, 1186 bp, Arabidopsis thaliana landsberg
gaacaaaattaggccatattttgttatctttgtgggacctttcaaatgacaaagctggtaggctatataaatagaaacaaagctcaaaaatttattactttactcaacagtaacgaagtagactacttcaagtagtacatcaaaaaaaaaaaaaccaaagaagttgttatctttaacaaacaaaaatgggaaaatgctctgctttgatgatattcctctcttcttctcttctacttgtccttcaaacactccatgttgttaacgcggtcaaatgtttcggaaactccttcaacggtaacagcagcaccttcgctcagaatcgccagaaactgttccctactcttgctgacaaagtcatcatcaacgacggattctacaacgcttcactcggccaagatcccgacaaagtttacgctcttgtcagctgcgcaagaggctacgaccaagacgcttgttacaattgtgtccaatcattgactcagaacacactaacagattgtcgaagccgtagggattcgttcatatggggaggcaatgacgatgtaacttgtcttgtacgttcctcaaaccagtctacttttgggagcgtccagcttaaacctcctgttgtatggccaagtccagatactatagagtcatctaaaaacataaccctcttcaaacaacagtgggaagaaatggttaatcggaccttcgaggctgccacgaaagctgaaggttcctcggtgcttaagtactataaggccgaaaaagcgggtttcaccgagtttccagatgtttacatgctgatgcaatgcacacccgacttaacttcacgagattgcaagcaatgtttgggagattgcgtgatgtactttagaaaagactatatgggaagaaaaggaggcatggctagtcttccaagctgttatttcaggtgggatctatattctttccataatgcttttgataatgtaacaagagttcctgcgcctcctcctcgacctcatgctcaggaaaaggagagctgcataacagtaaaaaaaggtaacacaaattattttagcttttatttagagttcaaaagagccaattttgaggaatattgtttacatgacataaagcggtttgatatgaacatttcgtgccaaattgttattatgattaagaggttaattcttagacaaagggttggtaatttgcaggg

SEQ ID NO: 16038 - DNA, 2965 bp, Arabidopsis thaliana landsberg
atctgtgttcgtccttcgagactcttggaagagtttgcctaagcattactccctctgtcccttgagaaacacttttaatcgcaacgtcactcttttttagattcttctcccctatagagatatctgcccctttatcctctaactcttcgatttgtgtgtcttgtaaattctcttcttgtggaatttcctcctcttctccttcattacttaggcaagagaaactgtttgtcaatatggacacttcaccatattttagatcttttttcataatcgggcttcttccaacttttgtcggagtattccactccttgttgtttccatccagcatctcctctctcatacccctttgctctgttgcattgagatttaccacagcgtttgcattatcattttttccttcatttctctgttccccctgttgctctattttttcctcagcaacttgaacttctccttgttccttttctgtcacaacttttgttaacaccatgttcttcttttttccacccaaacaatccgagttttggtgaccccatttctcacaaactgtgcatcttggaggtaaccacggatatacgaactcgacaattgtgtctccccctctttcagatttgaaagaaaaaaacttaggtagctttttcgtcaaatccacttctactagaacttttgcttcctcaaaagatttgcaagcctcagtatcaggatggagtttctgaggaactcctaaaggactagttattgctttcagaacttcccatgaaaaatactttggcaaaacatttttaactatcacccaaagaggtataatcttcacttcttcttgttccatgtcaacaatgggagtccatttagacaaaaccaccggaacaccgcacaagttccacatacctcttcttagaacgcgggctctagtacgctcatccttaatccgaaacctaactgtattgttgttcaccacataaacatcaatcttcactgttttatctcctaaagtccagatcttgttgtccagaaattcgtctatgcctagctggaacgcttcatcctagcaaattcttcgcatgatatatctcgttagagttctccacctattttttcttttgatgtcaggttaagcacgagcaacatctgctctgacaaaaacctaactatgtaactttcccatacagaaaaagttcttctttgttaatcacttaattctttatgtatactgaacccagatatcccaacaaatagacacaacacacaatgagttgtgtctcttcacacttgtgtctcttgacaagtaactatctaatacgaataatgacacatataacttaacataatcagaaactcaattatcgaccaacattcgtgagtttcgagttttcgtgttatggagtttttcgcccagacctaattgttatcaatgttatgaataactttttgaaaagtaattcttaaatcaaatcatcacaaatacaaaaaaataataaaagaaattgatagggtggtggaagcaagaagaagatgcagctctgttaaaacaggggagttaaaaacagagtaatgaaacgaacagaaccaagcggagaaatgcgagttttcaaggagaaaagctcgactaatggagatagcgaagttgatatcgacaaactcgagatcaacaaggtgagagtcctcctctcagggccttgaacacaaagctctttgcgtaactcacaaacctctttttgttttttttattgatgcaaaactgactcttacaatgctgctacgatctctatttatagagatagagtcgcaggtaattagaataaaaaccttaatccaaatagtttaaggaaatagaaaaccgacaatgcaaagaaatagaaaaccaataatgcaagttaaacataaaagaacttgtaacttaatgggcaagtaaacaccaagacgcagcccattaaggatcgatgcgacgctgcatcagaaattgatatcttagcttttgtcgttatgactcatagatttagatcaatacacttggattcggggatgcaaaggcaagcagttctgtgctttgctcgaaaattggcatgttatcttgatgcagtgtaacccatgcctcgattccttcaccgtcgttggaatctatcaacactgtcacattgtcaaaaactggaacaacatttccggcgacccaaactggagttccccacccaaagcaagccttgtaaaatggaatcttgcaccagctagacacacagtacatgtcatgagtctcgaggctaaacttggaatgataatccatcatttgaccaacaattcttgagcctatcgtcgtcgatgacccttcgtcatgttggatcaaatgggctaactcatctgcccttttctgtagttccctaacagtttctacaatctgcacctcgccttctccgttcaaggtcatagtggagaacacgaggttaccgattaggttttccgacaaaagggagggtatcttggggcgcaagttagagggctggatcaataccttcatatcacaagcatttgtatttgaggatgcagctgcaacaaaggctttccaaagaagcgcagtgacactttccacccgcgtaggccggcctacaaagtcttcactagctgctttggtcctgagctcttccaacttagacgcactgaacacgaatctcttcgttatttggcttatcttgttggcattttcgtcaaccggaaacttaaataactcatttgctggtgggtagaaattcgtgccgcaaacacgggatcagccactatgtcgccagcctctcctcgagccatagcagcccaagactgaatgaaagttgagatggaggttcgtccgcgattttgtgagtgatgcataatcctatggccatgccaccacatggaaagtaagtcgccttcacgagtagcaaaggccatgtagtagctgcctcgtaaggggggatcctctagagtcgacctgcaggca

SEQ ID NO: 16039 - DNA, 1025 bp, Arabidopsis thaliana landsberg
ctccactcaatcgaattatcgagtctcacggaagatcgggccgcgtctactatcaattggtatcacatttctaggttgcccgtgaggataattctacctatagattagttctgtttcgtcccatagtccacagaacgccaacgaaaattacgatcagtttattccgacctaaaaccatcgccttagcctttgcacaattcagttttagagtccgcagttctgagttcgtgtgctagttgagtttccttgctggattagatttgttttggttcagtttgattgtatccagccactcacatcctacaacaccgaccctatctacacaacagatcctatctatataaccgaccctatccacaaaacagatcctatctctacaaccgatcctatacaccaaatagatcctatctctacaaccgacaatatccataatgcagatcctatatctaaaccgaccatatctagaaaacaaatcctatctctaaaactgaccctgtgcttcatagccgccgcttcggttcctgccgatttgtgcctttgaaaaccataacttgaggtacctttcataaaacggacataacttttcgctcggtgctccgtttgagctcaattttttacagcagattcctgactccattctggggtgacccaaactcgcattcggcctatttggttcggtcaaaaaattcaaaaaaatcagaaagataattaaaaaaattgtttaagtgttttcaggaatttcagagatcctttgtgaatttctctaggtcacaatacaactctgtttcaagtgaaattttgtgtgcttccatcttttgtgtttttggattagtggtaaaaaattcagaatatttcgagctcttttgctggtactcctttggaaacgcgcctttgatttctactagtgctgaaaaatctgctctatttacagaactaccattcccactagatacttgtactcttttcttgtgctttggccaactgttctataaatttctaggctagcactaggacaagacttggac

SEQ ID NO: 16040 - DNA, 1348 bp, Arabidopsis thaliana landsberg
  unsure (1)..(1348): unsure at all n locations
aaaatcctgtaattttatttgaatttccaaataaattaagattcgctgaccaataaactcttctacagattactcaactctaaagtgtatgtgtcactgtatcacaaatgtgtcggtaacgcatatacatgactcagtctcaataaggaatccaactctaaaagaataaagtaaaaacactgcattgctttgaagaagataaattggcttcgttgatttctctaaattcaacttcagaatgggatacttgtggatgtgattgacgccctgattttgacaaagatcagaatcatttcacaagatattgattaaaaagccgcagttacgagtcataacaagactactgatcaatttcatgtgactaaccaagcctgtctacatctaatcgcttcttcccgaactctccgttttcgatcatcaagtgacttttctattgcttgtaaaaccttaagtgaaattgcaaagtcatgatgagacgcatttcttactatacatactaaaaaacatgtgtgttgaggatctttgaaggttttcttgaagctttgcaagaaagatttgaatctttgtctcttaactcactttcgctcgcggaatgtttttctctcgtttgttaactatgaaaaacaagaactgaaaggaaaagacacacaagtttaacgagttcacgttccaaaccagaacgctacgtctcgccgagatttactcggaaatccactagaaagctctgttctttggttacacaaaccctagagataagctataaacttagccgcctctcacttgctctcttaaccctaaaagatcccagcttactcccttttatacaagacaacctctctggctctctctctctcttcttctttctcgcatgctctgttccgtacagaggaaggagacaaatgagattgagctctagacataggttaattactcctttgtcctctgttgaattgcatagcgtcacgtgagctcctcctgacctttcttttgttccttttgctgaaaccttctacttgggttagatactcttacacactnnnnnnnnnnnnnnnnnnnnnnnnnnnnnnccttagtgtcgaatcctttacttcacctttctagattccttgatttccatctcggtccctgagatcttctcaggcttgagatactttgagaagcttcttatctgcttgaagcattctccctgttgtcactttagtgatattctcacataaatcaagaaggtctcgtgatggattgtgcaagtaaatcaagaaagtcacataaagcattattcctgctcttctattttcattttcaaacaattttgacattaattagtgatggatcgtgcaagtaatttttt

SEQ ID NO: 16041 - DNA, 1286 bp, Arabidopsis thaliana landsberg
  unsure (1)..(1286): unsure at all n locations
aagaacctggatttagggtttcggatttggatttgggagttttatcatttaagcctagaaggaattgaagatagctatagaagcggttcacagtgaaggtgaatctcagactttggactttgtagagatcggtatttgtgaagccaagtaagaatatcgaaagtagaaggaataagatcgatgaagagtagacgatggtggagaatttccatggtcgcttgcttcgatctggtggttgatccatcgatgaagacagggaagaaagagaaagggacagagagaaggagagggagattcaaagcgacgagaggcccattaagattttggatggcccatttaacgttttttttggcatatgttctgcaagtagaaaattctcctcatttgtgtttttgatgattgaaaatatgatatctgtgaaataagacaatttataaattcaatgagaaagccataaggaggtttatcaaagtttaaaacgttatgcacaaatgaataacgatactaaggctaaataaaaaagcttagtagctccaatcaacaagagaatcgccggaacttaaccccggagagaagctcgtggcactgctggtaatccaaattcgtcctcagcctgttaatcacatcgttaaacggtctcattagccaaccatcaaaaggtaatcatacttgaagcatttcaaaattccaagaattaaaagttaacctgagctcttccatgtggagctccattgtgtcctgttggtgctgcaggcaagttaagctcgctatcgtaatcagtttctgtatcaggttggagataagaaggcattccatctgcttcggtctcgtttcccatgtcagcttcaagagcatcaagctctgaaatatatcaaaagaatgtaaatgatatgagagacgcatagcgtagcaagcgattgatcttaaacttccaattacaaaacaagcactttacctcccatgaggtcatcctcgtcaaggccatcaggaatattgtagctcctaccaagtgattcttgaatttcagaactaacatccatcagatccatcatctcgtcttgtaaattctgtaccatnnnnnnnnnnnnnnnnnnnnnnnnnnnnnnnnnngagaaaagcttgaaacaagataaaaccaagatgttgttaagtaacttaacaacgtacatcaatatcttgaatcttgacggttttcatcattcctttcaactccttgttacaaattttagtgctgtcatctgcagcagatttaatagatacacaaccattcaaacattgaacacctc

SEQ ID NO: 16042 - DNA, 132 bp, Arabidopsis thaliana landsberg
tgaaaagatttcctgacttctccacaagcatgaagactctctatctcaatggaactgcagtagaagaagtgccttcgtcgatcaagtcatggtctcatcttgatgacttgcatatgtcatacagggaaaacc

SEQ ID NO: 16043 - DNA, 1666 bp, Arabidopsis thaliana landsberg
agatcaactttaagtttcttcgcactgtctcattgtaatgtattccttcgaggaacgagttacacaatcactctagtccatgaaaccgtttgtctttcacaagtgactgaaatatcaagagtgtgataggttcaatcataacaattttctgctgtggaaaaggatttaactgggctcaattcaagttaccttccgtcagaagcagaaatgggtggctcttagctgggggaatcaatccaacaaatgtttcagaagctctttctatccttcaacctgatggaattgatgttagcagtggtatttgcggcacagacggcatccagaaggataagtctaagataagttccttcataactgcagttcgatctgtacactactaatggcttgcaatataagccaaggtaatttgtcttgtaactatagttttgagcatcaaaataatgcactctcttttcatcagtaataaaggtttaaattaaaatgttgggttgcttcatcagtccaaacctagtccacacagacgagcgagaggcagctgcttttggctcttccttgaagccagagtccaatgagacaatagacacaacacctttcaaacccgtggttgagaatttttacatgacaaactcaatcacaagagcctcaaagatcatggctcagtgcagtgctttgctcctcaagaagtgatctctatttcctaatatctgtctccggtgctgtcttcctctctcttgcaaaataaaggtgcagattctgagtttgctcgcatctttactggtcgcgtgtatcactgaattttgatttagctcgtgtagaatctgtaagtagtttacacaataaacacatgtaaggcaatttggaagaaatgtctgctgtttaaactctgcatccgtcaattggatgcttgtgacattgtttgtgtgtatgtgttcttactaggaagttttatattctgaacttttcatgtgtacaattgcgtctctatatataattatagtttaataagtttgcaaaaggacagagtgtgatatggagtttagagttcttgcttcttcttagtcctcttttgtttttgttttcctgggtccagcaacagttttgaaaccaacgtacgatataaagtaattaataactcaattttataagtacaaatgtgtgatgtatatagtttgcgtaagcatttagaaccctaagaaaaaggaaacattggataataaggatttgggtattctatgacgcaaagcaaacgcacgtcttttaactttacactcgacgtccttcagacaacgactttgtttataccaaaccatatcggttttgttttgcctcatcaaaccaatattgtgtacgtttctattgtactaacatttgttaattttctttacaattgagctaattttctagtaacatgtacacctcaagtttactatcgataactcttataacacaaaaacgaaaataatacaattcttacatgctagaaagtaaaaactgaatcgaagaaagaaaccaactcctttgtgaacacatctactagtaacgaccgtacgcaactgtcacatgtgggaaggactattatctccccccatcagttttaagtcaatgctctaattagcttaacaaaaaattaatatctaaattttcaaatatgtaattatatatacaa

SEQ ID NO: 16044 - DNA, 721 bp, Arabidopsis thaliana landsberg
cgcattttgtttcttcaagtatacgctcttctttagctctagctagttgtttctgaagatctttaatttcacgtctttgggcttcggcctgggcctttgaagtagcttcgtccttctttaccttatctaccaatgtgagcagaattttatctttttccagagcttcgtttctcagtctaataacttctgatcgtagattgttgaacgcaatttcgtagctctcatcttcagcacttttttgtgctctcaatgcattgcttagaattaaaccctatatgaaaaagaatttgaataagaataaaagaatgagttacaaattataaaatctctaaacgtctaattctcataccttcaggctattatacgcaagactgtctgcgagatcttcttttgtcatagcacataagccagcttcaagcttcggaaaccccatacttctagccatctcccgacagacggataattctttgttgtccgggaggcagtataggaagtcatcttcgtttctcccattaaacactagtgcccccttcggatattttaattccctggcatagtgatcagcttcataaatttcttcttcagataatttcttccccgaagcatgtcgcacaatgtaatcgcgtttggaggaaggtgctttgggggcagcagtgtcagtttcttcaaccacaattggctctgccattttttcgggttccaaagctgcctttgtagcttt

SEQ ID NO: 16045 - DNA, 208 bp, Arabidopsis thaliana landsberg
tgtgacttccccatgctttgtgtagttccagcctagtacatcaggggacggttgtgatcttaatcttaaccttgtatcaatcgtgcttcatctgcttcaaagagttcttctattacttctttattccacatgtttctgccatcttgcattaggtgcttgacttgtgtatgattggtgaccgtcgcatcacgtttttgaggtggtcttg

SEQ ID NO: 16046 - DNA, 402 bp, Arabidopsis thaliana landsberg
ataaaagaagctctctctctgcattggggacataccactaaaccactaaacataaaaaattccgatttggatcgaatcccaaaagcccacttaactaaattggtcagaaagagagtgcactcttaactaaattggtccgtccatctttaattatactttagcccgaaaccttttaagcaaaaccgtttcttagcccaaaatccactcctttgctttaattagggttttaacggacttggcccggccctaaatcttcagcccattttaacatcctttgaaataacccaaaattctaaaattccgatttggatcgaaccaaaccgaacaacccaaatgcactattaacgaaattggtcagtccatcttttgtttaaaactgctgcctttccaaactaattgatc

SEQ ID NO: 16047 - DNA, 263 bp, Arabidopsis thaliana landsberg
ctactaatcatggaaggtaacaccgataaaggaaaggccaggagcaagcgccggtggaaacacatgcttgtataatggtccaacacggttatcttcgacgttcacataaccctttgtttcaagaaatgggaagcaatacttgtagccggtgcaatgtactatggcatccgcaaatatcagtttcccgtcttggaaaacaaccgaaccatcctcatacttttgctcaaggtataacatatcagggtggggtggggaggaaaaaa

SEQ ID NO: 16048 - DNA, 811 bp, Arabidopsis thaliana landsberg
cggtgcgccatcgaacagacggcctccaccaacggtcatgttggtggttggggctataaataccccaaccaccccaccattcattgcatccaagttttccacttctcaaccacttacacgagttaggcattcaattctagacacatacaaagagatcaaatcctctccagtttcacacaaggctttagtgattagcgagagagatttgccgtgttcttttgagctcttgcgcttggattgcttctcttccttctcacttgttcttgtgatcaaaactccattgtaatcaaggcaagaggcaccaattgtgtggtggcccttgcagggaagttttgttcccggctttgatttaagaagagaagctcactcggtccgagggaccgtttgagagagggaagggttgaaagagacccggcctttgtggcctcctcaacggggagtaggtttgagagaaccaaacctcggtgaaacaaatccgtgtgtcacacttcattatttgctcgcgatttgttttgcgccctctctcgcggactcgtttatatttctaacgctaacccgtcttgtagttgtgtttatatttgtaaatttcagtttcgccctattcaccccccctctaggcgactatcaattggtatcagagcccggtgcttcattagagcctaaccgctcgaagtgatgtcgggagatcacgccaagaaggagatggagaccggcgaaaagcccactacaagccacgggagcacttcatcggaagagtcccgcaccaaaaagagggagaagaagaagagctcctccaacaaagggaaggaga

SEQ ID NO: 16049 - DNA, 1019 bp, Arabidopsis thaliana landsberg
aactaattttaaaatcttagtctcaatgataaattatatgaaaaaacaaattctaagatattttatagctttatatatatttttgtatttaaacttttgtgtatttaattggttaaatgttgagatattagtgtatatattaaatgtcatattcataaagttttgtagagaataaatatttaagtaatgtatatgccacacatcataaaaaaaaaatgtcaaatgtcatgataatagagtttcttacaaaaaaaccttgtcttattatataagattcacatgtatttgaatatatgcacagaagaaaacttacaatatggattcaaaaagaaagaaccaagaacttagcacatcagaaaccgcagatccctctctctcaaagacgaataaaaagcaaaagattgatatgcaagaagcgatgaagaaccaaaacgaggtttctctgttacttgtggggaaagtaatctctgccgtagccaaaaactcaaactgtgtcttctctccggcatccatcaacgccgttctcaccgtgaccgctgccaccaccgacaacaaaacattaagatctttcatcctctcttttcttaagtcttcttctaccgaagagaccaacgccatcttccacgaactcgcttccgtcgtcttcaaagacggaagtgaaacaggcgggcccaaaattgcggcggttaatggagtgtggatggagcaatcgctttcgtgtaaccccgactgggaagatctgtttctgaacttcttcaaggctagtttcgctaaagttgatttccgacacaaggttagtttctgatttctctacttttcaatttcaaatataatatgctttgattagataattaggttcagaatgagaagatttttgtcaatttttatgctaaataaatatatagcttttcgatttcaaatttgcttgattagattaggtcaagagttaatgaaaacttattgcactttttattctgtgatatttggttgttttctattatgtggtttaggggttatgg

SEQ ID NO: 16050 - DNA, 1702 bp, Arabidopsis thaliana landsberg
gtcagtggaaaacattttgaaggacacgtaggaactggaagagaagggagtcgccgtcagaagcttcaattccggccgaaacaccggaaaacttgttcaactggcatagctcactcgtcgcccaaaggattaatggcaaaatttcagttgtaccttgaatggggattttgactccacgaagtgcaattcttctgtcttcttctttttctttttcttcctcttcttcttcaatcaacatctttttaacttgggttcatcaatctttaaactacaggcagaagataaaaaaaacaaaacaaatctaaatccggtcaagaaaccggagagaaagccggccaaagacgccggagaaaagcccgacgaaataagaaagaggatatcttgctctcgggagataagccagccaccaccgctgaaagtagccggtcgatgccggaagctgagccaaccaacgcttctaaggaagccagcgatgccagagtagaagccgaccaaacactgctgataaagccagtcattgccggccagaaaagctgaaactggtttgctctctctgaaagatgaggagagagaagagagagaaaacatgtagatcaacaaatctatgtcgagtttaatcgtattttaatgttaaaaaaaacgtattgtgtgatgttatttacaattccccgataagttttttatatatatataattactcaaattaacttgaagtataagtcaactattctgaaaaattcagatttaacacaaaccgaattattatccagattttgatttatctttaactcgtgaaaattttaaaacagattatttggcacgaaatattgaaccaaacacatattattattatttgcaaacaatatttctcaacattggcttatttgagtcaatctaataaaattgtcgacaaaaaaaacacaccctcacgaacctaatccaacggaagcccattcaatttcaaagataacaaggaggtaaagttcactattttttctgaaagtcactctacctacatcttttttctttctttgtaatttgtttgacacattatcaataagatcactctttcactttgttgttttctcttgattcccttttgttcagtcttcatttagctcaacttagtaacttacagattttggactccagtttattttcacgatttataaaatccatcacaccaaatttttgacatccacataatccacctactataatattcaagttgtaagacatcaacactaaggtaaattttgacattgagcttacttattaaggtaacaagatttgaatggtgaatacagacatgaacaaatatcatttgcatttactccacgtgcttaaaaacaacacatggagaaacaaaaagaaggccggcgagtggcgacaacacaatcagtgtcggaaatcaaaatcggtgaacctcaattatagaaaaaggtatcattccaaagaatctcaggaaatgacgaaagaggacaaggaagacgccaaaaacagagggcaataaagtcattatacaatcctcaaatggaccgctgaaaacagagcaccagtcgttttagatcagtacacaaaaatcacaaccactcgcataatatcatctacttctatataaagagctcgtgagctttctttaagagagacatgtgagcttcatctactactcatattgcttatattttcctacaacactctc

SEQ ID NO: 16051 - DNA, 715 bp, Arabidopsis thaliana landsberg
ggccatccgagttgtattttatcttatacacccatttgcaaccaataggcttcttattgggaggtagagttcagatttcccaagtgtgagtagtctccattgcaccaatttcatcatccatagcaccacaccacacaagaaattctttcgcttcattgtaggttgagggttctttagctttgtcaatacaaaccaagaaagaatggtaaagtggagaaactttttcataagagagaaactgggaaatatcatgaatggttgaagaagctactgaatgacagtagtaatcttgaagataagcaggctttcgtgttctcctatgcgatgtttgaacagaaggttcagggacatcattttgaatattagcagaaggcataatatcaatggaagatgaagatgtggaagcatctgcatcagatacaggatgaggcataggagaaatgctaaccagatcaggaaaaaaatgttgagattcctgagataagtctgatttagcaaaagggaagagctcttcatgaaagacaacatgtctagaaataataatatcattggtttcaagatccaacaatttatagcctttaaatccagaaggatagccaagaaaggcacaggcacgagctcggggatcaaacttgagtctacaattgggagaagtcgaagcataacaaagacaaccaaagactttaagttcatcatatgtagagagtctttttag

SEQ ID NO: 16052 - DNA, 1064 bp, Arabidopsis thaliana landsberg
ttgttacttttccccttcttttctaattgagatctttaaagtctatctctatcattctctctttttttttttgctctgtttcatcacttagactaagacttaagattcgaatctataatgggtacttaaaaaggttctaactttctcatccattcactgttaaaacctttatccaaaaagaaaatttttaatgggtctacttttatctttcatatattcacaaaagaattattgatatatgtcaacagttctgggacttctggtggagagaggaaactgatgccaacaatcgaagaggaactagacagaagatcacttctctacagtctcttgatgcctgtgatggaccagtttgttcctggtcttgacaaaggcaaagggatgtattttctgtttatcaaatcagaatccaagacaccaggtggtctccctgctcgtcctgttttaaccagttactacaaatcctctcacttcaaaaacagaccttatgatccttacaccaactacacaagtcccaaccaaaccatcctttgttctgactcttaccagagcatgtactctcaaatgctttgtggtttatgccaacacaaagaggttcttcgtgttggtgctgtttttgcctctggtttcattagagccatcaagtttcttgagaaacattggcctgagctagctcgtgacattagaaccggtactctcagttccgagataaccgattcttcggttcgtgaggcggtcggggagattcttaaaccggatcctaagcttgctgatttcgtcgaatctgaatgcaggaagacttcttggcaagggatcatcactaggctttggccaaacactaagtatgtggatgtgattgtgactggaacaatgtcacagtatattccaactctggattattacagcaatggtttgcctcttgtctgcacaatgtatgcttcttcggagtgttacttcggtgtgaatctcaggccactctgcaaaccaagtgaagtctcttacactctcataccgaacatggcgtatttcgagttcttgcctgttcataggaacagtggagttac

SEQ ID NO: 16053 - DNA, 637 bp, Arabidopsis thaliana landsberg
  unsure (1)..(637): unsure at all n locations
gaaattttctgttacgacatatataaacaatttatgaaaaattgcaagactaaattaattacggagttaatgggcaaggtgtgattcattagaattgaaaaatgagtaaatattgaaccccaaatacaactatgttattattgtatcatcgtgttttttctttttggagtataacatgtagagtaagctacaatttcaataaataagttgaaaagaaaaaaatcatagatttttaaaactaagctaaaactctattttggtataggaggagttgcacccacaattcttgagcattgttcctttagcatcggagggaaaaacagaatgaatggaattttcggcatgcaattgacttcagcgtccaaaaatgctttacaacaagcagaacctaaattactgaatttgnnnnnnnnnnnnnnnnnnnnnnnnnnnnnnnnnnnnnnnnnnntatccatcacggatgaccaacatttcgttatatcaggtaatcctggcattccaggaatcggttgaaacggaaatggaaaaggaaacggagccggaaactgaggtaactgagcatttccagaaactatgatgcatagaaccactaagaaagaaaacacatttttgataggcataatgagaaaggtagcaa

SEQ ID NO: 16054 - DNA, 944 bp, Arabidopsis thaliana landsberg
tctcacttttatttgtcttgtaagttctttatctacttcggcataaacaaaagttctacttttcatatttttacattacaacgagcgacggctttgagtatcttttacgccgcctcggctacagcgctatataaatttttgagttagaacttgctggaaatacttcgcgcaaaatctcgttctatcttcagaaaaccaggttaaatcttaacacctgtaccccagctcgttgtaaaaccctggtcaaagggtgagtaggatcgggtcgcaactgagaagatttaactcaaaaaacttaagcccagttcattcaaacgtggcctaaccaacgaaacggttcggaattagcagagcaactacgacccggttagattagaaagaaaaacagctaacaaaacgcattgggatcttagaagcgaaaccaagttcttatagaaaaatggataaagccatccaggcatatgttctacaagaataggaataaagccatccaggcacaaagtcttaatatgaagccgtccaacaacggatatctactcaggcttttcggtcgggagagtcccaccagcgggcaagtacgacccggactgatcggtgactcccacctcatccgcgagagtctcgaccggtctatgacctctggggcttagaggagccggtacgtgcacaggggttttgagctcttccttcagctcagatgtgagacgaacaaggttcacctaggcatctgcaaaatccttgagccactcctcgacctgttttttctcggtcgccaaagatccgccgtcttcgagcgccttgatcaattgtgcgttagccgcgcttgggacaaatacataaattggtcgttagcatcctcgaagcgacatcttctcctcggccaccttgagcttggcggtgaaacctccgaagtttcttgcctcgccgtttgcgaacgcgagcca

SEQ ID NO: 16055 - DNA, 1647 bp, Arabidopsis thaliana landsberg
  unsure (1)..(1647): unsure at all n locations
cttctatatatagtttttggcgcctaaaacaatggctggtaaagcacaaacaatcggtaaccttttcgaatgactcgtaactttgcagcagtcccatttcgcctccacatgtattcgttccccttaatcgtcccgttccgcaacaagccttctttccctcctttaacccttcaaaacaaaatacaaaacgattcaaaggtgattctttcggaaagagaagtgtgataatcataaagggcatatttgaatctggatagtttgcgttctagcctcctcaaaccattaagaagcttctcattgtgcagatcggtgccacaagttttggcacagaaggacacattgtcttctagtactaagnnnnnnnnnnnnnnnnnnnnnnnnnnnnnnnnnnnnnnnnnnnnnnnnnnnnnnnttggagcattaggtctaaaggttgtctctatataagcactcatgaagacacacaaggtgttgatgctgccaagcggccacaaagaagagtgacagagagacacaatgtaaagagagagatataatcgggtagagagaaaacttgtaagagtgtaggtttggggagagttttcttaagtgttacagagtgttatgagtgagtctttggtagtagtaaagatccaaagatgtcacttgagtgatctctataaacttgttactgattgtagtagattttggggatatgttgatcccgaccggatgtagtggctcgttagacgccatgaaccgggtttacaacttgttgtgtgctcctctcttcttttttctcttctctcctctgtttcgattttttcttctcaaatatatggtttgatctgttttgctgtgatcttgttcatgacaaaggtttgagcttgaggtgttgtagaggtgacgaaacctcaacaatttcgtatataagaacaaaacataagtgacttgcgacaattttctcttctctatccaataagaaaatcatttcttaaatacataagaaagatgttaagaaataaactgccaactaaacaaatataaagaaacctgaatgagtgggagtattctactaatataggaaaacacactgtgccaaatctcattcaatctttgacaaagacaatctcggtttaccctggttaagatctcatcataagtagatgtttatcttggaaacttgttctgacttgacaaggaaaaatgatgtaagaaaactgcaagatgtaatacatatggccaatttcttattcgattctttttattattgtaaagattaatcaatcattatgacaaaaaaaaaacacacacactaaaaacatgaaaagccaggtgcaactggtgattgagcttaattaagttcaaatagcgcttggagattataaggtttagtgacgttggtcggcccgctccaaatcagctctgcaatttgttgatgtgctttctcagtcaaatgaaaatgatcaaagaacaagtaatctgtaactttttcgcataactcgtaactttgagatactcccattcggcctccgcatgtattgattccccgcaatggtccggttccacaacatgccattttcccttccttaaaccctataaatcaaacaaaatgattcacaaggttatactaaagaatcattggcttatatgagtcaataaagttag

SEQ ID NO: 16056 - DNA, 583 bp, Arabidopsis thaliana landsberg
  unsure (1)..(583): unsure at all n locations
agtggcaatgacgatgatgatgttgttaacatactcctacttctggaaataagaggaagcgtaaagagaaggaaacatgagatgaaggtgatggaggtaatagttcaaagaaaaagaagacaagtagtcgatcctatgtttgggatcacttcagcagaaagaaaggtaatccaaacaagtgcaattgtcattacggtgggaaagagttgtcttgtccttccaagtctggcacctctcctttgaaaaaacatttagaattgtcctgcaaagcattcaaggcatggaaaagtactaatacagaccaaactcaaactgttattggtcgtgatggtnnnnnnnnnnnnnnnnnnatgtacaaggtctctgaattagtcattagagaagcttctattgggatcacttcagcagaaagaaaggtaatccaaacaagtgcaattgtcattacggtgggaaagagttgtcttgtccttccaagtctggcacctctcctttgaaaaaacatttagaattgtcctgcaaagcattcaaggcatggaaaagtactaatacagaccaaactcaaactgttattggtcgtgatggt

SEQ ID NO: 16057 - DNA, 1806 bp, Arabidopsis thaliana landsberg
agctcatggaaggtggaacttcatttggaaacttgttctgcatcatagtaatccagaaatcaacatctttaaacttcagcatcattccctcaatcacttggtccaatttccggagcttttcttgagtctcaagatacatttcttcataatttggagatgcatcaacaataggatcagctaccggaattgaaccatagccaaattttttgcctttcttcacttgaacttcctgaaatttcaaaattgcatgttacaattcacataaaaaaaaagtattcaacacataaagtatggtttaaaaaaaaaacacataaagtataattaaaaataataatagaagtttcagcattttaccccttagtaaatagcatcaatttcttcttgtgaaagatggttagtgtccaaagtgttaccatcgtcattgtctctttgactgagaatttggtgctccatgtttcgacattttttggcgatcaactcagcttttttgcacacaaatacaccatcagacttactcttatgggttgcttccataaaagtaaccatatctgggagctctcctgtcacctcatcacgcgaaacagttttgaaacacagaaacatgtcattatagaaaactgtagactgaatttgataaaaactatatcatatgcaaaaaatatacaaattcccatctgttctctattacgtcaaaactatatcatatacaaaaaatataaaaatatacaaattaccgtcagctattgcgtcaacacaatcctccgacaagttatactctgttcttatattcatcatccgcgttgcagctgataaacgaaagtgaccctctttacaaccatcataaatcggtttcttcgctgcatctaacatatcaaaaaactttttcgcttctaagtttggttcttcaattccactttcagtcaatttgtgaaaagcatctgttaccatcggtattacaccggtctgatctctagttatattatcttcctcttcattactattactaggtgatcatccgcgctccgccgcagtttttttggatttttttatattgtttaatttaaatataatttttatttatctaatcattcactcatacaataagcaattacttttagtattaaaaatattttttctaacaacattctcaacaatgtatcatacacataattcataaacaacgtttgtcttaaaccaatctaatagagggtagtgttgtattctaaaaacctaagaatttgatgttagagctccttacgtattcttcaccctcagtgatttattgtataaatatcaatttaagagaatatcttactcaaatcattaagtaattcacgactattatatactcatactttgagtttggattacaaaaaaaaatcttcgagtatgcgaaaactattaaaatggttttgttgaaaaattatgtaatattaaaattaatttagtaatagtacaaataaatatgtaaaattaaataataaatatatcattaacctataaattagaagttgaagagcttatattaattatttaatagacacatgacaaatggtaaagtgataatatgtcaattacatggagagagttgaccaactttcatatatatgatgatttgtggtgaatattgggctatgggcttagccccttaagtattgtcggttttaataagggaactaggtcatctttgtcaccacatatatatggcttaagagtcgaaccttgtaatctaagaaacacatttatactactaaaggtttcttaacatggtatcagagccgatgaactaactacaaagaggtcacc

SEQ ID NO: 16058 - DNA, 717 bp, Arabidopsis thaliana landsberg
tcgtaaagcaaaacccagatctagagggctcaaagcctgaacaagatctgatcctaaatctgaagacctcaacagcaaaatcgagagaaaggagttggaagctccaacgagatagtctggtgggtcaggagggtcgggaggttcagaaggagagaccaaactggtcaaatcttgcggtagagcacacggcggcggattcggagaagggaggagcaaaggtggagcaggagcccgagcaagcatcactaaagccatagaagaaaggaagaggagggagaaagaggaagattctcgccggtgggcgagaggccacaccaacggcggcaaggagaagaagaaaccctagtcgtcaagttgagagaaaaaaaggggttttggattgacgatgtcccttttcatagttattaacaatatatatttaacatttttttgctcgatttaaattcactcagtttttgacaaatattgatgcaacgcctaacaattttcattgctagattgcttttgaaatttgctcgttattattatcaccaacggctaccaaacaaacatgatttagtcattgttgttatcgataaataaaacaaacatgatttagtcattgttgtcagcttcaaaatttgcatcaaaaggagattgatccccggtctctgaaaagggtacggtcgcaagttaagcgagaaagatctcgtatggtccagtactctaacaaaataa

SEQ ID NO: 16059 - DNA, 2085 bp, Arabidopsis thaliana landsberg
ccaaagatcctagccattccaaaatctgcaattttaggattcatatccgcgtccaagagaatgttactggctttgaggtcacggtgtatgattgtgagtcgtgagtcttgatgaagatacagaatccctcgagcaactccaccgataatcttgtatcgtcgagtccaatccagctggcctttctttgcagggtctgtccacatccataaatcacaatgagatctctaaacattcgtaaccccaagtatcaagaatcattgaaacaaagcattaaatgcaactaaccaaagaggaagtaatcaagacttttgttgggcacatactcgtagaccagtactctttcttctccgtctagacaaaacccaagaagtctaacaagatttctatgttgtagctttgcaacaagaacaacctcgttcttgaactctacttcaccttgtcctgatgactttgatagtcgcttcaccgcaacttcagtcccatccgataaagtaccctgttgtttttatcagcatcatctcattatccaaaagtgttggcttaaaatttcaagaaaaaaaaacacagctcaagggaactataatttaccttgtaaacctcaccaaatccaccttgaccaatcttattactctctgcaaaatcatctgttgcagtttgaattgttctataatcaagctgtagtgagtctgcggttgtgatatcatctcctgttacacaataaacagaacaaatgtcttagtaatcagctaaagaggctgatgaatgacgaccactaatatatcaaacctaattaagattgttagtaatctttaccctccgatgcagatgctgtgtcaaaagtcttctttgttctctgtgcaaggaaacaataaccaactaaagctatgaaaagcagaacagccagcacaacaatggctaccaccaacacatttgaattcccaccttttcctgtttttcaaacatcatttttttaagatcacactggcagacgataataataccaaaattttgtcaaaagaatcaaagtttctattttggtattactgaaatttcaagatatagtaaatcagagcaaaaaacagaggaagaagaaagaaagtgttcaccaggtattgaaggggatgtcaacggaggcgtagaccctggaaacagtggtggtggtggtggtgtaccaatggcggtttcgttgtagaaatcgtaaagctcgtaccttgaattacaacttggccaaaagtgtcttgctccagttctaacaaatggcattctattgatggaacttgtcagacagttcatgcagttttgtcttgaaagatcaggagtgcattgaacaagcccgtagaaagtctggagtgcggtcaattcggtctttatcgtagagaattttctaggattgtcggctgcttcgatggcaatttggttcatattagataacaccaaattagtaaactggtttatttgattttgaataggagaaatatgattggggttcctcatgataaattctccttcgtttgtaatggccgtcgatagaatattcttgtgagagtatctgagtatgcactcctcgtaatagaacacagcttctctctgattcggacacctactaaaggtgttgttgacggcaaaggtgacgcagttacggcaaacttccggcgagacgtctccccggcaaaggaaaagtccggtgaccctgtcaagggcttgtcccaccgtggcgttttggaatccggtggagtaagaggcgttgcgggaagagagagaggacaaaagggttttaagattggtgaagtaagtgctgttacttgagtaagttgttgcatttggacaataataggctaggaaacgaggatcttgagcagaagctctgaagctagtgaggaatgagaaaaggaaaaggaatatgaaagggttgaaatatgacatggttttttctttgagttccttaataaaagtttcacattatgcagcttccatttataaactgacaaattatattctctctctgactagtgctgattatcagatcaacgtgaaatatacggtggtttgctacgactataaagtcaggcgtcaatcaaactcaat

SEQ ID NO: 16060 - DNA, 2229 bp, Arabidopsis thaliana landsberg
tttcacattgtaccattgtaattcattggatctgattggttacatgtaaatagcataatagtatacagtacttgcaaattttatcttcacaagtaaataaaaaatcacccattaggtaaatcttcaattgtttgtttgagttcaaaataatttgttattgttttatttttcattttacaaattatttaattaaggaaatccaaaagtctatatttagaaatgtaattatttatcaaaaaaaaaaaaatgcatgcgaaaacaaaagcagcaattttaagactgaaataattttgagggttatatgaaaaacaggggcaagagtgagaatagtatgcaaagacagagtgacactaaaatcggagttggttggggtggcggtgacgggacctgatgggaaatacaaagtcgccgtcagaggagaccgacaggaccagcaatgtctggcggagcttgttcacagtccactgtcccgctgccaagaggctgatcctggcagaagcaccgctaccgtgatcctcacgcgctccaacggagccgcctctactcgtcactacgccaacgccatgggtttcttcagggacgaaccgctccgtggctgcgccgctctccgcaaacgctacctcgcagacggcgataaccgggctatttgagtcatcttatgttcttgatgaaacagaacacagaagtttatttagagtttttatttatttctattttattgtattgttgagtctctaaagatggtgagactatttagacatatctaagataaaccatataaaataaagtatttgcaaccttcaaaaaaaaaaatctcatgtccttggcaagaaagaggaatttgttgtatgttctgttacttatgtaggatcatcatttgatatgctgcgtataattacgatagttcttcaatattttatattttagttatcttattattacgagatctaaaagttattttattgtgttgtatagtaactagagaagtacagagaaatgttctgactttgggtacatgtaaagcatagcaactaattaacgagcttaactattaatcgaacatgtatatgtctttgtcctcgcaacccatgtcccaaactgaaaaagcactccggttcacgttgtccgatcgatcagattttgtaagttggttcaaattcacgttgtccgatcgatcagattctgtgagttggtcaaagtccgttccagtaccctcatcatcttcgaatctcctagagcaatgaaactcctgctgcatcttttctaaccagaaatattccatccaattcccattaatgctatgatcatcatcatctcgcttgtccagtgcacgcgagctcacactgtaataatcatcttcactagtcgaattagtaacaatacttggaaccgttttaagcaaggaagatgtatattcaccgctctggctcggctcttggttcgacccataaagacactggatctcatgacccgtcctcgagttcttgtccccgaatccaaaactcacatcacttttaggacaactcgagttttggcaagtgtaaacactcttagacggttccatagactcactttttctcttagaccccgacgattcttgatcgtcctgatcttccgagatcttgaggtctttgatattgagaagagcttcttcttggtttaagacacgagaccaagtatcagtctctttagccatcattttatcttgcaaacttttagattgtctcgccagacgtctcactcttcccaaattcggcgacatgtgtttaatcacagccgcgagaacactaactttccaagattttctcaaatcgtgcggctttcgatatggcggtgcaccgtgctcatgtgccgctccttgttctccccaccaaagctccgtccccgtcggccaccatggcggagcaattcctttctctaacggaaaccgccgctgtggcggcatgcaatgttgcattaacgctgatagtaacgaccctagtgtcgtgtcttgcagttcctgtaacatgtgtaataagctcgaggatgatgaggacttatcgattagctctgctgcagcagcagcagccgcgagtgctaagtaatctgtgatagcgtctggagcgttttggtcgaactgaacatttttcttccaccaacgtcttaagctatcgtgagaaccggttattggtttacccttttccggtacaattccggatacaaaacctttagctttacacacctccatga

SEQ ID NO: 16061 - DNA, 403 bp, Arabidopsis thaliana landsberg
aaaattagataaatttgtgttcatgttcaaaaacaatgctttttttttgaaattccttgagtcgtgcttctattatacattgaatttttgaaatacccataacccattgactataattcattagtttaatggttaggttatttacagtttttatttaatgccgatactgggaacccaaacaggacaacttttttgttgtaggtgagaacgtgtatcaaaaatgataaaatgaatatttttggtatttgaggatcgacctcaaatatactactttaggataagagtgagtcaaaatgctcgaagtatgatgccaaatattatattctcgttcttcgcataaaaagtgagatcaattaaccaaatttttgcttgatcaacactagaatatacctattcaaacttg

SEQ ID NO: 16062 - DNA, 1335 bp, Arabidopsis thaliana landsberg
  unsure (1)..(1335): unsure at all n locations
atctattgaaaaaaataaataagatataaatatacaaatttaatattcatcttatataatgaaaatagaaagtagaaaagcaatcactaattctaattcaaattaccaaatattaaaaaagggaaattttacatcaattatagaagaaaggaaaaatgattactttgtccttaaaagttaaatatttcatggaaatttgttttaaaaaactaaataagataattatacaaaaattatatgtatcttataaagagagagtcagaggctgagaatttctgtgtattaagaaatagttcgcgagcgtacatatatagctaactctaaacaagaatctgaaatctaggtacaatctaactagttacaacaatctttgcctttgttacggagttgatcgcaaccttcgaatatttgcagtatctgtggaatatgctgaatttgagtaaaccaacttgaaccaaacttcataaccgagactaaccaactctcaataccctccctcaagctggagcatacaaattttgtatcccaagcttgcatcgaaaacgccaaannnnnnnnnnnnnnnnnngtttagtgaagatatcagcaagctgagaccttgtatcaacatgtttcaaatggatattgcgagtgacaacnnnnnnnnnnnnnnnnnnncaatcgatctcaatgtgttttgttctttcgtgaaagaccgggtttgtagcaatgtgaattgctgacttcgtatcgcagcggactatcattggctggtcgtgtttcactccaagagtacccaacatacgtttcaaccatatcaattcttgaacgagattagcaagtgacctgtattctgcctctgctgaagacctactcgttgatcgttgtttacgtgtcttccatgcaacaggtgactccccaagttgtacaaaatagccagtgacggaacgtcgagttaagcgacatctcgcccagtccgaatcacaccaccctgtgatttgaaagttattatcagctcttaacagaattccctgtcctggatcagatttcagataccgaactacacgcagtgcggccaaccaatgatcttcacgaggcnnnnnnnnnnnnnnnnnnnnnnnntgaactgaatatgctaggtccggtcgtgtgacgcttaaatatattaatcttcccaacaagcgtctgtaaggttttggatcaggcaggagaggagaatccgacaatgccagtttattattttcttcaagaggaaaacttgcaggctttgctttcatgagacccgttttagaagatatgtcgagggcatatttttgctgacacaaatatatgcctgatttattttcttgctacttc

SEQ ID NO: 16063 - DNA, 2877 bp, Arabidopsis thaliana landsberg
agaaaatttgtcagcagaatatgtcgttggagtggaggaattcttgacatttgctaatagccagccaatagtacaaagttgtcgaggtaaattccactgtccttgtgctgtgtgcaagaatgaaaaacatatcgtctcgggtagaaaagttagtagtcatttgtttagtcaaggatttatgcctgattattatgtttggtataagcatggagaagatttcaacatgaatgtacgaacgagtaattatgttgatagaacgtatgtaagagagaattctgaaagtgtgggtaatgttgtagaagatccatatgtagatgtgggtaatgttgtagaagatccatatgtggatatggtgaacgatgcatttcgttataacgtggggtttgatgatacctatcatcaagacggtacttatcagaaaatggaggaaccggtacgtaaccattctaagaaattctatgactgttagaaggttctcaaaatccattgtacgatggttgtcgtgaagaccggtcacagtaatcgttagcagctcgagtcatgcagaacaaggcggatcataatatgagtgaaaagtgtgtggattcggtatgtcaaatgttgacagattttttaccagaaggaaaccaagctactgattcacattacaagacagaaaaattgatgcgtaatttaggccttccttattatacaattgatgtttgtattaacaattgtatgcttttctggaaagaagacgaaaaggaagatcaatgtcgattttgtggtcctcaaagatgaaagcctatagatgactattgtcgaagaaccaaagtgccatatagtcgtatgtggtatctacctattggtgaccgattgatgagaatgtatcagagccacaagactacaactgcaatgtgttggcatgccgagcaccaatcaaaagagggagaaatgaatcatccttcaaatgcggcgaagtagagatatttccaagagctacatcccatgtttgccgaagaaccccgtaacgtttatctcggattatgtaccgatggattcaatccatttggcatgtcgcgaaatcattctttgtggcatgtgatcctgactccatataatttaccaccgggtatgtgcatgaatacatagtacttgtttcttacaattctgaattctgggccaaatcacctacgaggtagtctcgatgtcttcctccaacctcttattgaggagctaaaagagttatggtctactggaatcgatgcatatgatgtgtctttgaatcaaaattttaatctaaaagtagtgttgcttggacgataagcaactttccgtcgtacaacatgttatcaggatggacaacccacggtaaactatcttgtccaatttgcatggaaagtactaactctttttatctacctaatggaaggaagacgtgctggtttgattgtcaccaaagatttctttctcatggtcatccattatggaagaacaaaaaagacttccgaaaaggaaaagacgcttctaccgagtatccacctgagtctttaaccggtgagcaaatttattacgagcggttgtctggtgtaaatccaccaagaaccaaggatgttggtggcaacggtcacgaaaagaagatgccaggctatgggaaggaacataactggcacaaggaaagcatattatgggagcttccatattggaaggatctgaatctccgacattgtatcgatgtgatgcatacagagaagaattttttggataacataatgaatactcttatgagcgtgaagggtaaatcaaaggacaacataatggcaagaatggatatagaacgattttgttctcggcctgacttacatattgatagtaagggaaaagctccatttccagcttatacattgacaaatgaagccaaaatgagtttattgcaatgtgttaaacatgcaatcaaattccctgatggttattcgtctgatttgagtagttgtgttgatatggagaatgggaagttatcaggtatgaagagtcatgattgccatgtttttatggagcggttatttccatttatctttgcagaactcctcgaccggaacgttcaccttgcattatcaggtaaaataagaagataatttactctttatatcatatatgcacttgagatgatgcaatttttttttttccaggggttggcgcattttttagggacttatgttcgagaactttgcagaaactcgcgttcaaattcttaagcagaaaatttttttgatcatatacaacttagaatagatcttcccaccatcatttttgatgttatggagcacctgcctatacatctcccctacgaagctgaattgggcagtcctgtccaatataggtggatatatccttttgagaggtttttcaaaaagttgaaaggaaaagcaaaaaataaaagatatgcggtcggatcatttgttgagtcatatatcaatgacgagattgcatattttccagagcattactttgccgatcatatacaaacaaaatcaaggtaaatataactatttattttacgattcgcaatctatacttcagaattaaaatcaattacatgaatcaggttaacaagattcgatgaaggagaagttcatgtatatcatgtccctggagtacctaacatatttatgcacgtcggccgtccaagtggtgaaatgcacgtagaatggcttacagagaaagactaccaaagcgcacatgcatatgttttaagaaattgtgactattttcaaccacttgagaggtattttaaatcactccttaatttaaatttttcattaagataactttgaaaaatttatcttcggttgtaaatataatatgttcgaggattttctttctgtgaaatagccaact

SEQ ID NO: 16064 - DNA, 1028 bp, Arabidopsis thaliana landsberg
ccccgtcgatcagattttgggtgacataagcaagggagtaacaactcgctcacgtttagctaatttttgtgagcattactcgtttgtctcttctattgagcctttcagggtagaagaggcctttcaggacccggactgggtgttggccatgcaggaagagctcaacaacttcaataggaacgaagtttggagcctggttccacgtcccaagcaaaatgttgtgggaaccaagtgggtgttccgcaacaagcaagacgagcacggggtggtgacaagaaacaaggctcgacttgtgtcaaaaggttatgcccaagtcgcaaatttggatttcgaggagacttttgctcctgtggctaggctagagtctattcaaatattattagcctatgccgctcaccactctttcaggttgtttcaaatggatgagaagagcgctttcctcaacaggccgatcaaggaggaggtatacgtggaacaagcccttggctttgaggatgacaggtatccgaccatgtgtataaactctctaaggcgctttatgggctcaagaaagccccaagagcatggtatgaatgcctaagagattaccttatcactaatggcttcaaagtcgaaaaagccgatcctactctctttactaaaacaattgcaaatgatttgtttgtatgccaaatttatgttgatgatatcatatttgggtctactaacaaatctacttgtgaagagtttagtaggattatgattcaaaaattcgagatgtctatgatgggggagttgaagtattttctaggatttcaagtcaagcaactccaagagggcaccttcatcagccaaacaaagtacattcaagacatactcaccaagtttgggatgaaggatgccaagcccatcaagacacccatgggaactaatggacatctcgacctcgacacgggaggtaaatccatagatcaaaaggtataccgatcgatgatagaatctatactctaaatatgtgcatatcgaccggacattatgctttccgtatg

SEQ ID NO: 16065 - DNA, 1092 bp, Arabidopsis thaliana landsberg
aaaatgcttgtgaagcatgcatgaacttctatatgagacgaaggcacagggaaagaacagtatcacaacaacttcggttgttacggatttatcgcccatcccaacgcaagccacccagtgccaacatttcggaagagatgaccgggaaattggatggaagaatggttttatgtgaagaacgacttgatagcgagggaagacatcaaggaagttattatgcgccccatatggtcccgcttcggcctccgaaggccgaaggttgaaatcgatgaagccgccgaagcatgccagaaggcatttggtactgtctacttttttattggtacgagagatttaattcaagtgcacatagcatttagagtatggccgcttgtagagagcttggaaatgccgaaggagaccatcaccaattctagcgaaggtgaactggtccggctgaagtatacattcagatatggggataaattcgatgaaccaaatgatgactggctaaagcgtgttgaaaatactagtgatgaactacttggagcatactccaagtctgaagataatgcactatctgcggccttcgagagccgaaaaaagaaaaggctaaatagagtttttgatgctattggatttgtgtaccctgattatcgctacccgctacgggggcgaaagagaaaagatgcaacttctgggaaagatgctgcttcagctgctccaagcgagcctgcgctgaagagaaaaaaagtgaaggtccttactcaccgaccgcgcttcattgaaccggccatagtgcccgagtttgccggtgagacctcttcggctgctgaagccaaagagcctacacctgcgtagaaaattgatgagctgactgcaaagtcgaaggctgaaaaaaattgaagagccgagggctgaggggacaaagacatcagaaattttaattccttcggcagaagttgaagtaccaaaaacccaaaaagttccagcaatgacccccaaaagaaaaaggatggttaatgttctggatgtattggatacaataaagtcttcaagcactactccgaagaaaattgccgaaactcccgaagtgcaaattgaagcctctga

SEQ ID NO: 16066 - DNA, 1028 bp, Arabidopsis thaliana landsberg
aatatcttcttcctttttttgatgtgttagtttcttaatttataaaaaaaatttggttatagagtcaaatttcccttattttttctttgaggcacttatcctccaagtttttctctcctaaatatatctatgttgttttattataaaatgtagaaaaagtgaagaatcttacttcactctccatttctcttacgtcttcccttcatatatatatatatcaaatataataatatttaaaatttatgcgttctattttacaacactttgagtgatggtataacagatcgatcatttatttgttcaaatattttttgaagtaacatttaaattatgttatattgattttaatttatttatataaaataacatacatgttatttttggagtatgagactatgtctcctccttaatcaaatgatagactttacttctttaaaataccataaatagcttaataattgaatgattatttttatatagataatcatgtcaaatctggctaaattcgatgtcgttgccctaaatatatctggcaaaaattatatgacatgggcatatgatgttaagatgcatctaagatcaaataggtttctgagcaccacagatgcatctaaaacgacataagatgagaccaaagctaaagccatgatattcgtacgcaatcatctcgatgacaatttaaaaaatgaatacatcataagagaatatcatgtggatctatggcaatcacttaaagattgtttcgatcataaacatatgtgattttgccaaaaggcagacatgaatggctaaatctccggttcttggattgcaaaagtgttggtgattataattccgccatgttcgaatcacctccaggatgatattatgtggtgaaaagtgagtgattataatattgttaaaaaaacgctctccacctttcattctgtaaatgcaatcccttcaacatcaatatcggccaaaagatcactcgttatctgagttgatcaagtctttgcgttctgagcaaataatgagctcgcatgatg

SEQ ID NO: 16067 - DNA, 5067 bp, Arabidopsis thaliana landsberg
taaagtctttacataatgacgtcttgatttggttttcaggttgctaatcttggcttatatgcgattgctttagtagtattcggtgttattaaggctggttcaaaagaagataccgaaactcaggtttcatattttgtgtgtgttcttctccagtatgtttatattgaagtaagtgtgtttcaatattgattgcatgctttctcgtgaaattctgcagtatcgctggattgcatattcatctatcacaattggatgctgctttgtggtcatatttcttatggggacaaaagagccaaggtatgttgtatatgctcaattctctgcattcttgattttaacactagagttgtatagttatatggattttgatgtttaaaggctgaggatagatttgaaagaaactagccgagcgagaataccgtgggtctattggttccggaaaattctgtactatcaagttgctatggtttacctcctcactcgattagtattgaatgtttcacaggttagttagtttctgctttctttgttgcttctgtctatgttcatattcgatctttacttacgtttcaggatgactttaatatttgcaggcatatcttgcattctttgttattgatgatttgcaaatggctcaatctgctaaagctttggtgaaagaaagagaaccactgcacttagctttcatctctatgaacatcaaactttttctgatcaatgtttcattttcagattcctgcaataatctacgtatgcagcttcgttgtatcagttatgcttcaggttgcaacaagtttaaacacatttatcttcttagcctctaaaccttttccctctttttttgtctgttatgtaacgactatattccctataatgtaggagattccttggaatggaaaacgcctcaaggcatattattgtgctggtggtattatttggatattctgcggtatatcaatactcttattgcccagaagcattaactcttacatgtatgcgatctctgtctttatcggcatcgcaaatgcagtaatgttggtaagacactcctttgttatatctgatgtcttcatgtgtttacatataactagaagatctgtcttttgataatcacaatttgtacaggtgacatcaattagtatgcagagtgtcttgattggttcgaaactcgggggatgtgctttcgtttgtgggtcattaagcttcttagacaaaatgtcatgtgggcttgctttatatgttcttcagtcacatcaaggtaagtttttgtctttctttctaatattatcttaaaattgatggaagtctaatttggaaaatggtgcaggcacttcaccaaaggttgacgtgaacatcaaacgatattttttacttcttggtgacagggtatgtgttaggacttgttccagctcagaccagctctaagctcgcttgttggagttgttgtaacatattttatggatctccatagcacaattctatagcctctgtgtcaaccgctattactagaatgaacagaaggaagatacgcaacgcttctggtctggtaaacacatatagttctaaacttggttactgtttattagtaatatgtttcagtctactaatttttgttcataaggataggttatatcacactgcgacatgcaatacatttttacaagaattacgttgtcagtaaagattaatgcaagttgattttcttttcatgttgtctactcatcttcactgaatcttccttgtctgagaccctgaagatgaataaagaatgagtctttgtgatatccttgcagacagaatcatgaatatttctgattcttaccctttgtttttgttttcattagaaatttagaacatagatgatcgatgaacacatccaggtgagaatcaaaccttaatccattacatagtttctctattctacggagtctgagataggaatttttttgattcacaaagcaattgatcaatgtttatcttttatttcttttggtgtggtgtaatgttaagttctttcattggttattcacataaatataggaaaatacaatggagaacaatcaaaattatgtctttttaagcagttactcatgcaaacctgttttgtgatcttccagcttatactggttgataaatggaggaaaggtttcagttttttttcgccgactagatctagcaatgatgatgctctcagggtcagaaagaaacatctgatccatttttaagggtcaagcagagtagcacaaaacaagtagagaaacagagcctgtgaaaaacggagcacctagagaaacagagcacagaaaacagaacactcgaacagagcaatcagataaacagagcaagtaaagacacaggacacaaaaaaacagaggacaaggaagaaagtgagccaggaattggatcaccaagaagtttttgtctcggctgattctttcatccttgcaaataaaacacagctgagtaaacatcaaaacatctatctaaagatctcaagtccaaacattttgttcagattcttgttggaataactaccaccgctgaaacttttgcgatggacatggaactatggaaggcaagtttttggcagtaaatttacaaagtagagagtttaatacaaaataactgcgtcactgtctttactctttagcttaatcgatgggacaaagtcaaactctgcaacactgagtcactctgaatatacctccgcttaaacgatgccgtttaaatctaaagtgcgagttccgtcaaagcccatttatggcccacatacaagacgatgccgtttcactccgacacttaggtttaggtcgttttccacctccgactagtaatcccggaaatcttctccgcatgagctccggtgaaaaatggaggccaagaacaagaaagcagtagcctcccgtctctgctgcttatgcaacctgagacgtcccgtcctcaaaagacctaaaacccttcaacaggtaacttttcaatttttctttcttctcttttctcttagaatctcgttgggttttagctaacatattaagcagaagcttggaacaaacttctatactgttagggtagggttttggctctcttatgaattgcgtttggtttggactatatgttatctgtgtggaatcgaatcaaaattatcaatctggttcgtcggagttggatcaatagtggaagtgacaattgctagtttgtcgtttgtgttttaatttcggttcggtttacatggttttgaaaaattcaattgatttcggttgggtttgaattggaattaaaggagaaagacactgaaatcacgcactcgaggcttttttttaaaggagcgagtgtgtttcaaaacaagccatttggtgggttagaacccacagaaaacgtatacacgcgctcatcacgcgattggtgagagtgggtgtgaaattgcccgagaggtgagagtggggtatgacatggaacgccctgattggcttataaaataaaaatagtagacatgtagctcctcccttcctatgtttatatttatttacttctcttttccgaagtatcaaaactgttgtcaaacaaaaagcttggaacaaaattaaaaccaatgcaattcatatagaagagctaaagcgttttgtttttttatggctaagattttgtgaatggtcttctcattttcaaggatgttcaacttcaacaacatagcatggaactttctttgttgatgttaatctctaacatgtctggtggaaaaaaatcacatactcagagggagtgtatcacttgccttgattatcctcattcttttggtgactttactcctggtttctgaggaaaacccgcttcatgattctctttttgatgtataacgtcagttttcatcttcttcaggtatttatatgctctccacagcttttagtattcatttttttttggctatgtcttctactatttagtaagtttatgatccaaagtttttgaatctcaagatattatagtctggttttgtgatgcattttggtttcctattcagtttgtaactctgcaaagggaaaatgggttgaagaccggaagagaccattgtattctggttttgaatgtaaacaatggtcatcttccatgtggaatgggcagacccgatttctcatttgatgccagaaggttgcaacatgccacagtttgacagattcactttcttgacaaggtatgtaagtttttctccaatgacacattcttcttatacatggtccttctctgtatattggattttatgagaatatgtggtagcagagcaagtttctgaaaatatctcaaatttgcttactgccactttgcttttgttttttagaatgcagaacaagacgatagcatttataggagactcattggggcggcaacagtttcaatccctaatgtgtatggccagtggtggtgaagatagcccagaggttcaaaacccgggatgggagtacggtttggtgaaacgccaaaggagctctccgtcctgatggtagggcttatcgattcccgaccacaaacacgacgatcttgtattattggtcagctagcttatcagatttggtacccatgaacaatacagatccacctagtcttactgcaatgcatctagatcgtccaccagcattcatgagaaactaccttcaccgtttcgatgtattggttctaaacactggtcaccattggaacagaggtaagattgaaggaaaccattgggtgatgcatgtaaatggaacacaggtcgaaggcgaatatctcaaagatatcagaaacgccaaggattttacaatacacagcgttgcgaagtggctcgatgcacagcttccattgcatccgcggttgaaagctttctttaggacaatttctccgaggcattttaaaaacggagattggaatacaggtggaaactgtaacaacacggttcctttgtctagaggcagcgaaatcacaggggatgatggatcgatcgcccccccagttgagagtgctgtgaacgggacaaggaaaaagattcttgacataactgcactttctgagctaagagacgaagcgcagtatctcagg

SEQ ID NO: 16068 - DNA, 1294 bp, Arabidopsis thaliana landsberg
caaaggcataagcggaccaaatttctcacttgtaaaatcattttttattttgtgaccaagatcaacaaaccaattaggtgttgacttgcttcttatagcacaccagtaagtgtttcccttgagagtaacaccacggttattacaaccacggggagggaaatttataaaccattgtggagtaacgtcaagagtcgtccacaaatcagagtcaaaatcgtagatttcataccaaaaagggaaatcgaatgcaccatctataaacctcaagattttgtgactacgactcttattattgtatccaagagcgtacacgtacatgtacctgccataacaatcctgtatccgggaaaaatatctgggttcgatccaccttgtttgtccccaatacggattccaaacaacaagactacacttatcgtcttccaagacgcatagtaacaaaccctcgcagtgaaagacttgagatatcttgacttgttctgaatcgtcgtataggcaagtaagtttatctctttgctctgcagatggatcaatgtcaattccattgaagaagatgctcattgcaaacaggtttttatccatcaacacgatcatcctagactctccttcctttgctgctgcttcttctttcataaagctccggtttttgaataaagagtcccagtttttgcaagtcaatctcactgctctcgcagactttaatggtactctagagattatctcatctaataactccgttggaagatgagagattgtcgtcgtcatagtcattacaagttgcaacaaaggttttctcttccttagatctgttgttgcgcgcgcctataggaatcaaagacacataaaaggtaccacgtaaaccttttaatatcggtgagacatctaaatggtaaccgccttgtacaaaaaaaaaaaaaaaggttctaaatggaaccagaatctaactgattttttttgcttaattaatctagctcaagttttagtgatttttgttgaagataactgattttttattttttttcattggtaacacttaacagctgaattagttttactgattttaggcaaaatctagcaaaataattaagactttaactgaaaatatcttcaaataattatgaatattaataaaataactaaacaatatctaaataaaatagataaagttatccaatagtctaattaagtcttgtactaattaataaaatctaatataaactaatttatataaattaattaattatctagtcaatgtatgggttggtcttacttgatgcatggttgatgtcttgga

SEQ ID NO: 16069 - DNA, 2260 bp, Arabidopsis thaliana landsberg
  unsure (1)..(2260): unsure at all n locations
aatactatatcaaaaatagaacaaaaaaaggaaaaagaacatattcctttattcattggactctaacacaaaacgtccgaatatcaaaaacccatcatgaactcttcttttgagatgtcccttttttgaaattccaattgttaatcgctttaattttcacctttttctaccaaattgaatcgcacgcgtgttaacatagtgtaggttcgatttagtgcataaagtgttagctataaggaaaaaaattatacttcaattaacaagttcgatagaatttcgcaaaaaaattaatccctctaagaacggctctcactactgactgaaacaatctcatcatccatgaaaacaactactgtttatcgtatttacaaacgcaagaaaaggaactaaatccaactctaaaaactcgtccccataaagcataacttaaaaaaaacatcaaaaacgctaagtctataacttcaacaaaaagaagaaggaaaaaactaaaacagagaagtagatatatgattaagaagcttgacgtgtcgcagaagctaaagctaccgcttgtgcccacaccttcaacctcgccttgacctcctttggatcatcacctaattcaataacataaatttattcagagacaaattcaaacataaataaaacataagtaaacatatttcactattattttacttaccgggactggagatgcgtcaggtggcgatgggtgagtcgccgccgctactagtctgagtgtcgataattcgatcccggttgttgacacagatatccgacccggaaccggaacctctaattcgaacccgagatctctacaagctttcacttcttgtaaccccatcctcaacgacctatctccacctcttgctctcgtcaataccgttaagccttctcttccaccgacgtcacactctccgttaactccctttttcttcttttccctcctttgcctccgtaaactacacttactgccatgtttgttactctcattcgcatctaactcgccggaaactgtaagttttcttctccggcgagatggagtcaccggaagtgagttaaacccacgtgtctcttgtcggtaatctgactctcgaacgttctcttttccttctccatcatcggaaacttccccatccgcctctgctccgtcgaaattctccagagatgtggaaacacacgaatctggttgattcttcgtggctgcttcgtcgtaagcagagctcgtacatatagacaatctcgacaaagaagaaaccattactaagctctcttcgaacgccatgaaagagaagaagaagtaggaaagtgaagagactgacgtttggagtctccactatatcgttataatggtgaaacttaactgagtcaactcgtgctttaactccctttgatcactttcatttatacccgagtctcgggttttgtgctatttacggttttagccctctttttgtttgaaaacagcaatttttatttctactttaatccttttttgggggtaaatatctaactcactttgtttgattctatcattactaaaatagcttcggattactactaatcactgcatttatttgaaaaaccttggtcgaattttttactattttcaatagaaacgttacttttttcccctgggtcctactttaacgcggagatagaacnnnnnnnnnnnnnnnnnnnnnnnnnaaaatccaccggaaagtagagttaattctcattaaattcaatgttaaaacaaggtattcacgtagttagtgacctttttttcgccattgtcttaatacgagattgattattcctacaatttccaaatttgttgtcgctctcaagcattaaaaagtgacacatgttcacccttataagttgtttataaacgccatagcccataatccaatatgggaagctttaactaatcgaccgtttattacatcactaatcgctaacatattaaaccatattttatccattaacgcgtactcggcttagagttaagactcataaacccattcaggagcttaaaagttttagtccacttaatgcatgatacctataatcttgattcaacgaccaaaaatggagctggtttgctataaataatcagtttatcctttgaaaatgtaactatgtaagtttggcattgattctggatatacaatgctaaacgcattctataacttatagtatagatagaccataaagctggactgaaacaaatatggatatcaacatctaatatgcaaaatcncgtgatatgcta

SEQ ID NO: 16070 - DNA, 1370 bp, Arabidopsis thaliana landsberg
agaaataacaatattattacagaaacccaaactgttattactttttaccttaattttctttctctgctatccacaaccgccatgacttttaggctagaaggacacgagcatcgtgtatccattgttagctctggtgatagtttggaatgtgatgcttgcgatcgatcgtctggtgacgggttctcttgcagtgaatgcaagtttactgttcaccagaaatgtgcgtttgtgttgacagaagatatattccaccacccttctcatgctgggcattgtcgtaacttctcacaaccggagctcctattcacaacaactcaaaatgtcatctctgcggtaaaagcaccgaacaccttctttatcattgttatgattgtaaagtcaatttggacaatgattgcatgattgatggcatatgtgccctagcccgtctgagtaagccattgcatcccattcttctactcatggttgattttagctctgatatgtggtgcgactattgttatgagggtggcaaacatggttatttctgccctcgttgcaggttggtgattcatgagagttgtgtctccgtatttgactcaccagagattattcatccttctcatcgcagtcaccctcttaagcttatcaccaatggagctccagattacacggaagaccgaagttgtcatatatgtggaaaagaaactggaaacttactataccattgtgatatttgtaaagtcaatttggatttggaatgcgcggttgaaaatcccataccagtcgctctttcagatctcaaggtccatgagcatacactcacactcatgccaagattgatatccttcatttgtgatgcttgtgggacgaaaggcgaccgtgctccttacgtatgtgttcaatgtgatttcaggatgttccatcaaaagtgtgctcgtttaccacgtgtcattcatgttaatcaccatgatcaccgtgtttcgtacaagtatcctcttggtcctggagaatggagatgtggagtttgttgggaagagattgattggtcatatggggcttattcttgttctctttgtcctaattacgctattcattcactatgtgcaacaaggggcgatgtgtggaatggggaagagctagatggagtacctgaagaagttgaagatatcgagccattcaagaggaatgatgacaacacaattactcattttgctcatgaacataacctcatgagcctccacaaagacgatgaagaaagcagcttatgtggagcatgtgttcatcccatcggctcttacacattctacaagtgttcaaaatcatattgcagttttattctccatgaaaggtgtgctaatcttgctaagaagaaacgacattttcttagc

SEQ ID NO: 16071 - DNA, 896 bp, Arabidopsis thaliana landsberg
tctaagttttcattgttttcatgaaataaaatgtggtgcatttcttttgtactaacagaggtgtcaacattgtgattcaggttacttaagtaagctaggaaaaatatggttgccctctggttcatacttttaatcccctttttcattttttaatgtttgggctaaaacaagtttttggggttaatttctccttaatctagtatactggtgagttcaacattttagaatagggtagttagtagttgggcatgcctctgatttttcttacccttagtctaaaagtatttctatttttcctctaattatttagttttgggcagtatacttatttaaatcaaaaccttaaaaattattgcaaggtgtttggaaattttcctaagtagttcacattatttagaacctagcaaattagtttgacaaatttggctggataaaattggagttatgaattttagaagctctatttgtatttaaaagaataatgttttaaagattttttgaaaaaccagtttagaccgaggaccctgggctgttcctaaaacaatcctttaacttaagcccctgcgcaactattcacctgagtctttgaccattcaaaaacccccctgacatcttttccttcttccccgaggtccctccccccttttaaacagtacccgtggaagtaaacagggtgtcgcggcttaccggcggcgagggaggtccggcgaaggacggggttacgctccgggaagtccttgtggtcacgtcgaggtacggctcgtcgtcggtgatggccggaatcggtcgggccacgtgcgcaggcggtcgggctcgtcggcggcgtgtgctccggcctgctcacggcggtagggttcattccaagggcacatggagcttcacggagtgctaaggag

SEQ ID NO: 16072 - DNA, 1162 bp, Arabidopsis thaliana landsberg
gttgaggttgtgtgcccgcgcacatttggctatgcttgcgaaggcgtttggctatgcttgcgaaggcgttatgtacttggtcaggtatatttgttatgcttcgtccggctgtgcctcgggaacttctgcgcggatggtcttcgtagtagacttcggtttttcgcgctcgctgtgctagtccggctgcacccttaggcgacttctgcgcggctagtctttgcggtagactttggtttttggcacttgttgtgctagtccggctgcacccttaggcgacttctgcacggatagtctttgcggtagacttaggtttttcgcacttgttgtgctagtccggctgcacccttaggcgacttctgcacggatagtcttcgcggtagacttaggtttttcgcacttgttgtgctagtccggctgcacccttaggcgacttctgcacggatagtcttcgtggtagacttaggtttttggcacttgttgtgctagtccggctgcacccttaggcgacttctgcacggatagtcttcgcggtagacttaggtttttcgcacttgttgtgctagtccggctgcacccttaggcgacttctgcgcggatagtcttcgcgatagacatcggattttttcgcacttgttgtgcttggtccggctgcacccttaggcgacttctgcgcagatagtcttcgcgatagacatcggattttctcgcacttgttgtgcttagtccggctgcacccttaggcgacttctgcgcggatagtcttcgcgatagacatcggattttctcgcacttgttgtgcttagtccggctgcacccttaggcgacttctgcgcggatagtcttcgcgatagacatcggattttctcgcacttgttgtgcttagtccggctgcacccttaggcgacttctgcgcggatagtcttcgcgatagacatcggatttttttgcacttgttgtgcttggtccggctgcacccttaggcgacttctgcgcggatttgtcgcacgcgagggtggctagcgcttacctcgcggtgacttcgaattggtcgaatgccgaagaccgttgtcgcggtcttttttcgacacatgtttttgcgggggattttctcacatatatacatggctcgctcgttaaaactcaccccgggagaaaagagtcg

SEQ ID NO: 16073 - DNA, 1089 bp, Arabidopsis thaliana landsberg
tcgcaaatgttgttacaaattaccgaccggtttccgacgaggtattttccgacaatttctctacgcttttctgacgataacattggttgtgaaaccggttggaacatagtcggaaatgatcgtcagatcctcgtcggaaatagtttccgactattttctaacgaatattgttgtcaggcattacatcaaaacgttgttgaaaatcggtcggtgtcttcttcgacggttttccgacgacgttattcccgatggattcccgacgaagtatttccgacgtgatacagttataatagagatcaatttttccgattttcaattagtgtgacgatagaaggtgatttaaaacccagaagttgtaaaaggtaaaaatagctagtaaactgaaactgttgattgaacttttgattaaaatatgagtaatataacaaaaaaataatcatgttgaagaaatacatgttttttattcttttaaaaaaaagtcacacaacttgttacaattttaaaatcaataaacttcaagttacttttcttgcaatatctaatgcaacatataatttacatttactgataaccgtatagaacgtttgttcctcaatctaaattgaagatttcgttgaaccaagttccaagcagcagcttctcttcccaacatcgttcatctctattctgccactaaataagagaaatctcaattgttaaccaaatgtatcaagcctttgaccaaaaaaaaaaaaacaaatgtaccgagcctagttgttaaagaagtatatgaattacatttttaaagtaaagctacagattgaagaagttgttacatcgaagaagaaaaaataaagaattatttaggcacttatacggctaaattgcctatgctaaatgccaatgtctcttgttagatgttgtatacatagcgaactccaatagtgattgaatgagtttttggatttgagaaagagagtcagcacaagtgagaagtagatagtgagttcgttaagggagagaaaaagagatttcgagtcaattaaaaatgcagatgaagcggttagatgaaagtcgtggagtagaaacgtacggtgacgataacagatc

SEQ ID NO: 16074 - DNA, 1834 bp, Arabidopsis thaliana landsberg
atctcttgtctaaaaaaaggactaaacttgggcacaaagaaaccaaccctttttaactactactagaccaccatcatgttggtgtattgctctcatcttacttgagtattagagcatcctcattggacaactcttgatgtgtgtctttagtaataaaatcaaagataccctctcttttcggtgtctaaaatgtcttcctacacaaatctaaaattaaagacacccttcaatttattttatatttttttaattggttttatatttaaagacacccacaagaaaataaccaatgtgggttcttaagagaggtccggcctagtagtctggtactagagagttatcagaagaataaatcgtttttttctagagaccttcccaaccatattgtctagggatgttgtggtgggtaaaaaacctcagcccaacccaaaccaacaaacctgcccataaaaaacctagattaaaagaaacccgaataagatttagtacttgtgggtaaaacccagaaaaacccatgtaattcagaactaccagtggatacccatacttttattatgtctgatatgtatttaaatttaatcatgtattttatattttatataaacaactttatttgttacccttaattgattttaattctctactttcaccaaagtttttaacaaatttgtaaacccaatatccactcaaacattaataatttaaaagattatacaaatcagagtttcatcaaagtttcgctcaagcattggtgtctagtttttttatataataaatttacaatagtaatcacaaaatcaatataatttccaaaaagttaaacccacttcctgtctttcttaaagaaaaaaaataacactcaaaattgtaaagctaagttttgatatctaatatttatagttatcatatttgtaaaatttaaaattatgatttcatatcatctttgtgtgatcatatttccaaatcattattttcatcaaaccatcaagatctaaaaacgttttagttgatttttgacaggcacaagaaccatgtctaactttattcataactaagtcttcaatcaattataacattctcaatacatcgatattggtatgaaaatcatagatcatatcatgatataactatagaagtgagtagtttggatgagaattaaaaaagagtagtaggagtggagcaagtcttcgaacaaggttccatacaatctgcgtcattgccacatttggtgttacaatttgtggagcatatagcgatcttgccttgttttgcctttattgctttgtatcaacaaaaattaagtccacgtatatatatcagtataatatgtttaatcaaatattaactaaggaaataatttaagaggaatatatatggagtacttacttgagagacggtggtgaaggagggcgttggtcgggatcacaaacggcaaaacagtggtcctgacactggtaattatctttaccgcatttgatcatgcaatttttgtaacacaatttccacaaatgctcttttattgtttcatgaaaagccattccattacatgcttttagaggacatccaatcattatcaatgccaccatcaccatcaccatcatacacatttttcctgccattttctcttacaaacagatacaaaactcaaaagtaatattgatattcgttgtttgttctttgatatatgtgaatgcgatggaggagagtttatatatttcgaaatattctttttatttctagtctttgcgttataataacgaacgttttttttgtttaaattgcaattaatagctttgacttattcttcttacgccattttggaaacaaactggga

SEQ ID NO: 16075 - DNA, 1335 bp, Arabidopsis thaliana landsberg
ttaaaaattaaaatataagtttatgtggtttttggataattatgtttttaatcattttttttcctctagtaaaaatgtgcacatacaaaaaaaaaaacaaagtatattagatgacgtagaaatctgagcaaatatttctggaaaaaaactcagtaaagtttaattacaagtatatattaaacgtatacgttatcaaacttaactattatacatttcatttaatttataattacaaaaatcaaataattcatttgttaaattatacataatcatatctaaagattatatatatatatatatatatatataattagtttaaactcataattcttaatatgtttgactattgtactttctataccataaactctatactctaaagggtttagggtttatagtttagggtgtagagaattcaatgttgaaacttagtttattaataaattagctaattaaactttcaaagttatttaataatacaaagtacattaaattaaaaactaataaacatattacaaattatttttttaaagaaattataattgaaatttttctacccttaacccgaaactagctctaagccctttagggtatagagaattcatttttgaaacttagcttacttgtaatatataaattagctaattaaaccggaaaaattattcaaaaatactaaagaacataagtaagagatttccaaacatattactttagaaatttaaattacaattaattgtttttcattaatcattaagataaaacaaaaaatcgctaatcttaagacatcactcggttagctgaagtggcgtattatgagaccattggatcagataatcatctgattctcgacatctaaggcatcattaattatcttaattttttaattacttcacctaacaaaatataaaccacactgcaccacgacctttcgcctttcaaacatgattgcaaaaaaaaaaaaaaaaacagaacccaaatctttgttctctcagattgaaacccgactgtcgaaacttctcgacttcttttctctcgattgattttcagattcaatctactatgagccataagccctatattactttcctttgatctcatttgattctatcaacattttattcaactctctctttttgttttcactaaattcatattttatttacaggttcggagaatgcagatggagatgccgcctctgtacatgtacctgaagtttattctgtgaatccgagctactgaggacgtcgtaagttttactaattttcaactcatgaggaagaaaaataacgaaaacatatggctcatattattgttgtttttgatgattgtagtaag

SEQ ID NO: 16076 - DNA, 829 bp, Arabidopsis thaliana landsberg
gtcttcaaacgcttaaataattagaactgattagaaatgtctcaattattgttggttaagatagtttgtaaacaaaaaaaaaattatggtcaaatagagaataaatcaactcaaaacttgcaatttcataataaaactacgatcaaacgaaactccaaagtataataatgtaaacagcaaaatacaaaagattgatctttggagaaataagtaatttattttcaccaaaattatgtttacaactttcttctccaatttacatacacaattgacttcacacgttggttatgatcttagtgttgtcacaatgaaaatgttgatgacgaagaggacgaagacgatggtgaccaagaagtcatatccatcggataactccccaaaacccgtaaaaacgacgtaaactcttgaacctcagaaagcgcattctgagcacgtgactcggccatggaagcctcgaagtcgatataaaacatatactcaaaatgcttagccgtgcccacattagcctcatcgactagcctaataggaacattatggttcggcctagactcaatcttagtcaaactaatgttcctaaacgcaaaagcagagagaaccttaaacaaaacgcacgtgcctttctcgtgagcaaacactatactcgtcttaaacggccgatcagttctcggtataatcggttcacgcgccaacatcacaaagcgcgtgacgttactcgcgtcatcttgtatcccatcttccaaaatctccaatccgtagatctccgccgcgcgtgcactcgcaatcgcggcggtgtcacggatattattcgcagcgataaactccgccgcac

SEQ ID NO: 16077 - DNA, 520 bp, Arabidopsis thaliana landsberg
tcattttaatattgtataatgtacacttcaacaaatatttttatgtacgtacatagtatgaggtttatgtgatttaggtatttttagtatgtaactgcttagagcagtcatacacgtgtatgtgtatttcaatattatcgtgtacgtctacgggtttagtttaaaatcttatctattctccacaaataatatcatataatgtaacgcttactaaaaaatttcaaaataacaacatcaaaacaaaaagtatcacatatatcgtacgaaatacataacatttggctaactcgccgtatgcaccatcgtagatacaaaacattacaaaaattcgtaaaaaaaccataattctcttcaaaaaaaccacatataattttattgtaaccagaaccataggtgaactcaatgtccgagttaatgagacaaaaatgtaaattaggtacgacatgagagtcattgtttgttaggaatgtaattaaaaacaaaaacaatttcaaatacaattgtattatctccaatatcg

SEQ ID NO: 16078 - DNA, 784 bp, Arabidopsis thaliana landsberg
acccggaaattttgtaagtcaagcgccactgaaaagaagaaatgtctgaaaatgcttcagtatattcattcaaaatatagataaagccatataggcataagtgtttacatcaacagggaaaaaaaaaaaaacaagaagcaaagtgccacctagagatcacacagcaggctcctcttcggaagggcgcgtctcatcttcgcgcaggtttgagcttgcatgatcagtaacgccaacctcatctgcaaggccctcggccgatctattcccgaggctattgggaatcaagttaggagaaacaggagggatcttcaactcctcttttagctctacgacgagcttgttgtatgtcgcctcggcatcagcgtattcctttttctatgccagcacttgcttcttctcctcttcaaggcttcccccgccttcaagctcggtaatcaactcattgttggctttcgcctagacaaagagcatataccggtcgcttacttgttcgaagagaagcgtcttcgcctcgactctctcagcaaaagttgccgaatgtgaggttttgatcctcaagaacactgatcgatctcactttctctcacgctcgtttgatactagacaccgagaaacttagaacagacaaaagagaattttacgagttctgattccgatttggaatcctacgtctcgccgtagatttctccagaatccactaaaattcttagctcaaaatcgagctctctctctaaaattgttctgctcctctctctctctaacctctcgattcatcctcttgtgt

SEQ ID NO: 16079 - DNA, 5261 bp, Arabidopsis thaliana landsberg
acgctattgctttgatttcggaattacccataattactctcgtgaaatttgtcacaattatgactgcgtatcaattatttactattaaagcgaggaaactcttccacttcccccacgacttccaagacggttccatcatcgtcactggcttgcgtaaggtaaattcgctttactctctccttattacttttcacgcttcatttttcttttagagcaaagtccctttcttcttcctctctacattttctatccttcgaaccctcagtttactcattctctcacgatgaattctgaaaatgaaaggcccgaatccccatctttcgaaaatgtggttctagtaacgacctttgcacccggccgaacaatatcgctggtcctcactatcaatccacatgcactcttcaatccctcaatcgattgggagagctctgtcggattccggctgagattatgagagattcgcagatgtcggagcccactgaatcgccggaggaccaccgtcccgggttcttttgcgtctatgaaatctacttcaaaggctgcggactgaccttccctcttcctgaagccttggttcgatacttggccgctctcgaaatcgccctacctcagttgacgcccaatctcctccgcaccatcttgtgcattatcaccattgcggcggaggccggtttcgtcattagggttcccgaattgaatgaacttctcagtgttaggagttcgtcgaagaaaactgggtacttctcggcgtacccgaacgccaatcagaacctcatttcgaatctcctgaacaaggatgagaattggcatcatccttggttcctggtcaagaaaacccctgcctcgattggaaacctttccgatatgcttccatcgaagtggtctgcgaaacctggtagaaattaggtcacgtacgatttttgcttatccttgtttctgatttaatcgattttattgctttcaactcgcagcttttatcactctaaccctcccgaatttaaccgtagagttcgtcgaatttttcaagatcgtcattgaaggagagaccctttggaactccttcactctcgaccggttcatagaagccaatcacaagctcatgacgaatcctcccgggcaactacttcaacttccaccacctccacctctgcctcacggaacttctgctagggccatcgcttctcgtcgcaagactttatccaagtcgatgacagaggcttgtgaagcaaacatatcattccttcagtccacagtcgacaagaaggaatacagcagaactctcctggttgatgatggcagtaccgaaggggcaagatctggcggtgcttacagacccactcctcaccgcgaaggtcataacggccggtcatcccacaaggagcgatcccctcgacgtgactcaccccggcccacttcccgaactggactcagcagcgagccaattgctgacctgattcggaagaagagagacaaaccatcccgcagtagctcctcccccaaaagagacaagacgagggcccgaactgaccgctctcctcgaccgtcgccgccacccgatctatgggtcctcctcctccagtcaccgtatctccttcgtccggatcaggaggtgaaaaggcagagcggagtgctaaccctcggcgggatgaaactgaggtccgagatgccggaactaaagttgttttggttcctcagaccaagtcgctcacgggttagaaatttcctcccattttttgttatcacatttttaccatttcgccttattgactcagcattgttcgaccggtccgaccttttttaacagcgatggaaacggagggaaacgtctttcgatgtttcttaacccgaaaagacaccatcctaccagccttcgatagatggcgtcctgcaattcgcatgcaattcctactccacgcccatcactcatctcgggttagttcctttttcccacaatagatcttttaatctttgctcctttactctatcgctaaccccttctcgttattatctgatccaggcgaacagcgaactcaatgacatgattgagtactatgaaaggctactgcttgacagagaaaaagatgttatggcgtggaaggataagtcttcatctcttgagtctgatctccgctcttcaaatgataccaggctgaaattggaggatcaattggacaacctctccactgaaatcatgaagtccaacggtgagatgcaggagcagtaccaaaggtacgacaagatccaagaagaactctcaacttctcgggacagactttcggaatccgaatccagtgcctacgagttgtccaaccagctatccgagttgcagcttaagtacaaagcggtggccaactatcgggacgctgagttggcgagttcggcatcaaaggccaggaaagaggtgaaaggtcgcgggatagaattgatccaaggggcaattgtcttcatccaaaccgaaaaggctagaacgcagctggaatcatgaagatgacttttttgaggtacgagagtaatctcctccttttggaccaaactcatgaagatgacttttttgaggaacgagagagggacgagttgaagtccgtccaggaagagaagcaaaatcgtttagctgtccttccttcctcgtcgtttaaccctcagcagttcgaggagttcttcaccgaatcgcctcctttgagcgaatccggtttagactaggctggtaaattccaactcttctccctttttcttaaaaaaaaaaaaaatcgatccacagcgaattactcttatgttaacccgaagtaattgcctcaggtgttagcggttccgtggaacccgaaagtgcctatcgcgccggcgtcagttctggagacggtaatcactccgcctaaaattcttccatccacgaactcggagatagtggttatcgaggatgatgatggctcagagtccgtggttcctggcgagcagcctgctactgatgagccgggtgagactgagacagctgccgcagatcctgagtcagttcgaaccgaacccgagatacccgagaactcgtagtggctgtgtcaacttctcggcttgtcccttaaactcgaaatttactattgttttttttttaattactttacttgcctaagtaggctttaaacaaatactttgcctaaggaggcttttaaacctttcctttaagactacgatcccaagagggttttctttgtgctaatcttgagtatggatttgcaaagtccatttgtttaaatagcgtttttgtttaaccatgtggtcaagttacgggacttgtaggttgatcagacctatccctaaaaatgcggactttaatccgcgaactccccaactttataacctaaatcctactttaggcttccggaatccggttgcggttctagttcttatgctcaatgatacacaaagcatctagtcatatttgactacaaatccactagcaaagcttcttctttattcccaaagctttgatggtgaagccgaaattcttatgaatttttggtgttttgaatcgtttaacaaggaacccctactttacttttcgagatcatgttggggttctagttttctattcaatcatacagatgattttacatgtaaccctatatcactctaacccgctacccagcattctgatcgcttcatatgggattacacaagaatggattgagtatttatgttgattttgaataattttgaagtaatatggcaaggtaaaccttatataggctgaaaatggttaaacccataccaacctactgagcccaataattggcctcaccattttgctggtcaaacctatgttccacccgagaatctaagaatgacacgccccaccactagcatatgctcatcttcttgcctctgttttattaaaaagtaaaaactgtctatcgatgtcatatttgtctgtgtgtataaagttaacttgttgacaatctggattcatagggtgccatatggttcacatctaatttaatgctttcattcgatcgaaaccttcctagtatttttagttttcaagtttgtttcaccaatgaaccaggatctcattaattaatgttaaatgtaagctggtcaccactttctcaggttgttttgagcttgagaatattgtttccttgtacatcttgagaaagtgaagaatccgctctgagagatttgtctttagataaacaatcgaattttggctcttaatgatcggattagttcttggacgagtgtaagggttttgttcttgtcttcataataaactttttgtttttttgttcttttgtatttgctttcttggctggtaaagtgaaaaaatgcagaaacggtggaagcaagtgcagaagtagacagtgagtgtcaatctatagccaggcttgaagactttcattctcgtctattctgcattctgtgatccacgaagagtataccactcaataaagtaaagtaatccccaaggcacagccactgaggttgttacaggtcaggattctactttctaaaaaaattggtatgactgatggatctcagcatgtgggtctaatctaatattggatgtgtgatagtctcattgtcctgcatgcactggacttgtaagttacaagttgtaaccccaaaaggtgagaggatagtggatacagtgacttacactatctgccaacagtaaaaaacgcaaataagtgggatctttgattggcattttgattagagttgatgttactgttagaggagagcacagagtcacatggtcaagtccctctctttcaatcctttttatgtctttaaaaaaaaaaaaattattggaagtaaatgaaagagaggcagaggagatcttgggtagtgattgtcctcctaagatttggtgtccttctctgtctcttttgaaattaactgcacgaaagatatttgtgaggtacgcattccttgtgtttcgttttcaaacttcatcatctcttctttcaaccatttttccttttctttacttaccgtttagaaatcttgaaataaactgaccaattagatatttcagtaaaaaaatcctaacatctaaggatatagataggtgcaactcggccacttacgaatgtattcgttgtgttcttttctgttttgaagttggatttgaaagaccactacaataatcgagtttgagtgttgttgtcgttttattgtgaaatataaggagtgacgtgtctaatgatctagagtcatagtgtgtatgtagatgaaatcatgaaaagcataagttggttcagatccga

SEQ ID NO: 16080 - DNA, 792 bp, Arabidopsis thaliana landsberg
tatgtccttaaggtcttgctcttctgtttcttgcaagtcatgaatttgttttacagcaattatgtagatgaataatcttcagatcatgaatgaggttttttaatatctgaatcgatgatgtcaatggaaagtggtatgatgccaccgatgatgtatacatcgaatatgcagcagttcatgccccacatggccatgggtatgaatcagcctcccgcatacatacctttccctagccaggctcatatggcgggtgtaggtccatcatatccaccaccgcgatacccttttccaaacattcagacctttgacccatccagagtttggttacaaagtccacagcctaacccggtgtcgaaccaacctcagatgaatccttatggtcagtttgttggtcaccatcagatgcaacaatctcttcctcctccattgcaggtaattctttcccaatatccattgtgcttattcctctgttccaacaaatgacgttgctcacaagacccatcctctttttaaaaatgtttttatagagtcaacaaataacatcacagctgagtttaggccaggcaggtagtagcaaggaacctaatgatcagaacaaccaaccaacaggttagaaagaatcagggaatggttacaagcttttcttgagtgatgactgatgagataatggtcaaggtttgacagacacatctctattgctttgttgcaggctgatgttgtggaataaacaaaaaggttcaattctatttgacaatacaatttgaagacagccaggcgctacatgtgaaattt

SEQ ID NO: 16081 - DNA, 1037 bp, Arabidopsis thaliana landsberg
  unsure (1)..(1037): unsure at all n locations
acttgcttcatacgcgacctgatctctctttttctgttggtgtactaagcagatatatgcaggaacataaggaatctaatggtgcagcactcaaacagattctcaggtacttaaagggaacataagaatacggcttggagtttgctcgtgggactgaaaaagatcttgtaggctatagtgatagcagccataacgtggatgaagatgacgggaaaagcacaactgggcaaatcttttacctgcatgaatgtctgattacttggtgcacacaaaagcaatatacggtagctctttcgtcgtgtgaagcgtattcatggcagccacagaggcggcaaagcaatcactatggcttcaagatcttcttagtgaatttaccggagaaacatgtgagaaagtgacactctgaatcgataccaagtccgcgatagctctcgccaagaacctcgtatttcacggacgaagcaaacatatcaagaagagatatcattttattcgagagtgtgttgagaatgagctagtggtcgtagaacacgtttccggagacgagaaaaaggctgatatcctaactaaagcccttggaaggatcaagttcaaggaaatgagaatttttatttgagtncanaatttgaaagaggttgagttcaagcttaaaggggagaatgttgaagtaagcttnnnnnnnnnnnnnnnnnnnnnntaaagagattaggattagaattagacttttgtatttaggaagtttgcctaaataattatatgtgtgttttcctaaaaggattaggaaatggtctagttcttttcttatataagagagatgccaaggtgtggtattcctcaagagttttgagagattaagagagtttaggttttgagtgatattcctaaactaataaaagggagttattcttttatctttgtatagctaaataatttgctcacgaaaaaatatatcaagcaattaagttcaaacaacaatcaaggtacgagaaagtctatgtacatagtggtgtagactcaaaaatatataaaagaaaact

SEQ ID NO: 16082 - DNA, 1113 bp, Arabidopsis thaliana landsberg
ctcttcttgctgatatgagtcgccatacttgtggatgtgaaaatcagccgatctctgaaaccgtaaatgttgagacgaagagaatcggtaagctcgtgttcgttatcagatatgattttagtatttatattgacctaattcagaaacttaggtctcacatccaattgagtttgggcctatttgttgaatatgtcagcccaatggacattttatgggctttaatatattttaaaatttaagtactaatattatttttaaaaaattaataatttcatttccgacaagaacatctgattttgaagctctgtcattttccgacgacggcaatggcgtcagcttccaagaacattcagcaaaaccctttctcctcgaaaccaccacggcctccgtattcctccggcgctgcatcaacaaccgccgtggcttccacctcagccgagcccctaattcgaaactctaccttaaatcctaaccctagcaccagcggcttaccgtcgacatcgaattcaccgattacgatgtcacaagaagatgaaatcctcgcacgctccagtcacataacccggtcggagcttctcaaacgccgatcacacaacctgaagcagctggccaagtgttatagagacaattattgggctttaatggaggatgtcaaggcacaacacagggattattggtggaagtatgggattagtcagtttaaagacgaaaataatcaatcgaataagagacggaggcttggtcaagagggagatatcggagatggtggtgatgctgttgaaggtagtggagacaatgttactaacaatgatggtgttaagagtgatcagtatgcgaatagtaattgtgggagttgtatgtatggatgcaaagctaaagctatggcgcttacgaaatactgtcaattgcatattctcaaggatagtaagcagaagctctacactggttgcacaaacgtcattaaacggtttgtttcactttcccttatttggttttaaaattctcgtataaaccaaagtaattgatgcttcaagttgtgttctttgcataatatagttggtgaagatgttgtagtgatgatgaattgaactgcaagctgtttgtgtatgtagt

SEQ ID NO: 16083 - DNA, 2751 bp, Arabidopsis thaliana landsberg
tggaaaacgtcgttgacatgctgaagatggctaagggctatcttgcacggtttgctgttggacgccttctacagatgaattaccaagtgaggaatggaatgatggcagctggagcttatgggcttgctcagtttcgtttgaggttctttctatggggtgcactccctagtgaggtaaaattcttaatgttatctctttgttttatattaatgaatagatgctgttcttaatttgtatctttctgtttcagataattccgcagttcccacttccaacacatgatctagttcatagaggaaatattgtcaaggagtttcaggtaaactggtatattagtacctttcaatttgttttagcaaattctcatatttatttgtaactaatgcagggaaacatagtagcctatgatgaaggacatactgtgaagttagcagacaagcttctgttgaaggatgtgatttctgatcttcctgcagtaagtattgatgtttttagcaaattttgactaaaattaggtacagtttgtcttgaatattttctaacttcctatgtttttgtattaggttgccaacagtgaaaaaagagacgagattacatatgacaaagatcccacaacgccatttcaaaagttcatcagattgagaaaggatggtaagattcttattatttttttgggcaaacagtgtaaaaacatatatttgacaactattatggcaactgatgttcattaacaaattgtttctgaattttttcaacagaagcgtcaggttcacaatcaaagtccaagtccaaaaagcatgtcttatatgatcatcaccctcttaatcttaatataaatgactatgaacgggtttgtcaggtccccaagagaaaggtacaactttctttatactcgattgacgatcatatatttttttggctctggtctgttttagtgtctaggaatattctgattatttcaaaacatcttttggtatcagggagcgaattttagggactttcctggtgttattgttggacctggtaatgtagtcaagttggaagagggaaaggaaagggtcaaacttgaatctggaaaaacattggtaagaatgatcatctcttttttttggtctcatatcaagttgcttttctcctgattggctggctatgttattcaaacaggttcccgattatgccttaacatatgtcgatgggaaatcatgcaagtgagttttaattctcttttcttcgtctctgaaaattctgtatttgactattgttttctgttatggaaattgacttaagcccttcgctgttttcagaccttttggtcgtctttggtgggacgaaattgtccccactgttgtcacacgggcagaaccccacaaccaggtgagacctctcatgacaatcaagtatttgttctgaattttggctagttgttattctagtgttctaggtttgcatagatttattggtatgcatgttacactggaaccaacttaaagagtataattgtttgatgttgctggtgattgattgcaggtgatcattcatccagagcaaaatcgggttttatccattcgagaaaatgcgagactccaaggctttcctgatgactacaaactctttggcccacccaaacagaagtgagtattgttaagaccttgagtttatgtgttcttggtggatttattgctgctatagttcttaagactaatcttacataatttctgtttttcaggtacattcaagtaggtaacgctgtagctgtgccagtagcaaaggcccttggatatgctttgggaacagctttccagggactcgcagttgggaaagatccacttattattctgcctgaaggttttgcattcatgaagccaactcttccttccgagcttgcatgaacactgttgattcatcgcattcttcgatttatcttctattcattgttttcctaggatttatcttagactatttgctgcggagtttggatttgttttgtttaagtttcacgactttcaagttaagtactgtgaattgctgttaactttgttttagtcagatgttacggatttgtgggattatctcgttctttttgtctaagaagagaaaactcatcgtcgggtttataactgttcttgattaaaggcaatgttggattcactcggctacaaaaactttgtgcctcttaagatatggtccaatttaataattgttcgttcggcaaatgtgatctgttttggtaaacactgggtccctcttaagaatgaattctcgtaggcttattattaattgtaccatatctttttcagttcgttaactttcaactctacataaaacacaagatatattcttaagaggcacaaagtttttggcctaacgtacttgaattcattaactttcaattttacatagaacaacactatacattcctttttcgttttagtaaactgttattacgaatacataaaaccatacaaaaaaaaccatcaaagtaataagtttaagccgaattgttaaagacttaaagtaaaacaaatacttttactagaatagagaacaaaccaatgtttatggatcatagaaaagactataatatagacctctctatcgcagataccatataataatataccttatcaaattgctccttagttccgtatacttttttctctcttaggcactctttccgagattctatttttggctaaagggttttggaaagtagatatattacattttccctataccaaaaacatctattct

SEQ ID NO: 16084 - DNA, 455 bp, Arabidopsis thaliana landsberg
agacgattgaagacgacgacggagagaagaggaagaagtggagaagtgaaaagggggaagaattaggtttttacttaggttttttctgtagttagggtaaataatacaactgggccgagtatttacatttttctttgggcccgagcccaacaaattaagttttcgtggtttcgcctgggtttttcgtcatttcgtcatttttcgattttaataaaaatcaataatattattctaaacataagaatggcacgagtgattatttcttttccattagtggcataagaggtgagctctcgtgtgtgactgataaaatgaaacaaacgaaaaatctttcccggtgacatcatcagccgccggcgactagctttttaactctggtttgcaaattcaaagggttggttggtggctaattttgaacatatataaatgtcattttaaaatatttttaatttcat

SEQ ID NO: 16085 - DNA, 528 bp, Arabidopsis thaliana landsberg
caccgcggagacgccagacaagtcaccgctaccccaggctaagttttccctttaaggcccaccagagtgtatgagtctgcagttgcctcttagttgttctgcgtagctccgagcataggctgcaaccgtctcgtcccactgcatgggacctacgcctaccgctcctcgtgcctggttgtgaacccttagataatcttgtgggctatcttgagctttcgagggaagaacaagagcacctacaagagctacaaagacgattaaaaatcgagaatagccaataaaattcatttttctaagttgataatggttattgctgtgttatgattctggggttcgtaaacatcgcttatatagagatttgaaaactatttttttcttttttttttggtaactatagatctcacgtttttgtaaatacatggtccatgtgtgagtattttagtaatattcattgcaattgtccaaatgaatagaagttgttttcgtaactatttttttgtcaatcttgtccttacacacatttttcct

SEQ ID NO: 16086 - DNA, 1239 bp, Arabidopsis thaliana landsberg
tgctctcatggaatgatgacatggaatattacatccgacgtcgttttgaattgatgaggtgacaactaagccaccaaacgaacatttgataactcagccatcaagcaaatctataagtcagtcgcaacatgaatactattacagtaattaaaaaaggtaagtcagccgtgtaatgtcgtaactcaactaagtcagccgtaacgtttaaaaactcggccgtaactgcatgctattatagtaattaatcttttgcacataagtcagccgtaacaaggctgagttatttagtaatcgagctctttacaactgatttataacactcgatcataactcaactgtcacatcatcccataactaagccgtccaaaaatataactcaaccgtgtcgaggtaataagtcagccgttttctcataactcggccataacgttatctgggttatgctataaattcttataactcggacaacattccttaactcagccatacagttacgcaacattttataaaccagccgtaacgtccggctgagttatactcatactttgccgttttgttattactcatatatttttgtcgtaagtcagccgcaacataccgtaactcagccgtaactgccgctgtatcgtgttacggctgagttcatttaatccacgtcagcaatttctgacgtggcaatggcattccttgtaattacgttttttccggtaatgtttagtaggaacacgctggatatacaaaaaaagacgacaatatgacagtaataaaaaaagttccatctggttccgttaatatatgatttttcttgaatttgtcaaaaaaactgttgtacctagcttaaataagaagttaattggccggtggtcgtgagagagatttagatctctccggttgattgtttattacattttctgttttctcaccagtcctttgattcgtaaatattagatttttgatgaagtgatttatgagagagattgttaaagtatagagaatatcagtttttaaaaaaacctttttcgaaagttctttctggttaattaaaatgaggtcttctttcctggcgatatgttcttacatcatgagcaagtatgtgtcttattgttgcacacatatattcatatcgcaaatttaatcaagatctgattttaaaactatatttattctgtatagactgatcacattaaccataaagaaaagttgacaaagataaagtgattcaaagtgccctgataactg

SEQ ID NO: 16087 - DNA, 1534 bp, Arabidopsis thaliana landsberg
ccagaccgaatacgccaaacacccaaataagaattttccttttttatacccttatttttgaattacctccccagtggttggtcatcaaattaatggctggactgtagactatacaccaatattacacttaaaacaattattgttaaagttttgaatttgcaagcttctcttgcatttgacagatatgtagacaaacgagtgcttagataacaatggcgattcttggcaagataaatcacccaacataactgcttgcaaggtacttttaatattcatgggaagaatttctgttatatctattaatctggttaatttgtaggctacgtttcgtggaaaagtatgcgtgtgtcctatagttgatggtgtgcgattcaaaggagatggttacagccactgtgagcgtaagtactcgggtcatcttttgaataatgtttatgattatgttgacttatgttatacaatagcaattgagaatggcaaaattcgtttaagttgtggtcttacagtatggcaagatataatataatttatatattcagtgaatcgtaaacggatgttttgtttcacatgtgtttggtgaaattcaaaatatgatcttcgtgctgataacaagaactttcatagcaaaatatactcttagatgactttggaagtgtgttctttgtcgttgttgttgttgttgtgcttcactctttcacattttcatacgtatttggtggttgcattgcagcaagcgggctagggagatgttcaatcaacaaatggaggttgttggcatgaagagagagatggacatgcgttctgtgcttgtgtggttagtggtttcttctgccctctgcttcacttttaagtgtataatctcacagtttagtaagatacttctgtctcaacttgtaatgccttcaggacaaggacagtgttaagtgcgagtgtcctccaggatttaaaggagatggtactaagaagtgtgaaggttagaccctctgaaaaaacttgaattacagtactactttgttctagttctaatcatcttataaggattttcgtgcttcctgcaccagacattaatgagtgcaaagagaagaaagcatgccagtgcccagagtgtagctgcaagaacacatggggaagctatgagtgctcttgtagcggggaccttctctacatcagagatcatgacacttgcatcagtgagtatttttttttgaatatggaagtctaaagtttgattattcaaatagtgtttctcccacctgttttccaattgttattggttctatttgtcggaatctaggcaagacgggtgcacaagtgagatcagcatgggcggccgtttggcttataatgttatcattgggacttgcagctgctggtgcatacctcgtttacaaatataggctaagggtaagcttttttaatctattttgctcttttgttttctgtcgcgtaaatagccaagattaatcttgtatttgccatattcgttacttggggaaacttgttctaaccttcctatgcccctggatctacagcc

SEQ ID NO: 16088 - DNA, 513 bp, Arabidopsis thaliana landsberg
aacacacaaaacgacgttcttttgtctctcaataaacgacgtttttttgttttaacagagcatatacacgagacagtgaacgcgcgaaaataattctgttaacctatttaacgacatgactcaaatgggaagtcaacaaaaactttgtcatggatcatcgaaagtcaacaaaaactttacgatttatttgtcttccgtgaagttcaagattaaatcgtcccaaattcgcaagttggtgaatttttttgacatttttcccaaacaaatactaagaagtaagagattattaatgactcattggcaattacagaaaaaaattataaaacatcatgaattcaaacaacgaatctcggttatctctttcaccatattgttaaatattcatcaaaatctaaaacatcaagaacacttagttgagtcaatctattaatataactaaaactcaattcgaaaagtttaatcaacaattcaagacttttaagttttaaaagttccaaaaataactcaaaaagt

SEQ ID NO: 16089 - DNA, 1353 bp, Arabidopsis thaliana landsberg
cattcatggttcaagtttttttctataaaaagaaacacaaatcataataaagatgtagacaaagttatcataatcgatcaagacgttaaaaagaaaacactaaaaaacgaaaaaaagaaaaagaaagctagttaggtttttgattcatgggctcattcaaaagcccattgattctccttacgaacagcttcttcttcctcaggtgtaaaatcattctcaatgttgaaagttgaacgaatctcctctggagtcttgcctttgatcatgtccgcaacagtttggcatgtgagatcaagcaagctttttatgttgaggtaattcgcagcaaggatgagttcaaagatggtggattgttcgagatccatgaacttctcgtcccacttgttgagatcctcttcagagataggattagcctcgtcgacgtggtgtttcttgcagtactcgatcactttcacaagaatcttgctttccacgtttgcaagagggattccatcagcaacgcaatcgtcttcaaccatatgcgctatggtctgcgattggattgctaccgcttcttccacctcaaacgactgaccatcggagctcatcacacgatcatcttcgaagacattgtgtgttccttgtgaaggaggtttttcactgtgaagcaaatttgatgaaagatttaagaatttagagagcgaacaaattgtgttaaggtgatgaagttgtgaaaccctatgcgtctttgtatttataagccctagctagagtcggtgacaacaacatattataattccttttttaagaaggaaactagaatttaacgcgtggtacactacgggcaaatattttatttatatatataataattttaaattttaaattttatatttagtaataaagttatataattttatattaatcttgtaattaaaaaaattagtgatgataaaataataaaataaatattttacctgtgttatatcaatccaaacccgtctcgatgtatttcctatcaatccaaacccgttctgctatacttcccgtctcatgatattttaattttttatgtttaaatattaataatgtttcataaaggtaaaatatatcactaatattctttaaaaataataattgtttttgactttaatgtgatgacattctttgtaaattcttactttactaacacaaaagtactttaaaaagtacttcaaaaattttaatatatataatgttattttttggtaaaaattattataaataaatatttaatttaatcataatttgggattgatatacttgtgtttttaactaactattttttattttaataacctaaatttaggcatttgttaatattttttgaatctg

SEQ ID NO: 16090 - DNA, 768 bp, Arabidopsis thaliana landsberg
gtccataatctcgaaggaaagtctcaatctgtcaatcttgacaccattgtgtgaggaatttctcatacatcctatatggaggagtgcaccaaccaaatctgggagtatgaaataaaagttaaaaaacaggcatgtcaaaggtgaaagtatgaaatctgcattagatacgtattacttaccgaccaaagtatcggtatgaacggtgtcttcaataatgtagtcaaaaggtgtgaatctgttaaataaaacagtttcccttgggtcgtaccttatgaccgatgttgcttccatgaactcaatcatgtagtagtgggttggaatgacaagaaaagttgagattgatttccattgattctctttgagaatatcgacgtaacgttgagaaaaacgtattctgattatagctttaatttggattccatatgaaaacaacatcggagggtgagtaatatagggagtaagataagaataaggttaagtatgacttgtaagaagagtgaagattccattacccattcatcgacaaagacgacccgtagttctgtaaaaccttgtttacgttctaagaaccattacacaaatcttccatccagttatgaaaggagactagtcgcaaatgccgtggaaatacaccatggtgaaagtccgagtctttgaaaggtgaagaaatattttgattgtgatcttctgtttgtaaaagtttagcctttgggagtttattggagcagccgtttttataggcgtattgaaccgttgttaattgggcag

SEQ ID NO: 16091 - DNA, 363 bp, Arabidopsis thaliana landsberg
tcggacacaacgattgagactgaaccaaaagtaaacagaatatcctacaaaaattaatttttcaatatgttcccaattaatagtattttccaaaacgacaaattagcactagaatatgaacgtacatgcttatgatatggtattgaatcatgcaagagaaatgtctcatgtgtatatgtgtgtatttagatatgaacctgaagatgattattggagagatcaagcttgcaaatctgagctaaattgagtgaaggattagggagagactccaatgccatcccactcaaattcacaacctctagcctctcttcctcattattattgaatgatggtgactttggtgatgatggagacgatggtgat

SEQ ID NO: 16092 - DNA, 832 bp, Arabidopsis thaliana landsberg
tgttcacgggtttatttatttgatacaccgaatcttgtttgcttaaattacactgcatttgttcatgacaactttccattagttaatttggaatacttagttgatgcacaaatcaagctactaagcatccgaaagaatcatgtttttcccaatcttggtaacgtgcgtaagcttatgcataccgtcaccaatgttaagaagctttacttatctcctcggactcttggaatagtatgctgttctgttctctcttataaaaccaaacattgaagttacatttgcagctggttaatgatttttttgggtctttttgttgttcaggtgcttggtctatgttctcatgcaatgccagtgttcaacaacctcacatacttagccattgagactagcgtggatacagcgtggcaagcaatgccggttctccttaaaacttgttcacatctagaaaccctagtcattaaggtataaaacataaactatcaaatgacttgaataacacgtttgtagagattcagttcagggaaatccttaatgtctcttctctgcttttagggtggtctcttacactgtgtcacatttgactgtggggacgcttgtaactgcatttctcgagaggagaaatgtcgttcactcgcattttttcctgtgaagaggttagagattcttgagtttcaaggacagtttgaagaaagaaacatgaccaagcctttttttgtactatttgccccggttggaagggaatggacttctatgttaaagatgatctttcacatttttcgcgggtttttaacctattcaacgacttatttggcgttccaatggttaaaataaa

SEQ ID NO: 16093 - DNA, 1460 bp, Arabidopsis thaliana landsberg
  unsure (1)..(1460): unsure at all n locations
acgcttcaagtgttgtgcaacctcaaggttcaacctttgaagcttttcagcttttgataaccctgacaagctgcacaacttacttgagtgattgagatcgacccaccttaagcatggtgtgtcctattacagaaaaagaagaaaacaaagtttagccaccagtcaaacaaaacctatccaggtaaattaaccattcacaaaagcaatcaacagattattcagagacacaccttgtcaccctcccaaagttgttccgtttcactgtagggcagcttaaggtcgacaagattaattgggttgaaatcgtttggaagtgtctccaatgggaatttcagccagtggaggcatcgaacttctttcaatggtagcttaagtttatcagggatgttgattttattgttggttttacattcctgtggacaatgggaattgtagaacttgagataccggagatttcccatatttatgaagtggtcgcggtctaagctcgtttcgtcttccacttcagacaagtctaggaaaatacctctaacattggcagctttctaagcaccaataacaaacacgacatcagtgaagagaaaaaaatgtaagttcttaccaataaaactctagaggaacttctggtctcaccattttattttgcaatacattgattatgcctcccttgattatgtgttgatggagccacagcctccgttgtctgctaccatcctgattagatgccttcagatcaacttcccttgaaaatttatataatagatcatgcatctccactcggccatcacaagtattaatcaggaacttatccgtgagagatttgactgcactcattgcttcagccgaaccaaggtcagatgaagccagtagactttctacataatccttgtcctgtgatctgaaacaggctatgtcgagaaatgcatctttctgcgctgtagtcaattcatcataactcacttggaagacactgacaatattagggctggggctctgtgcaagtttcttcattttccaattccaatgatccatacttttcttattaagctctccacccaatactttgagggctagtggatggcctctggcgtaatgtacaaacccttctgacagcttcatgaaatctttcttttgaggattggcttgatcatcaataaaggcatgatagtgaaatagttgtaagctatctctgtggttcaaattttgaaccatgtaagnnnnnnnnnnnnnnnnnnnnnnnnnnnncatgtcgcttgttgcaatgacaaccctgcttccctccttaccctccttaatccagtctagtatctcacgaagagcatctatttgttcccttttactaacatcatcaagtacaacaagcactttgcgttcatgcagatgactgtatggatctttgagattgtctacgtgaggattgtttaacttggacaactcgcctaagagcatttgaggcaagc

SEQ ID NO: 16094 - DNA, 2167 bp, Arabidopsis thaliana landsberg
tttagcacttggtaaatatactctttccatattttatcttttttataaagttatctttcatcatctatgataagaggtttacatttatttgttatttttgttttacgtcgtacatttatatatatatatatatatatcaaatattttgttaaaatgcaactaaagttaaaatttaattcaaatgtaaatatcatacattactgtttaaaaatattttaatgtcttgtaatttttccttaatgaaaaacatatttgatgtatcattttatgattaagttaaagggtcgcaaatagatatatactctaacaaaattcacagaaaatataaatttgaaactaaattttatgtaaatgtatcgatttcaaatcctaaacagaggacatagaagttagtaattgcatttgttttgccatactcatctcaatacatctcttacttatcatacactctttaatggagtttgttacatgggttacttaatgtaacagtgtttgctatatacttcattcgatgttattctaaaatcaacaaaattgttttacactgaaagcgaggagttcttttcagaaaaataatttaaaaatttggcggtccatttttaaaattttggtgattttttattacattggagcgaaaatgtagcaaaattgtaagaggcaaaaatgaaaaaaatcaaagtaaagaaacacaaaatccttaaaataaaagacaaaatgatatgacacgtcatcgatcctcgtcaaaaccgtcgatagaaaacaaatcaacggttagatttaatagtaatctttcttctcatcctttcgtctctactcctccgcctctctctccccaacctaactttatttatttctctcacaaaaattttattttcacaaaaacaaaaaaatcaaaagagctctcagagcaaaaaacaaaaaaaaagaaaaaaaaaccctaaatctaaatctcaccttccacctctgtcttttttttttttgttctttttttttttttttactggatcttctcttctctttgctctgcaaaaatctcacatccatggatccatctcttggtgatcctcatcatcctcctcagttcaccccttttcctcattttcccacctccaatcatcatcctttaggaccaaatccgtacaataaccatgtcgtcttccaaccgcagccgcaaacgcaaacgcaaatcccgcaaccgcagatgtttcagtcatctccacatgtttcaatgccccaccctccttactccgaagtaagttcaatcttaaaagcctcttcctttataactaaattcagttacttttttttttgttactaattttttttttctgtgtgtagatgatttgcgctgcgattgcggcgttaaacgaaccggatggttcgagcaagatggcaatttcgagatacatcgagagatgttacaccggtttaacttctgctcatgctgctttgttgactcaccatctcaagactttgaagaccagtggtgttctttctatggttaagaaatcttacaaaattgctggttcttctactcctcctgctagtgtagctgttgctgctgctgccgccgctcaaggtctcgatgttcccagatctgagattctccattcaagtaacaacgatcccatggcttctggctctgcttctcagcctctgaaacgaggtcgtggtcgtcctcctaagcctaaacctgaatctcaaccacaaccactacagcaacttccaccgaccaatcaagtccaggctaacggacagccaatctgggaacagcagcaagttcaatcacttgttccggttccgactccggttacagagtcggcgaagagaggacctggtcgtccaaggaagaacggttctgctgctcctgctactgcaccaatcgttcaagcttcggttatggctggaattatgaaacgtagaggtagaccaccgggtcgtcgagctgctgggagacagaggaagcccaaatccgtttcttctactgcctctgtgtatccttatgttgctaatggtgctagacgcagaggaaggcctaggagagttgttgaccctagcagtattgttagtgttgctccagtaggtggtgaaaatgtggcagcggttgcgccagggatgaagcgtggacgtggacgaccacctaaagttggtggtgttatcagtaggc

SEQ ID NO: 16095 - DNA, 1581 bp, Arabidopsis thaliana landsberg
catggggccaaccagtaggaacagtcggagcattttattttctcatgcggaatcaaataagagatgtgttagaatttagtacatttttcaaacataattagaaaactagtacagacactatttataattggaaaattccccatgttttactattctctactgttttgaagacattataaccctcaaatgtttcttatatttacgacaatggataattatattttacacattaaaaataaaaaaataaaaaaagttttttgtttgggcatgagaaacagagagcgtttgaaaaaaaaaagagatggtgagagagacgtgggacagggtaatctaatttaattttcttttattctttctttattatatgtcaccccttcaaaacttaataactaaaatatttatttgtaaattttattttgaaaaattaattatataaataaaaaaacttatttttttctctatgatatgcattttgtttaataatgtttaataattttgtttaatggttagtcttctttacatacaaagagctgtacgaatatgcaatctgtacagctaactgacagtattaaacgaacaatacataatatactacccataatagtattctgtacagcagtttcgaaattcagtgtataactgtacatctgttttgaaattctgaaaattgtacagtatgactacgaaaataaaggggatggatacaaacgaaaatataactttgtcgttagactgttgtacatatatttgtacagatattatgctgtacagataactttgtcgttagactgttgtaaagtgctttgtaataaaaatttagaaaatcatgaaacaaaatgcatatcaaattatagagaaaaaaatatagatttttatttatatgataaattttagaaaaataaaatttacaaatgaagattttagttattaaacttagaagggatggaaatgtagtaaagaaagaaaaataaattttttaaaaaaaatatacccactaaacaagctctatacacgtctctctctttctcacccaacaaaaagcccttgtttgtaatttcctttctatactctctaccccactttttttctatctcacaagttttctatttcacaaacagtaaaaccctgactatattactaattgtgaatagtgactgtactacctttataattaagtttcacaaatgtactagtttgccaacaaattctttattaatcaaagaaacaagtaggacggatcagaactgcaatgtgccatatctaggccttttgttctttatttgttatacagaactattacgtacacggtacatctatgaaggaatgcatcaaatttaccttctattggcaatagtgaaatcaaagaaatcatgcaaaaaatatttttgctttatgtgaatgtacataatgtaatgcaaccgatattttccttgcgcagtctagcgagccacagggttcacttcggtatcaaaggtcatggtcacttcgcttgaactcgttgaacccatgttctgacttttccctccccttgagttttctaaagatacacatacggttagttcggtaacaacttgagtcatg

SEQ ID NO: 16096 - DNA, 1046 bp, Arabidopsis thaliana landsberg
tggtgaatttggataaccaaatttcccggtgagaagggcatgacaactcaaaacatcatagcaatcatggaagccaattatactaatttaaggccaaactcacatatcaaagtagaaaaatgttgattaaattaacaaaaagtgttaaactccaaagctcttcaacaatctaacacaaacaaaaattgttcagacaaaatgagagacatggagctaaatagaaaacatcccacaatgcgagaaaaactcagagccttcttcctcttctaccaccctttctgcgggtactgtctgttgggatgggagtaacatcctctgcaacaacaagtacggtgttagaaatgatgaggaaacaatacaaaagggaaaatagctgagataagactatgggttatgaagcttaccaatacggcctattttcatgccggaacgagcaagggctctaagggcagactgtgctccaggaccaggtgtcttggtcttgtttccacctgtggcacggagcttcacatgcatggcagtgataccaagttcctgtgtttagaatagtagtttacattcattaacaaggatgaggaatttagttttgtaatgaatgtctcaggtcatatatgtagtaagtaccttgcatcgctgagcaacatcctgtgctgcaacatagctgcgtaaggtgaggactcatctctatcagctttcaccttcattccacctaatcaaaatcaaaagaggaaagttatcgaaatgtttaggacaacaagaactaatcaagagaattgagacactacataacaattcatctaacaagtcatatccacaaaagagtataacatttgtggtctcgttccacatatagaggaatgagcaaggaccagtgaagaaatcaaaagatgcttaccggtgatacggacaagagttcacgaccagacaaatcagtaacatgctggaattggagatatacgaggtcagtttcaacagcataaatgatgaaatggaacgcaatttagacagaacccacaatgaaagtgtcgttgaatgaagcaagatgt

SEQ ID NO: 16097 - DNA, 2253 bp, Arabidopsis thaliana landsberg
  unsure (1)..(2253): unsure at all n locations
tatattaaaataataactggtatcatcatcagatctaaatgtgttaatgacaaatttgatttagtttactacataaaccttttttaatctctaaaggtgaacaaacaacgaatcagccaactcagaaaaactcataatgaacaaagcaacgaacatagagaattccaagaggtatcagaatacaaagtaacgaattaatacatgcctttatcgataagtctttacaaaacctgaaactaataatatacttactcgagataggccaaaagaagtagaagaaattgatcttcacaagtcgcagatttctttgcgtcaggacactgaaaatataatattgatatttagggtttgaaggcttctttatatatactcacgtaaaccctaaatatttcgcagagtacgggacgaaaacaaagccattaataattgaaatccaaaagccccgttctaaaattcaccgcctatccctattaatccctgcttaatcattaggctctaccctatccgcttcgattaataactaatcccttaaataattagttgctttattattttctgtttaatttgacttttattctgattaatcttcgcctaatcttgtatatcctaactacttttagattgcaagtataaaacaatttttctttttgttatttagtcatttagtttgagagtttttgatgttttacaataacttaagttcaaaattttaataaaaatcataagttttgttttaaaatataattttatgtgtttactataattttgaaagcaatattagattaatatgttttaaaaatattaaaataattttaaaactaatcccaattaatccttacttttaatccgattttccaattaattgctaagtccataccgtgaatccaattaatgtctagcgatttttttaacaaagcccaaaagcaaacgatgtgctggtcaggtgagcgttagcgttttcgaatttttgtattttaatgaagttccaattctgtttcgaacaatgttttacttcaaacaattactatcggtttacttggtttttgtcattaaacccgtaattttttgcaatgaaattagaaaaaccaagcccagacctaaatttatcgatcgaaatatatatactagaaaatttatagttctaaagctaaatcgacaggtgcgactaaaaatcatactaaatttaggcaatttgtatttaggcctatacacacattcaactgagttcatatataaaaaagaaaaaaatcaccgacatttccaaaaaagaaaaaaaaaaccacaaaagtccaaattatgtaattccgtatgcatcatcaaaagcacagaagaggttatatatagaaattgaacatcacatttctcccatataaacgattttatttaaatcatgcaggcaaagggacgtcattaacagttttggtgctcttttcgtcgacactctttctaatctcttctgcaaattcccaaaggcaccaattcattgtcaaaatgtaacttgcgacttatgatccttcatccttggagaaatgttaaccccacgttacttacttttaaaactttatcgatgtaacttggtgcatagagtgtatctgatgttgaatagaaaaaaggtatttgttatgaagaagtaaagttatcagatgaacataaagagnnnnnnnnnnnnnnnnnnnnnnnnnnnnnnnnnnnnnnnnnnnnnnttcctaaaaatccataagaaaaaaggaaaccaaatacaaaaaacaaaaacgacgtttcatcctcaaaacttgtctctatggtttaataaattaacaataacaaaagacatctagagctcatcgtgagactcatcttcctcctcagtcgatgattctcctcctgcacctggtgctccgcctgatctctggtaaactgctgtgatgattgggttacaaactgcctctacctccttgagcttctcgtcgtactcttctttctctgagttttggttctcgtcgagccactccaaggcctctttcgtcgctgcttctatcttctccttttcatctccttctaatttgtctgctagcttgtccttgtcgttcacttggttcttcatgttgtacacgtatgtctccagggcattcctggcgtngatcttctccttcaccttcttggcttcctctgcaaactcctctgcctccttcaccatccggtcaatctcttcttggctcagacgacccttctcgtttgtgattgtaatnttctctgatttaccactcgccttgg

SEQ ID NO: 16098 - DNA, 744 bp, Arabidopsis thaliana landsberg
acctagctagacagattgcaaggagttgacacagcgtttggacacttctgatgagtgacccgctttttcttctgagttagagaattgtattctttaaattctagctttcctcgtttttctttatctgttattccacgtttatacaatgtccgtgctgattgtcttgctgaaagccaattgtgaggtaatgcactagctcatgcttctgatgtactagattagatggcgtaagtgctccgatgtgggattaattactcattaccttctaaatttcaatttctggccgacactataaggtaccgtaaacctcaagttattgtgtttatcagctttgtgggccgaaataaccccgtttaagttttttttttttttggtttctttattcattttcattttactttttgttcaaattcaaaaccttctgactggtcgagaaagtttgggtcacacttttttcgacgacaacattaagatgaggcctttgttttctgccatacatctaaagatagaacacaaacgtcaataaaagcaattaagatctctctttactgttttcccacttttcctttgagaaaactcaaaacaaagtaaacaaacaaaccagaaaaaggaatggcactgagaatgtgggcttcctctacagcaaatgctctcaagctctcttcttctgcctccaaatctcatctcttgccagctttctccatctccagatgcttatcctcaggtaagaaacaacatcttgac

SEQ ID NO: 16099 - DNA, 2249 bp, Arabidopsis thaliana landsberg
  unsure (1)..(2249): unsure at all n locations
aaacacacatttcaacaagttaaaaccacactgcagttgtttaaatactttaacaaaaatgatgtgtctgtgggggatagtgtctttcagccctacccagttctgaacttgcaagacgaatggaaagaaactctcctccaaccgaatatctaactgtgtctattagctcatgattccaaagcaaacaaccaattccagtaatatacgcaaaagcagannnnnnnnnnnnnnnnnnnnnnnnnnnnnnnnnnnnnnnnnnnnnnnnnnnnnnnnnnnnnncgtagagatccggaggctttacattggccagacgatagaagacgtctacaccttttccttgtgtctttgtagataagtttgcctgacaagataattctgtacgtcgcatacatccagaagtcatgttcccgcgcttccactcctccttgtattttggtacaaaccctttcatgcatttacactttgtgggattggacgtcacacacagcccaaaaggtccacatgcaccatacaaatcacataaatttgctggagtgataaagtccagaacccagcctgtcccattgtaccgaaaagtctttagatatccctctgatgttatgataactcgagtgagttcagaacttctctgtaaataagagaagagccctgttccatttcctacatcttgggaaaggctgaaaggacttgtgtatgattcatccattagtggtacgccagtgaaaccggtcttagcccatggaccgcttctcttataaaccgatgagcctctcatagtaacgatctgtgctggcacttgtggtgttagtcgaactacgaaatcaccaggggatggatcagtgtggcttttccacgaagacaatactcgcttctccccagtggcaaggttgtacatcagcgatgagtaaggcagcatagtatcaccaggattctcaaaactttgccacaaaagattttctgaaacatcatctactatgacaagatttcctgtatctaagagctttgcatgacacttattagatatggaaggtcttctggttgaccaaacaacatttttactactgtctagcaaaataagactaccatttctgctgatagtaagatttgccacaggggttgtgatcggcttttctctgttagccacccacacaaccacccgtggtgtaattttcttgaaccagatccctacatactgattccgagagttgttaggactgaagaatcctaactcataaaatccaccaggggaactcagagtttgtcccaatgtcaaaggacttgaaatagttatagctgcatagccacaacttaggaataaacttaaccacagaaaccaaggaaagagaacaataccaatctctcccaagtgtattcccatgtgttcaaaagagttctccttcagatctgaatgtatgaataaaattttgttttgaaaaactgaaaacaatgactcctctagatgtatcgtataatgttattacccataatgtgaaacagacagaaccactgcaggtcatcaattacagctgcacaacagatttgattcgctttgttcccctgtcgtgatgtgtgtttaacctaggtctctctctttagggttttaaagatccaaacgcagaaagcagagcttctggttgtagtagaggttctgtctgtttcacacataagatatagcattgttttatatttgacacctcgttctttgaataggcattataataaaccgaaatgatgaagaagatgcaatcttgtccttaggtgtgttaccatataaaaaatttgtaatactttattctaatttaaaaactccatcttacatcaaccctgtccaaaataagcctttgtctcacactacataacatatcttaatgatttgaatttttctatttttgtactctctgtagcaagaaataattttttttccgctaccaattccacaacaacacttttcagctttcatatgtactgggaaagaaaggaaaaacagagctgcaaaaatgaataaatttttacttggacgcttgcaaacgagacttcgctcacatattgtagctctctattcgtagtgatcagcttaaaccttgtttatgatacagcaaattgtagctctctacaaaggcttctacttcagaccaggtcttgttattcctcaaattagttttctctcccggatatataatgcacatcaatgttatacggtggagggtcatgtcaccagtaatctccgcacgaacaggcaccgtttttaa

SEQ ID NO: 16100 - DNA, 693 bp, Arabidopsis thaliana landsberg
tgtcttcgcgtcctcttctgtactgtagattgatgactttgaaaccttcgtaaacatgtgtgtatctgcaggaggcaccagtcatgaagggcacacgtactttggttccatcaagaaggtgaaagtcggaatcttttgttagagatggatcgaattgactatcccatcttccgttgaagaacaagacattagcaaatatgtgatcagtcaaaggagcagatttagggtttgatggaagaagattagtgatgagtccatttgtctgcttttcaacccatgaattcacctctctattcacttcatcagccttccaaaaacaaaacaaacaaacacagagaagctatcaacatctgtgatttgatttcacaaaagccttgtgtatatactttgactaagcacacttttcaatatattagtacaatccctagtgattttgtatagaaaccagttttacatacatgatacaaactaatcatgttaatgttagtataagataatacctagtaactatataaaggagttaggtttatttggatcaaagagagtaccttggtgcgaaagtcaactcggttgaaagtagctttatatgaatacagcaagagatccttgaaagaaggtttcacatagagagtcttttcgatccagaagccattcgctgccgatatcgtcgggccgccactcgcggtgctgtcg

SEQ ID NO: 16101 - DNA, 227 bp, Arabidopsis thaliana landsberg
aatagatttacaaaggattttaaaaagattttaaaagatttacattgtattttaacagggttttaaaagatgtacataagattgtaaaagggttttaaggtctttatttggtattttaaaggactttccatgatatagaaagcttttttaaagattcttaaaggaaagtctagtgttgttaccatactccccctgaaatttcctttggttgtgattagtctttcatg

SEQ ID NO: 16102 - DNA, 1624 bp, Arabidopsis thaliana landsberg
gtcatgattaagctagtggagaataattgaaaataaaaagtaaactaagtaaaagacagcaaattgattggttgtaaacgatgaaataaagagctataaaacagggtattctcaagaaactattggttagtagatctaatgaaagctaggttgttattgaaccattcttaaactcaaactctaattatggaataacaggtggtgttccgcgaaactccctatgcctatagctaaaaataaccgcagaagccgagagatctttaacctaaacatgcattctaaacgagttcaatcgttcaccttagtagataggctgattcttattacacacctataaaccagactcatcaaataatatatccaactacagatacttatgatgggcatatctattgtctggattcaagatctagttaattactctaggtctaacattaagaataatcaaagatgaagaattctacacataacctagcaaaggggcgatctactaaaccatatgaatccctaatgagaaactctattcctaacaagcaaactactcagacatattgaatgaaacaaaaaacataattgagtaagaaagcataaacacatcaaataagataagagtaagaaaggatctatttactttattgaaaactgaatgaaaatctgaaaacaatggattaatagcttatgtctctgaaaatagggattgcaaagaacttgataaaaggaatttaggtctaaaccatgacatctaaaactatatataaaccgtataaaacgtccagggactaataatgcaaatagggatgtcttctggggcaaatttccacttttgtaaatttgaaagcatcatggactttgctgggccgaaacaggtgtcgatcgacaccaggagtgtgtcgatcgacactctctctgaatccggaatccgaaattgtccttcgcttccttttccttagctccaaaatgtctcctcatctccattgttgtcctattgcatagaatacctgaaaagacactaaaaagactcgagaaataacataaagactcaaaatcttatacctaaaacatagataaaatcaataaaaatcgggttatatcaactcccccagacttagcttttgcttgccctcaagcaaaacacaaaagccgaacccgtggaaaaggttttgaaaacaaaggaactcccaacattctctagcctattaccatgatcattcaaactaagtccatatgcctaacaagtttaatcaaatcctaaccaacatgtacttctctacaagcttacacaacattctagattccatgcctaagttccacaactatacccaccaggctttcatcgctgggtctcatcaaacaagccaacattcaagatccttctaaactcattcttgtacaataccatgataaattgaccattctttatatatatttttttctatttcggtgttctttctctcccccagacttattcattttagagagtaaacaaaggggaactcgcatactgtatcgacaccctcgacatttttccaacccctgtaatcaatcattccaaataatgaaaaataaaagggtcataggaaacattcctacccatatacactatctgaaagtggtctcggtcttt

SEQ ID NO: 16103 - DNA, 455 bp, Arabidopsis thaliana landsberg
taatctttccttcgcactcttctttccatttcctactttaagttctaggcgatataacgcatatgcgtcagattcattgatttggtattcaaagagatgccactcaaagggacctggaggttgtggatccatatagtaagatctcttctggccttcttgttccttcatcagttgttttcttgattcatgccaacctcttccactgtaatctggaagtgatctttgctttcggtttccgctatcatatgctcttctaggtttgtcaaagaagagccactctctaattgtttcgccttcaaccagttcaagatgaaatagctctgcaagtacaaaaaattaagggtcaggcaaaagtaagaaactcacataaggcttctgttttcaaagaggcaacgaaatgttgaactaaaacaaagagagaagcaaaactgggctctagtgggacaatgctctca

SEQ ID NO: 16104 - DNA, 539 bp, Arabidopsis thaliana landsberg
  unsure (1)..(539): unsure at all n locations
ttgtttgacaagctgagcacgagaagctctttaatagaccaatggactttggaatctctccttcaannnnnnnnnnnnnnnnnnnnnctgctgtgtagattgtgaggatacgtaccagctccatcgctacacctttattcatcaaaaccattgaatcttggtagtaaaggcctgatcccatgtacttttcgttagactggtcttcgttttttccaagtgatgacatagcactccacttcacaaagtactctgttggcaaagttccattgaagcgattatgtgatatatcgatgattcgcaactcagggaatgtggcttcatgtattggtccatggaatgcattggagcgtaatacaagaacttgtagcttcggtagagaactcaaccagaagggaaacgtgtcgttgattctgttgctttccacgttcaaaacttcaagagtagagaaaaaactcaaagatcttggtagctttcccactagctggttatggccgacatcaagagacctcagtatttcaaatatttgctttggaagacct

SEQ ID NO: 16105 - DNA, 2632 bp, Arabidopsis thaliana landsberg
aaaggaccaatagattttacattttcgcgcgatataacaacatattcttgttgtggcacttgcttacctcgctggtaggactaacagcatataaggttgctccagctaaaacaagaaaatctcctttaacaggattacttcctcctgaaaaaccaccaaaattcaatgaagccatgattaaaaacatagtcatgaatcagtaagagctttcaaaaaccattaccagctcgatcccctgcatggacgtctgagaagactaccataaaaacaccaacaatacagataaaaacaccactgatcttcatcaatctgtattttgtcttaaggtaaaaccaagtcaagaccaaaacgcaagggatcgcccagcaatccagtagcatgacacttgtcaatgaagtgtattggtaagccttcaccactgtaaaataatcaaagcaatggagtcattgatttcataatctcgtaataaataaaactcatcccaaagcaggataataacaaagtacttatcatcagtgttcaagccacaaaaacttgacaaaagaagatctttatcagcaaacaacacaagactcaccgagaaaattggcctccacatcaacaaaagcaaggaggaaatagtaataccatttcgcctgcattgaagatcaatgttaacaatactttctatgtaaagatagatagacactcctgtgagaggtaacagagagtgaagaaaaaatcaatagtaaccttaatgtcggatcttcgatacagcatgatacttccatagacgattgccagtaacacataattcagaaagcattgtgatgttggaacattaattcctaaaaaagttttaaaatttacaagaatttatcaaccaattgataaagagatcatgaagccgctggggtaatggtaataaaccagaaaagaagaaacttgaaaccttttctggcgagctcagaagatgtaaagccattagaagtagcaagaagtgagaggagctgtcccaaaccaagaccaatcagtgtcttcttcgtcctaatctcctttaaatcgaaacccatcactgagtcagttagtgagaggaaagagtgtaggaagctgtagtctttaaatcctcagctgtacacagagagagagaagagagaagagagtgtgacgcctttgggaaccgtttgacttttcaactctgagttttagttcttgggattgagatagtcaattagtattatattttattgaggtacagttatttacttcactaacaccatttgaaactaatctttgtatcaaatacatttttccttctttacagttaccaaagtttgggagagaaatgtacaaacttgtggactcctccaacccaaaagtgtgaaaaataataatcatatatcccacaagtcacagtcaatgttatagacaagtaaaaaccagaggctttgatttgattaggtttcaggtggaagcatctataaggttgctgtggagcgagtcaccatcctcctcatggaacagcttcctcctctcactaaccacttctccacttctttgttcctcctcatctttctctttcctgaaaatatcaacaatgggtcaagaacactgatcttcatgtgagtgcagaacagatactctacttgaagaaagattagaaaagactgtacattgagtatatgatcagtccagtagctgtagtagcaaatgccaagaagtagagccaatcaacctgacattaacatacataaccattggatctcatgagctgatttctacagacagaaattacaagattttcctaaatgtttgatttacataatctgcagaccttttcgtggtaaccaaaagtgcggatcaaaatagcccacatgtctgatgtgagcaacgagaggttgaacattgttgaaccattattctgagaggtcacattacaaaagatgttacagtttcagagacattaacatggaaaagagagtattgatcgtattgtatcagttttgtcacataccttgattaagattgtgattaatgtgtaaaacagaaataacccgagtgcgcctccaatgtaaagtaaaatctggaaccacaaattaattttccaaagaagtcattctatttgcagagattgaaagggagtgtagcagcatgcttaccgcctcagttgaccactgaatagctctgactgcaccacgttcaaatatgcttctatgaacaagtcagggaaaatgttcatagaagtttaagataaataaaaaaataattgccttgttgtttgaaggatacatctgaatggcagcaataattgcgccgaaaaggcccaaaaaagccatgagctcagtcacgtctgcattcttcacaaggaactcctatcacaaaggaacataacgactagaattacaagtacacttaaagtctttttagtatgtgatcagagacttgcttacctgcctgacgttactggcagcacacgaggttgccccagctataacaagaaagtctcctttgatgagatgacgtccacctgaaagctaccataaatatgcttaactcgagtttcttgggcaaatatgtgagtgtttacttgcaggcgaatccatggtaggaaaagaagagaaagagaaactaataatcagttacaccattccag

SEQ ID NO: 16106 - DNA, 1196 bp, Arabidopsis thaliana landsberg
cgatggcggctcactgaagcggcgtcactcttaaaacgaaacaacacctctgaagcagcataaaccaaagaactgctggtttatttaatccagctgatgactttggttggattctgttatattgttctttcataatctaaagagtcttgaagagttcatttcttggacaattaatgttaccaaaattgtatttccatttgataaatagttaaaacacagttttcacaatacaaaacaaagcagaaaagcaaaatctctcttactcaacaactagtgatcaaacaaacatcaataacgtcaattaactagacttgttcttttccatgagttcaataaggaaaacgagcctttccacaggaacctaattaacatcggatctcataccaatgtcggaatgcaaacgattcatacaatacttactatacccaccaaccaacaccagaccaccaacttccagaaacgggaactacatatcgaagtgtcgaagaaaacacagaagcagaaaagcaaaatctttctttactcaaactaattagtcatcaaacatacataatgcacatactcgccgaaaaaaacatacataatgcagatcgggttttcttgtttttgggcatgtgtgccgtattaggcagtttatgccttgtaagatttataattatgggcctgcgtgcttttgttggcgtcatggaccttgtaattgtttgggtttaataggaaaaaagagagaaagaaaaaatgtgctaagaccatccttattcatgggttcttaataaaattcttaacatttttatatataaaataataattaaatattaggaggctcttaataagttaagagaatgtatcaaaaatctcttatttaagagccaatttaacttttctaagaactcttttctattttttattcatattttatcttatataatattttaagaatttttctaaactttttgaaaacccattgataatgatgctctaacactcttgttctccattatgcattgcttggctcctacaaggctacaactacaacaagctcttccacagaaacctagcaagtatatatcatttctatcaccaatgtcgtaaaacagtgactaatacagtagttaccatatttccgtcaagccatattaccaaaacaggggagggcatatctaactatagaagagatacctggttaggcaccaccagct

SEQ ID NO: 16107 - DNA, 366 bp, Arabidopsis thaliana landsberg
tagagaaccttgcttgcagcaacggtaccaagaatgccgactttgagaggaagaagattgctggagctattttaggaaatcagatggtagaggtgaatgctaagttggattcagttcataacttactcacagggaaaaagcatgtccactttgtagctgaagaagagactattgagcctgagcctgagtcagaggaaggagttttctacatagatggtcagggatacaggaagtttgggcagccacaaggcaacttcagtggcaacaggtttacagggaaccatggttcctccaactacactcccaagcctgctttccagaagacttttcctcaaagcaactttcagaggacttatggaaattcaa

SEQ ID NO: 16108 - DNA, 832 bp, Arabidopsis thaliana landsberg
ctaaatgttttctgagactaaaaacccttttttcgcatggacctacctactaggcttcggcccatttatttaaggaaactttctaattttccttgactcatcaaatattcgttttggagatactctttgaatgcagggcgaccaaagcgacgtgaatacttccgcgaatcactccggctttaaatagaatcgcatctctgaaagctaagagacctcccgataaatttcctctctagggttctttcattctttactaacaataccgctcttttctttcgtagttatggccttcaacctccgatgctcggaatctatgccagacttttcgaggatcgggatgattgatgaggacattccgaacgtaccagacagaggacgctccccacttcgtaactttagatcccagatccgagctccgtgtgcacttatcagggacctttcgagcagagactaagacatcgcgatgtccttcattaaggctctcgcggctcaacacaaaaaacgctcaacggaaaagaagaaacttcgaaagaagatcaacaaaatgctgcgaagagtcaccgtgatatcaagggagttacacaccctcaactctcaccccggagattggatcgaactcggaatcgcacaatttgctcgcatcccggattgtatattgcccattcttgacattgccagtcaaggggtcgaggtgttatgcaagacgaggaggatttcctagttcaaaggacttcgacacattttttcttgttttccgttttgaataaatttagctttgtttcctgctttgtacgttcgcatagtcgaattccttgttttcactcattcgtgt

SEQ ID NO: 16109 - DNA, 3236 bp, Arabidopsis thaliana landsberg
cacttgaagagaagtacatatatatatacaacttataattgttcaacttgatcatgtatttgttttaatcaatttgaagttgtataaaaaaaagttcaccaactattattttattattttgtattgatcgtgaaacttgaaccaagaaaaagtagatttaagaaaatatcaactcagtttattagttagttttatacaaattgttaaccacaacaaagtactagctgaccacaaactataaaattgttatgtcaagaagcaggtctcgcgatttattagggtatatatgcattttaaaagtcacaatatctccgcttcagaatgcaagaacaagttttccatttgtttcgaatatgcattaatcttcgatcatatatgatagatactgttagtttgccaaaaaaaaaatatgattatcctgttcaatagtaatttgagaaatcttctcactaaaaaaatgagatgtggaaactgaagagtcactcacactaccgaatttcatagaaaagagaagtcgaagacacacaaatccaaataaaagaaggctctgcaaatctgaatgttggtttttaagagttaaagcccattttgtacaacaacacatagtttttaacaacatcaaaccaattatctctttgtttgttctcgaatcaactcagaaatcaagaggcagttcgccactcgagctcgatttggatctttccgttcttagaatcaataaggtgaaacttctgattcatccttttgttgttcaccacgtccaccaccggaatatccacataccccagtgtttcctgtccatcaacaaccacttctagattagaccaacacaaaacacttgctagtgttagttactctgagcgaaacgagtgtgttaccttgggatgcaatagacctatcctggaagaggtgctcagcacttcaacgtgcagcttctcacggactggaggctcctcgagcataaaggtgaactcctcattccaccttgggtctctgttcttcttcacgtgctttgtttttctctcctctcctttgaaatagatgcgcacgtaaggattggtatggtgctttccttcaacatcctcagccgaatgcactattaccacaagcattcctccagcagccggtgtgccttctggagctttctgcacggcttgcgtttcttcaaagcctttgggcatttcttcctccgtgaatggcttatacaagagttcaacctccagcttccccctatacttgtcaggaggctgcccatcttcaccgccgtccagagtcttacgcagttccaaggtgaatgctttatgttcgtcaggcaccatttctttcagagctaatacattcatacccatcttctcggcattcccaacctgcgttgctaaaacaaatattacatatatacccactccaaggcaccagtcacccttttgatagctctttacctgttcccagtcatacacactgaactctagaacctgagtctggggatctctgaccgagaatttgaactcctcattccattcaggattcaaattcttgtgtttaactgttgtcttcttagaaggaatcttatcttcagagagcttgattttcacgaatggatctgccccgcccatcagatcttttttcctcagccccacagccctcacaactttcacatggacaattccaacaggccttctgaacgccctgcagtttaaaaattaagatttgctcagcataattaaatttaagacatggattgactattcaaaagataaaggcagaatggcatactttgcagggtcaaggattggaactacaagggtcttaggccagagatacatgttcgcaacttgatccttgatttgctcctgaaacaattaacgcagcaatggaactacaaatgaatatttgatccagcagaaacgtaaaagcaaaaagaccaaacaactttcaccaaataagagatttaatgtccaaatacatatgtattggccaaacgaaatgtcacagtttcatctgcccttcagccttaacagattgaaacaaatactcttcataaaactagactaaatagaatgagtagcccatataatgatcaatcatacctctccctcataaaaaaattcttactcatacaagtcagggatttgaatgatgtatgtaagagaaagatatcaacctgaacaaatctgtagaggccagggattgacataagatctgctccaccaagcttcagtccaaaatcaacatgtggctgccatagtagcaaggatcagtcaaaaacacaaaatctctaccaaagatctgataatgaggctgactactacacaaatcgaccttataaagaaaaaggttataccacataccttctccataagagacacatagatattggcaaaacaagggaaacttggaactaatggcttgagagtgatacgaggctgagcaaaaacttgcagatcgaccacctgacaaaaattccttggtaagtgagggacaatcatgactgataatattaagtaggtcgttccttctttaaggttgattaagcacttggcagcataattacctgaactgttgccttcaacccaaatgccttgatggcaaccaagatattgggatttgcggcccatttcaagcatggttccataatcaactctttctcatccgtgagataaactttcatccctgcaaagagaagaataatagtcgtaagtcctggaatcaattcataatcatctttcgcatttcaccaccatccatcctccagttcttagttccactatgcaaacaggacattcaaggagatattaaagatgagaagaaaggattatccgaccttgaaatgtagggggtagagagcctagagtaagtgtttcaaattcaacagagtcaatcttgtactttggtatctgctcctcaatgatcggttttgctatattctttgcagtcttacatatggcctacatggatagttggagagaccaaaattcaaaatttagcaaatgaaggtaagagaaagtgaagtatcgcaagaacatcagtccaggtatgtaaccttgtcgagataaggccacatgtactcgagaaatctgtttatccagtcaacctaattcacaagaagatagaaagacaaacatcagagcctgagacaacaataaaaaaaacttgtaatatcaagagtagggggaagaatcacatacacgatcgaaatccggatttttgacccatagaggtatctctgaaagcataag

SEQ ID NO: 16110 - DNA, 734 bp, Arabidopsis thaliana landsberg
  unsure (1)..(734): unsure at all n locations
aaaaactgttcttcagggaactcttccattgaaccatatattgtaggccataatttgttgcttgcgcacgcctctgtttcaagacgatacaaccaaaaatacaaggtatatattacataaccctctcttgaatgtgtgagaagaaacacactataaagtatatataatatgcaggataagcagggaggttccataggatttagcttattcatattagggcttattcctactacaagctccaaggatgatgccactgcaacccaaagagcccaagatttctacgtcggctggtgagtcaggcacaaactgttccaaaatattgttcaacatatctcaataaaaaagatttactctttaaaactcaggttccttagacctcttttatttggagactatcctgatacaatgaaaagaaccattggatcaagnnnnnnnnnnnnnnnnnngaaagaatcagaacaagttaaaggctcatgtgactttgtaggagtcatacactatcatgcggcttctgtcactaacatcaaatccaaaccttcnnnnnnnnnnnnnnnnnnnnnnnnnnnatacatgggtgtatcttttcattgtatgaatcaaactcaatcttttaaataacaaaacaagattttttctctattatgatatcttgcttttgctaatcatctcttcttctttctttctggggagagacagattttggaaaaagtttagattttcagggaggagttttg

SEQ ID NO: 16111 - DNA, 510 bp, Arabidopsis thaliana landsberg
gaggtatctgtatactgttttagtggttcaatatgcttgattgtgttttcttttattctggctttagttatataatttgtgcgttgagagaatttgagtatgaaatgcaggttcaaatgaaacctctgatggatcagttaaatagagtaaaagacctaccaatacctgaatttggatcttttctggcatgggaggcccgtgcagcgatggctgctcgcgagaatggtgatcttaaccctaatgatcctttgaggtcacagggcgggtatggttcaacaccaatgccatttctcggagagacaaaggtgatcactagttacacttttcaatgtatatagaagttcaatgttataatggaagatgaggcagtggtattgtaatgaaatttccatttgtttgtccagtcagttcatgttaaagcttttttcattgcgcatatacatctgcaaataatccatgcacttttcctccttcattgtggtttgttgatttcttaaatcttacatggtt

SEQ ID NO: 16112 - DNA, 1185 bp, Arabidopsis thaliana landsberg
gcaggacaacacgaggccgcggtttccccttactgttttccccctttgtgttccgtctcgcaccgacccatctgggctgggacacacagcgacaatttactcgtcggtccagggaccccccggggtcgaaacgccgacaaattatgatcgtgttccattaatattgttggtttatatattgtttacgataagattattatgtgaattggaatatggagcttaacttaagataacagtgctaccacaagggtggaatgggacgcccttagctaagtaattaggaaagctaaggagagattaccttatccgaaaggggcaagcagggaggcgtcgctgcagagtatagggaggtctcgagtcaaactgtccataaagcttttcggacgagggattcctgaaattcgcctagagggggatgaataggcaaatctgaaatttataaagtttaagcacaactacaagccggggttagcgttagaaatataaacgagtccgaaagagagggcgaaaacaaattacaagcaaataaagcggatgacacggtgatttgttttaccgaggttcggttcttgcgaacctactccccgttgaggtggtcacaaagactgggtctctttcaaccctttccctctctcaaacggtcacctagaccgagtgagcttctcttctcaatcaaacgggaaaccaagtccccacaaggaccaccacacaattggtgtctcttgccttgattacaattgggttgatcacaagaaagaaggaagaagaaaagcaatccaagcgcaagagctcaaatgaacacaagtcactctctcgatagtcactatttgatttggagtgaactatggacttgggagaggatttgatctctttagtgtgtcttgtattgaatgttatagctcttgtaaggtgtggggagttggaaaacatggatgcaatgaatggtgggtggttgggggtatttatagccccaaccaccaaactagtcgtttggtgaagagctctgtcgcatcgcaccggacagtccggtgcgccacggacactgtccggtgcgcctgccacgtcacctggtcattggatttcgaccgttggagcttctatcttctgggccactggacagtccggtggtgaccggacaggtcctgtagactgtccggtgcgccgtctagctctgctctgactctg

SEQ ID NO: 16113 - DNA, 1188 bp, Arabidopsis thaliana landsberg
ggctcaaaattgatattaggttcctcttcatgttgaaaactagagttactagacgatgcattcaccatatgttcctcgccatgccaaaaccaaatataataatttgccatgaatcctctattatataactgctttcatactgttttgaaagaaaatagcgaccatttttgcactttcgacatggacaagacatattgcaatttcttgcgtgagtggcaattgattttcgtttatcatgaattcttctagcccatctgcaaactctattgtcattgatccattaacatctttgtgcttatacatccattcccgtcggatataaatctcgtcacacgccaacatattatatattattttgaaaataaaagaaatatatttgagaagaaaagatttgaaagagagatttaaagaattatgttccttactcatcccaacgtggctttatataggcacacaaatctgtttgcgaggtatttgcgacgaatttttgcgactatattgcgagaatttgtaaactaggtaggtagcacattttaaaacgtttctcacctaccatatatatattcgtctcaaatgcgtcacacaattgcgtcgaattgatacacgcaaattccacgccaaatgtgcatgtagtttgcgatgaattagattggaactgttgacttcgacccacattcgtcgctaattttacgcttatccgcctcgaattagggaggaattatttcgaagcatatttgcgacgaagttgagacgaattacgctattccatcctaattcgtcgcaaattacatgcttatctgcctcgaattagcaacgaaattgttccaagcaaattagcgacgaatgtgagtcgaatcgttaatgcgatgctaaatccacgctaactacatgcgaattagcgacgcatttatttttacgcaatatttccacgctactcatatgttttcttgtagtaaaagataaaaataaaaaataacgaaagttcatgtcttgcaacttaagtttttcggttttagttttgacttttgaatatagttttttaggttaaaaaattatttgatcccttaaaaatttcaagattatcattttttttaatgaattgaacagaaaaccaaaaagtcttcttttaaaataattaactttaatcatcattcacatcttttccataaatcatttttatgaatattt

SEQ ID NO: 16114 - DNA, 1095 bp, Arabidopsis thaliana landsberg
tttattttttcatattcaattggctgtcgacacctatgttttcgtatttctcttcacattgattgtttattacgttttatattccttcatgtcatattagttatcaaatttcttttggccgttgtcatcattactttcaccgttcgcttcttcgttatagtcttcatcttcatcttccacgttatctttctcactttcttcctcattttctctatattattcgttattatgtgattaaaaacaaagcaataaatttaaagttattaaccttaaccaaacatagttcaataagcctatgaactaactaccaaaacgacttagttcatttcatcatcggaactcaaaatttgatcccttagttctcatctcccgaatactctacccaaattcagattattccatgctcattggattttttttattgtctccacatatttggtcagatctgaaactttaaaagaaatattctttaacttgttgaagaagttgtttaaatctatgtcccaccattgaacctcatgacagtaataccagacacctcgtcatcaagttgagttacatatatatgaactaaacgttgtcataaaaatttcatgtcataactttttctcactttttttccatatttgataatccaagtttatcttatggtgtcaaccgattttctctctttctctgtcatttttagataaaaataattgtctttgttacctaaattttaacgttaattgttcataatgcaaggaaactttcatcaattaattacatttcttacagcttgctaattcccctacttcttttattgaaattggtgctaaaaaaagaacaactatttccacaatttcaacacaaatcttcataatttttaactagttagaaactatccaaccgaagtatatacaacctaagttaaaaaaaaaaaacatgcaagatgttgacttatttataataataatattagtatgattattggcattatctttttttaatacataaaaatataaaaatataaaacatttctccactccctctgtgtacgaatctttcatttaaagctacattttttttttgttacaattatcacccaatgaacgg

SEQ ID NO: 16115 - DNA, 1010 bp, Arabidopsis thaliana landsberg
cagctggggttcagaggaagagtttttcgctgtaatgcaccgaagtttcgatgtggataaggaagagatcaccgtggctcaagggattatcgaagaggagatgactgatttacctgtttctgttgctgttgatgatgctaatactgttgctgatgaaatggatcaacttgaaaaggtggagaaatcaagtggagacgcagggaagaatctggttgatgtagcttgtgagacgttaataacgtctgcagctgttaagagagaaggaactgcgaaagaaacagtgtctgttgatgcagtatgttgcaaacctgttgaaccgcttaactttgatgacttcaattcaccagccgacatggaggtacgtatggaatttcttatacgcagattaaaaaccaaaatggtgtctctgaacagaaaatattataaactttaattgctttgtacaacggtgtgtcatatagttcatgtattacatcaatcacgaactcaacctatattgaacccatcggttgtttggtttcaggttttggggatggggagattgaagactgagcttcagtcacgcggtctgaagtgcggagggacattgcgagagcgagctgcgaggctatttttacttaaatcaacgccactcgagaagctcccaaagaaattactggccaagaaatgaaatcaacatccaactccaaaaatatcccttttgaagttttttgcttgtagtacgataatacaacgcacaatgtgtaatatcagctgtatttttcactaatccaccaacattatcgctttcgcaatgattcttctcttttttctttcccattgtatatagtgcacaattctgtccacgttcatgaacaaaatcctttgattagagatgagtttactttaagactaaacagagtgtgctacgactgacagagattctctgattgaagacaacaacaatcatcttcccaactcccaagagggcacaggtaggtctcttgcttattgttgtcaaaagcttgaaa

SEQ ID NO: 16116 - DNA, 723 bp, Arabidopsis thaliana landsberg
gaaatggtcgactcggactcggcggtaggtttagtttacgtgaccgtgggccgaacacgagtttgagagataggaagatgaagaagaagaagaagaagagagagagaattaggtatatagtttccattattgtctttgttgatgacattgattaaaaatatatgagttatagctgattttatagtgcatttggaagcaaaggtaatatgaaaataagttagatcagattcgtatgttaacgttaggataattgttttggacgaaatgaaaaataagaagaggataagagttctgatgatgtcactgcctacttaaacatttagaaacaactagagatatccatgtgacacgtgaacattatgtgatttacttgtcgtcattgcatatgtcattgtgtttttttatttgttttgtttggttttaattgaaagtgatacaatatccattgcatcccccttgaaacctacaaacctactttgagatctatctctcacaaaagaaaaacttgaacttttgaaccatgaatcttctccggcaagcctaggtaagatcccaatcctccatccttatagattcccaaagacaatttgatggagtttcagatagaattttccacatcatggccaaacattattgaagacttagcagcatttatgccttgcaataactgcggagaatcttgatgatcttttgtcctggataggatctgtttgtagaaaaaag

SEQ ID NO: 16117 - DNA, 1731 bp, Arabidopsis thaliana landsberg
atagatcaaatagcaaatacctatggggacatacctattatctaatatcaagttctaattagctactctagaactagcaataagaacaattaagatgaagaatcctatagataacctagcaaggggcaatctactaaatcatctaaatctctaatgagaaaccctaaacctaacaagtggattactaagacatgatcaaagaaacacaaatcatattctgaataagaaatcaatgatgaaaataacaagagaaaagagtaagaaagatccaaaagggagttttcacaggtttttgctctccaaagtacaaaagagatccagggaatagcctcccaaagcttacgggtctaaaacaatgacctaaaaactatatatatgtcttaaaaacatgatgggccttaattaaacataggagaaagttctgggccgaatttggaaatcttcaaaacatcaataagttgcgtctcgaaattgcagtcaggtattagtgttgctcgacactaggggtggtgtcgttcgacacccacgtgcattttcgtctccagattgcttttgcagcttaagttgtctattgatctccagaatactccataatctccaaatgcatcccaaacatgtaaagacctgaaaagaactagaaaagactctagaaataacaattagactctaaaacctatacctaaatcgtagctaaaatcggtaaaaatagggttatatcagaattcatgagagttataaagtagggaacttaaaactgagatggtgaagattagataggatcggttgtggttgcttcagatgaatgagtagccataaaggtgagaaagtctggatcagtttggcgcaaatacttttccaccaaggccaagtgatccagcttgtctttctgttcagccacagctcggacttgctctgcctcacgtctagcatgatgagcagcctgctcttcgatcttctgttgagcttctttcagttgctcttgcaatgacacaaaggaggtagagtctgctgcatgtttgccctttccagtgactagatccggaagattatctttgaggcttccaactgcataatagttccctcttgaatttgtctttgtggcctatgaaaaaaatagccataccattaataaagagtttgagaaaatgcagacaatatgcaagtgaaaatgtaaactttacctctagaaagatgacagtatgatcctatattgttagctcccgaggtcttgattccccgtctgaaacatttgaagtctctgcctccatttaagacaacttctcttgcagcttcttctcataatttttaacaatctgctctgcctttttatcgagataagtaccatctggtttggtatgagtctttatgaaaacctcaccaacactcaccgtccttcctaactctttttcctgtgatgttaaaaatgaacaaggcttaatacaacatctgaacttaagacagagacacattaaaaaacaacagagatagaagttaataaccagttcatgtttgatgttttgatatgactttggcccttacaaatggatgtgaggacttagcccattacggtcagacaagcgagccttggaatatatctgactcctcgctattacttcttcagtatcccaatactcacacatcgctttccagatatgagaatcgatgatccatttaggacactctcgactagtccttatcgtgctaaccatgtctttcatccttcgtttacag

SEQ ID NO: 16118 - DNA, 345 bp, Arabidopsis thaliana landsberg
aatctatgcacgtggttatattgcgggtgatttttgatacctgagcattatcctgcatgcatttaacatgaaaggttatgttgcaaaaaaaattatttttagggttatttgctcaaagccctaaaagattttttaaatgtgggttagaaagagtttgatcacaccactctgatgcattctctcatgctgaagatatacacaacacactttctcaacaaaaattatagctttaaggattctatttttattaatatatgtatcaagtatatgaattgatatagaaactaacattattcgatgtcgccaattacttcacaaattcttcgatgtatcccaatttacttc

SEQ ID NO: 16119 - DNA, 3413 bp, Arabidopsis thaliana landsberg
cgtatgttgagcctttatttagctaatgaaccgtctgttcttgcagaccaagttggagcaattcctattatcaagcaatgggataaattttagagccgatgagccatatgaggcttcttgaatcagacctgtaggtgcaaagatccatgcacatgataagcaagtcatacacatctccttgacttattcaatttttagttgactaacctgtctatcgaaatcaacgctctgaagagaataaacctcctttgtaagttccacattttgactgattaggccatcaaaccatctcgcagccatagccgtatattcgtcagacccctgaaaagtagttgagtttagacaccaaacaagttaaacgtactctacgaaaacaacagacacagttctcttcatccatctcgacatgtaatcagtagcttgttaaaaggctattcatgagtgtgcacagaagtgggaatgttgtggttcagagatcctctcctcttcccctaaggaggttgcggatgctcttttttcctcgtaagaacctggaatgtcctctcccggactctattggccactatattcattaaatcctcggcaattaaccacaaaatcttcccctcaccataaaatcatatctcccatgcagttactgaaactatcctaaagatggaatttaactaagcgatccaggagacaactttcttgtgtaaatcacttaacatgaatggtatacttatattgagatacaagtttacacttacctcctcttaatcttgtgactctgtttctgtatcatcatcataactgtctccaacatcatctgcgacatcctttgctgaactaatcagcgtctgcagcgttgagtgatcaccctgctttgtagcattaatcagagtgtccatcaaatcagggttcaacttcacgcaacaatttccctgagagcatgttataccacattagctaaagaatttacaaacatggtaaaatacaaagataacatcccagataatagttcatctacataaaaatgatgtttttgctcaccaatatagttgaaatgtctacgctttccttctcgaacatccgagcctagtctctgcggcaaaacaacgaacaccttatgtgcattgtgccaaatttacgattaacgtaactataacgtccaaaatgtactcattgtgacttaccttcgcaagcatcaatgcatcataaacctcttcaccaagcgacgcagctctaagatgagaaagtcaattactttaaaaccagaaacttcaacacaaatataaaagtgaagattttgaaaagatgatgtttccaagttttgagaagcttacttcagaatctgcttaacctgatcaccggagaaggaagcaagttccataccccatttaacggcacggcgagcatcacgcttccgctggttacgactcctcaacgaatcagactcgtaaccatcgttatcaccatcttcttcggcaacaataacagtaggctttaaagcttccggtggcgcgggacgaattcgccgacgaggtggagacctttcagtggagaaagacgagaagagaagaagagtggggatagaagaaggtgggttcggtagctttttcgaaaacaaataccggagattacgaaaatggtgattacattgcggcgacaattgccttattggtcgtattagttgcgccattgcaagctccggcaaaatcgttccaaggtcagagctttatctaatctacactctataaactataaagttttctcttttatcaaagtcagttttttttctttatatatacgactttttttttttggctctgttcattgagtttgattccaatcaatacatactcatctttcacaatacacacaaagactgaatatttctgctttcattatttatcatccagtgaagctaatacgagagaaagagtttgaaaatttccagccagaggagggtttgatgttgaatgttgtaggtgttaagctgaggccaaacatttcctttggtgttagagttgagtcaacgaatccaaccaatgtagctattagagaagcactctctttgcaatgctctatgtctttggtgttgttgttccatagtttgtgtgttacttgcaggcttctccgttttgagctcaattcaacaccccatttcttgtaaacttcttctttttccttctttccaaacttgtttggtatttgtttagctaaccattccctctcgcgtgttactgctttggtagtttgtttcctcgatgtctcggtcgagtcttttagaaaagatagtcttcggagttcgacttccatgtaaacaaagtcggatggatcgcctttgaagagcaagaaaaagtatgttctgtgaaccaaaggtacattacatacttgccaaagctcaattatttggctttgttggctctcaaactctgttgtctcgccgccatcatctgcgatttctggcttcatcgtctttgtatcagtatcggcgctatgcgtggaatggtgctgcattgttctttctctaagtcctgccataaattcatggaagctgctactgctagtctctgtatcagaatctttgatgctctgtgcgtccatggagacagtgatatctgaatcaaaggatgtgttagtggtctcgaatatgaaacctctactagcagcagcagccgccgcctttgtaaacaagagattttctctgcaacttcggcttcttctcatcttgaaatactctcctggactcaaagtatcatctataatattaaacgaaggagattgtttctcttctgctgattgaatactcataaagtactcaattgtcttctgcatttccttgacctttttcttcagagcctcatatgtattatcgtctttatcagacccttcatacacctctacacatttctcatcctctggaggtgatttatataattgctctgactgatccatagataaattctgttttaagtcttctttctttgaagacaaattcttttttgtgtcttccttctccacagattgctcagtctgttgggattcttctaacttgtttatagttagcacatcttgagcttcaagtttatcataggctccatattcttgtacacattgctcttcttcagggagtgacttcgttacttgctctgacatatctctagacaaatactgttccatttcttctttctttggagattgcctctgtctctccacataacgctcagtccttgggacgtcttctattaatagcggtacactcaccccatcttgcggttctggggtagtatacaaactcaactgcatatgtatgatatatcatgatgaatcaacgtcatccttttgggactcacagttatgaggatcattccttcttttcaacaatgatatgctaacgacgccttggatatgaactctttctgcgactc

SEQ ID NO: 16120 - DNA, 2965 bp, Arabidopsis thaliana landsberg
cattcccgatcgtttgtgcgttatcatgatttatttggggtaattgatattcttttttagagttctttgaatttttgaaattagggttcatagtattaaaaattagggctttcagttctaagcattgataaggggttaattaaattatttggaggatatgtgtttgttatttggcatgattgaagtgaggaggagtcattggatgtttgatttttagggttcatagttttggattgaatcaaattgagttaggattgtttcattagggatttcattgatatttctttgtaaggataaaatcgaattgagtcatagaatgcttaatctatggtaaatagtttcgatcatgtatgtagctcttttcttaaaatgctttgattcttgaattatggatgcgtggagactatatttttgaattatgaatgccttgatctttccttaatagtttccttaataaatagttgctatctttattctgaaatataaacttcatcaaagctgaaacgattagttaaaggcttaaagctttcaagttctagttgcattaggcattaaccaacacacagactctggcgtttctttgtttgatttcagtactctgtacacacgattcttttatttgctcattgcatcaatatcatttagttattacttgaatcattttgaaaatttattgttaatatttctttctttgtctctgttttggtgaggttaaatgaagtagttgaaaggacaaatctcacaagtggagaaggcatcgattacagcctctaaatcaaggtcagttcaaagtggttgtctcatttaattaccggtttgtgctatgtgattaatgcttgggttgtatttgattaggacagtttttgcttttgtaaatgttttctacgttctttgaaataaatgttttctagttggagtattgtaggttaagacaattagtgtctttaccttggcattcattgctaatacttcaataaagtcatcttacttaaaaaaagccgaacacaaaacacaatcagtttcagtcttcttctttaaccttcagcttaatacaaaacacaatcactttcactttcatatctaaaaaatggatgatatgaatccattctatcagtcatcgggttttatggacctgttgcaaagtcaacaagaagacatgtctcagtttgcaagtgggtcaactgaagtcccagcttttagtagtcaactgtctgaagaaggaagtgagcttgaaggaagtgaagatgaagtcaaaccgaagcaaagtatatcacgaaagaaatggacagcaaaagaagatattgttctcgttagtgcttggctcaataccagcaaggatcctgtgattggtaatgaccaacaaggtcaatccttttggaaaaggattgcagcatatgttgctgctagtccttcccttgatggtctgccaaagagagaacatgctaagtgtaaacaaagatggggaaaagtcaataaaagtgtcaccaagtttgtgggttgttataagacagcaacaactcataaaactagtggtcagtcagaggatgatgttatgaagctagcttacgagatctacttcaatgataccaagaagaattttactttagatcatgcttggagagaattaaggtatgaccagaaatggtgtgaagctacaagtcgtaaaggagatgaaaatgctaaaagaaggaagtgtggggatggtaatgcaaagttcccaaccaatccatgttgaagatgattcagtcatgagtcgtcctcctggtgtgaaggcagccaaagctaaaggaaggaagtcaaccactgtaaaagaaggaaagaagccagccacggttaaagatgattcaggccagtctgtggaacattttcagaatttgtgggaacttaaggagaaggattgggatcgcaaagaaaaacaaagcaagcatcaacagcttgaaagactactttcaaaaactgagcctctttcggacattgacttgttcctaaaaaataagctaatcacggatctttggtcataagtcttaagttctagtttggtcctaagttttaagctaagcatcagatgctttttgtttttatgtcccatgtatgatattgcttcgtaagttcttgtttaatgtctcatgtatgatattgtattaagttctagtttaagtctcggtactctattgctttgtaactgtcttgtatgatattatttagttttatgtatcatgttttaacatgtcttgtatgatatgcacttgtcttgtctgatatgcatttgtcttgttgtgtcacaggttaaagtagtggtgtgttgtctgatgccaaagagaccaatgtgtgcaagtggtgtgttgtctgatgcgaaaaagaccaatgtgtgcaagtgtttttttgctagatgccaaaggagagtgtcaagacgaaaagaaaagaaggagacttgtatatttatttccacacgactgagacttgtatatgtaccacaaataatgtatgaaaattgtgtaccacgaataatttagaatgaatgtgtatcacaaactttattctatgtatgttttgactataaataatggaatcgtctctcgatatctcacaaatcaatcttttctattattcttctttgcttcaactacaaaaacaatctttcccttaattgttctttgcttctaccacaaaataatcaatcaccaaacctaccaaataatatggcctcttcgtcccgtactcccttcgacgatgccatggaagaaagctttgatcaattacttgatcaacaattcgaaaatatgtttgtcgaattgtctaatagcgaagagatggccaagaaaaataggaaacgagcttattttgacagaaaacgcgaagaaggacacgtccttttatggaacgattattttagtgataatgcgatcttcccacctcaaacttttcgccgccgttttgaataagaagccgttgttcttgcgtagtg

SEQ ID NO: 16121 - DNA, 1316 bp, Arabidopsis thaliana landsberg
tgttttgtttttcagatcacgtaaagactcaagaaacctatgacttgcccctacctctatacctaggactgggaggaacacatgatgtcactttcaatctttgatcttgaatgttgcaatgaatagttttgccggttataatggtacaacaagatcaaaggaggacatgcagcgactgatctctagtatctccctagctagatagacgttttcaggtaacccaaaactcataaaccatgtttccaacagatgttgccaccgacaaaagagttgatttcaattggtgattatatacgatgcccttcagtctctattttggtcttatgtgcttataaattaagttgttgggtatttcaagttgttaagtcagataatgtattcatggtcattaacttcctgaatattatctgattgttttaggttcaactcaggagaaaattgtatgaaatcagattggtatatccgtatattttatatagggctttcactgattagtgaacatgtttttgaatcccataaaagcaacaggaacaatggaagaagaggaaacaaagcaaagtacatgtatataggtgttattagatctataaatgtacattattatttttgaagaactatataaaatgtttcttacataatccattccacaaaaattcgaggaagtcaagtcaggttggtatatgcctctgtttcaggcccgtgaagccatttttcgttctattgtgtatagaagaagccatgcttagctagtggtgttttcttaatcttttgtaaaatcgattttaagtactttatccaatgatattttgaggacttttgcggaattaaatatcacatatccaggattttattgaatcagtctccacttgtaattttatactctagacttttttttttcttcattgagtagatgtcgttagaccaaaatttaattgataaattgtaaaaatattaaatccaacaagaaaatgacatataggtggaaaatgttttaagagatgtccttgtgtcacactcttgccttctttcttttcataatggagttttcgtcttctttcggtcaaattaaatatgagtcgagaacagaccacgaccataataatattaatttaagtccctttgaatatgcataaaattaccaaccataattgcaactctggcttagggtttcaatttcacaataacgatgagaaaatgagctgacttcttctttttgagttgcttgttagttgttgtaacttcacaaaataactatattatacaatctaaactatgattttcctttggaaaacactgaattacacagctatatggat

SEQ ID NO: 16122 - DNA, 467 bp, Arabidopsis thaliana landsberg
cgtcgctaaacgtcctgtatctttatttctcttgcttgcatcaaacccactacgtattcaatttgtacttacttaatcattcatccttaagagatacttcagatgatggtttggctgcaggaatgtaagaccatgccaatgccgcgcttcctagagtaatggttgctgcaattgatccccgaatccatctctgcctcttctttctcttctgcctctctcgacgtgccacctctggtattaacaaagttgtgagattagatttttattatacgatagaaaatgacaatggataaatttggtgaatgagagagattttctactacctatggcttcttggtttcgttgagacatctttctgttcacggacttgaagcaatgtaaacggtcagacaaccgtgtgatttcaagttcttagcttggagcatagattccatcttcatatctaccttgtgcttcgacataccttt

SEQ ID NO: 16123 - DNA, 819 bp, Arabidopsis thaliana landsberg
tctattaagattctaaatcaatctctgaacacactcgatgaatagcttatgtctctcagtaacagagtttgcaaagctttataagaacttgatgaaaaacttgataatctgaaaactaggtctaaaaacaatataaagaccctataaaacgtccaaagacttataatgcaaataggaaagtcttctggggtaatttcctcttctgtaaacttgaaagcgtataggactttgctgggccgaagagtgtgtcgatcgacaccaagagtgtgtcgatcgacactctagagtgtgtcgatcgaactcctcgctgattcctggatccaaaatcgtccttagctttctttcctttagctcttgctccaaatgtctccttatctccattgtagtacaattgcatagtatacctggaaagacactaaaaagactcgagaaataacataaagactcaaaatcctatacctaaaacatagataaaatcagtgaaaataaggttatatcaatgagtacactgaaacaagaagacaaatacaatcacgaaagacaatcataattactctaactttccattgctcataatcaatcatattccaagcaaacaaaaacaagaagattgtaagcaaaagaaaaacagaaataaattatcttaagaaaaaattcattcttttcatcaatgctaagcgtacaatgagttgaatgttgcgaggaattatcataaacttgaggaccatcctcgtctattttagacatcctctcttccagcaccttcacataagcctcaccaacatgctgagatttctgatttacaaaagatccatcagc

SEQ ID NO: 16124 - DNA, 977 bp, Arabidopsis thaliana landsberg
tctttgacttttgttattagcccatcatttttaaaccggaggggaccggagattcgacccatgagatgtgaaacatgtttggccggttatccaatccgatttattatcctgccacatcgataattaatatttatttaattaatatttttgaaaatagtactttttgttcttttattgtttagaaaaaacataaatattaaagtaaatatattaaagttaattttaagtgtattattttctgtattttataattttctataattttaaaagtataatattcaattatttttttattaaaaacctaataaatattgtataaaaaacttaaaaaaaatcaatctttttaaaacaattttttttcctagaaaatcaaacaaaaaagaacataaagagtaattattttctattttcttgttaaaagaaaaataacaaatattaaatttaaacttataaaaataaaaagctaaataattataattatgtaatattaaacttataaaaaaggaagataagtaattataattatgtaatattaaaccaaaatttatagaattttacacaactaatacagagtaaccactcataagttaacattttaaaatctaattaattaatatattaaatatatttaaccaaaattccttttaaaaataaaacaatgattctattatgaaacaatgatttaaaaaaaaaattaaacaattagatctcacattatagcatgattcactcaaaagtaaaagaaaaaccaaaactctacttttctaaagcgaaattttgatcgaatacatttgtctcttcagatcacagtataggaatccaaaatatggttcaaggatcgattaaattttctgattatgaaaaattggtgctatataaagatctggcgatacgaatcgataacgagagatagaagaaacaagatcggtaaaatctgaaattacctgcagctccggtaacaagaacacgaactggtt

SEQ ID NO: 16125 - DNA, 1056 bp, Arabidopsis thaliana landsberg
ctatttctctctccttctctctcccttcgttctttttctctccttctctctcccttctcggcttgtctccctacttctttttcttctctctccttctctccctctctccttctctctcttcttctctctctcctctccgcctttctccttacttctttttctctttctctccaaatgacctctttgcttttttttgtttttagttacagttcattaattacctttttgtgagatttatttaggttctaagctttgttttttcttttttgtctttttcgaaacataattttaacatcaaaatgcatttatggtctgaaactaatttatcacttaatttttttgttcttcatagttacaggctcaccacatatctacaataaattatggatcattcttaaatattgataaattagggatcattcttagatctagaagcgatgaagggtttacgatggtagaaattctaaagggaaatagccaataaatcgattttgattttgaaagatttttgacagataatattctattttgtaaatatactatttacgtataccttgtactatatacgttttaaaatgaattgtttgttttgattaaggatgttaagtgatttgattagtgttttatattaaaagctttgggttccctatatattatcttagggtttagtattcttccatcaaaaagtatttaattgattatttggattcatcagaacaaacgtttctatttgaacaaatatatactattctattttctgtgatgatatgtatagaacttggtaccactatctattttttaagaaatttgtttccgatttttaaaattcaaatcatattagataaaccaaaaaaaatctgtttttccaatagtattattaactttaaccaaataatattgttaaactaatatagtaaacaaaattaagagggatgaatatatattagtcatatatatttctctttcctcctgtcagtgacttctctttctctccaagcggatccgtaggaaggagtttagtgtattttcacaactgacatgtgctatcaaatgaat

SEQ ID NO: 16126 - DNA, 4243 bp, Arabidopsis thaliana landsberg
  unsure (1)..(4243): unsure at all n locations
aatgttatatcataaaatatacattaattatagtgaaatgttctaacatatgtaatatgctaccaattcaattaatttaatataattttataattattgaacattatgtagatgtacacattagaatttaatccacaaaatgttttgataatttaaattatgttatattttgttctatttttttgtcaatcgatttacatgattatgatatataatgttcatatatatacacttaatttggatcataataattattgttattttatcgcatttgaaaataaactattattattattatgtgaaatcagaatttctcattggagaatctgtacacttgatttataatatcttattttataatttacataaagcttcatgttattctataatccataaaataaaattgattgtataagtatccatagtaatctgtataatcaatttattttgccaataaaatggtaatatgtattttcttgagggaaagtttttggcttactaaaattcaaccactagtctaacctcacttactaaaatgcaaccactattattttagtgagtttccataccctttttttttctaacaaatcattttgatcattttagtaatttttggactagggctcagcctcatattcgatgtgagacttttaacaaactatcctcttagaagttttaccagttggtatatgccactatcatttaatttactaattctattttattttatttatattaattataagtaactttaacttttaatacgaatgaattaaataaacatcgttagcagactttatttaaaaaaaaaaaaattgtgttccaagtgtggagcatggataggagatgaaacttgtatcaactactagtttaaaaggacacatctaggatccatttgtctcgtccatcttctcctcttgtcaaagtttcctcattacttcaatcttgttagccgttgacttttaaaggaagacgatggaagcgaagctagaggtgaccgggagagaagtgatcaaacctgcttcaccatcacctcgtgatcgccttcaactctctatccttgatctctattgtcctggaatctacgtgtcgacgatcttcttctacgatctcatcaccgagtcctcggaggttttctcggaaaatctgaaactctctctgtccgagactctctcacgcttctctccactagctggacgaatagaaggcctttccatcagctgtaacgacgaaggagccgtctttactgaggcacgcaccgatctccttctacctgatttccttagaaacctcaacacagactcactgtccggattcctcccgacactagccgctggagaatctccagcggcctggccgttgttgagtatcaaggtcactttcttcgggtctggatcaggagtggcgggttctgtctctgtctctcacaaaatttgtgatatagcctcattggtgacctttgtaaaagactgggctaccaccacggccaaagggaagtcaaacagtactatcgagttcgctgaaacgactatttatcctcctcctccttctcatatgtatgaacagttcccatcaacggattccgattctaacatcacaagtaaatacgtactcaaaagattcgtcttcgaaccttctaannnnnnnnnnnnnnnnnacaaggccgctagcgaaagcgtccctgtgcctacacgtgttgaagctatcatgtcacttatctggagatgtgctagaaactcctcacgctctaacttgttaattccaaggcaagccgtcatgtggcaggccatggacattcggcttaggattccatctagtgttgcgccaaaagacgtgattggtaacctacaaagcggattttctctcaagaaagacgcagagagcgagtttgagatccctgaaatcgtggccacattcaggaagaacaaagagagagtcaacgagatgattaaagagagtcttcaaggcaatacaattggtcagagtttgttgagtttgatggcggaaactgtgtcagagtcaacggagatagaccgatacataatgtctagctggtgcagaaagccttttacgaggttgactttcggatcgggtagtccggtctgggtgggatacgcgtcacataccatttacgacaacttggtgggtgtcgtgttgattgattcaaaagaaggtgatggtgtagaagcatggataagcttacctgaggaagacatgtccgtgtttgtcgatgaccaagagttgcttgcttatgccggcctaaatgccccggtcgtggcataaacaagactactaccaattgctctacgctggatttaattaattattggctttcgcttttcgttgtgatttgaataaagtgaccaatcatttcaagttccatgttaattcagtttatctgttaccttgatcttgtttgtactctatatggttatttgttttgtcaatttgtttttccagttactaataactacttcatgataatttaagtgtttagtgtagatttccttcaatgttttttcttaatttttaaccaataggcacggttcatgggtctggttgttttaaggcttgtacaagactgacgtgaaatgcctaatataatatagatattgagtttggtcaatttaaatttaaaatcaattctacctcacccatcctacactaactttatgatgaatctttttttttttttgggataattacacgaccaccatgcttgttatactaagtgtttagcgtatatcattaattcaatacatgcaaacaacattcatggatacaaagtgtttatcagaacagtttgacatttaaaaagaattcgaaataacaaccttaagaaatataaccactctaatgactaacagagttatccacgtcggtgtattctgagagttgaacatcagatccacatggaaacattagcatagaccttcgaagtactgaccaccttcaaaccataagcacatatatataagtaagtaattgttttgaatgttgttaagaataaattagtcaataggtgataaaaaaaaatgaacctgtaactacacaaatgatggataaaaatggccatctgacgcttagcaaattcagctcctacacatagtagtatagtactctagaacccgcaccaaagggaatgtaagtcttggataagattgaggaaaagtcttctctccgaaaatttaattattaaatgctcaaaattctataaatttgattagtggaatagaaaaatatataagtttaaggatgaagttcaagttaaaaccacctttcaacgccatggattaaatgctaaaggatcatcatacttttctggattgaaatggacattaggatagcccatgaagatccaaccagctggaattgtataatcgccaacttggaaatcatgatcagttattctaagcgccgtaggcgcggtacttgtaatcctaagagcattttcattgcatagcttttgatatgcgtctttagtatagattaataataaaatcaaagacatctcctctttttggtgtctcaaatgtctttctagagacacaaatcaaaaataaagacactcttcatttgtttattattatttgtattagttttatatttaaagacacctacaaataaatgaccaatctgggtgttcttaaagccctgataggcagagccgtgcctattaagataaaaaagaaacattcgcctacgattacaaaaaatcgaagaggctatctttgttaattacatgtttataagtattatggaagcaataacgttacaaagattaatacaaatgacaaaggaaagtagtataatatacaatatatacaaggaatctttaatacatttaaggcaataacttaaagtcttcttttctcacttctttttttcctatctcattaaattttcttttctcacttctttaatacacttaaggcaataatcatatttatcaaactttgttaattatttttatatatagatactatattttggatattaccattatatatatatatatatattaaatttttattaactaccaaaattatgttttattttattaacatcatgcattataccgtttgaatggtaacacaataatgatactaacacaatttactaaattacacattataatcgacctaattttttttttggcatatttttgttctaaatttttttttttgttttgcttaaaattttcggaatttattattaaactttgaacattaaaatatttttt

SEQ ID NO: 16127 - DNA, 1188 bp, Arabidopsis thaliana landsberg
cttaacttcatttggcccaacatttttgagacatctcctcacgtcattaacgcagtgatggaagccattgaaggaatgcgagtcgcattaggagcagctgtaattctgaactattgcttgcagggtttgtttcatccggcgcgcaaggtccgcgaagtgtactggaagatatacaattctttatacattggtgctcaggacacccttgttgctgcttacccggttcttgaagacgagcagaacaatgtgtatagccgaccggagttgacgatgtttctgtgaaagaaagattctggattcgatgtgattctattactctctagtcacctgtagttgttggtattttggctttattgcaaaggtttgctttgtataaaacacagaaacgtttcttttctttttctgataactagaaaacctatgttcacttttggttatttcttattgacttaagtttcatgttatttgtatgcattacagttgcaggttcatgaaataacgtagaaatctgtcaagactccaaataagcagagctgtttagatctttcatattgcgagactgagtgaacatatattactgtggaaatttgttgtgtcagtttgttcataaatttggtttactcgtcgaaatcttactgaatttggaccgaatttatggtggttgattttggttcaggtttaactgagaattcgctgccgaaggaaaacaggatacatacatacaatgttctaacttctacggtttacatctttaatatacgaacacaagaaaaccaattggtatttggctgtgtgaacctgaatcagataccctcaaaaccgaaattatggttgtgtttggactggtttgggttccggtcaaacgctcagggaatggtttcggttctatatgttcagtagagacccaaaaatttccaccagaaagatccaacacctccccagatgatcgcttgtacaagagccatcacgaacccgactctaaacatatctctcagatctacatacccagctgcagatccagaccaatatttttttttgtaagaaagtgttgaatggtcgattaattcgataactaaggatatgagaaatatgataaaaacttcgaaagagaagaaaccggacctccgtaatataaagcatgcggtccaccactataatgtgccaaagcaccagagagattgttgtgaa

SEQ ID NO: 16128 - DNA, 557 bp, Arabidopsis thaliana landsberg
  unsure (1)..(557): unsure at all n locations
tctctccactaggcggaataagggatcccttttataaattctagttattctaacaactacagttggctaatttcacttcagattcatagtcttcatcttcctcttcttttccttttccaatttcacatctttgctcttggattttagttcaattgctcaattctcgtttcattttgtgttgttttttgtgaattaggaaattgattgaagtcatagatgagtacgatggagacgactctatatctccatagatggagtgagtttcttgaaggttcttaacttcttaacttagtattgacttggaacgacatgtaacagttttttcttgtttttattgagagataatgagtaaaaactgtaactttatttgtaaattcttattaaaatgattgatttctcttggtcaattttggaagaaatctggtttcaagtgggttaatanggagttgcagacatggacgatttttttgtatgtgtatattagcctcgacatttgtgtctttattacaagaggaagaggaggaggaagagaaggagaagggaaaaagagaagagaa

SEQ ID NO: 16129 - DNA, 926 bp, Arabidopsis thaliana landsberg
ggacgatcaaggactgtctcgacttttattatacgccccttcgtcgcctttccgcaaggaggaaggggggaaagcgccatgttgccctcggagggcgccgaacatggtgtctccagtgagttgctaacgggtgatccgagtggacgcccgtgccccgttcgataagggtcggctagtggcccagaggcatgctccaaaagtacctgcaggtgatttgccggacctggacccattcgatagggtccgagggctcgatgcctccctctgatgggattccgttacaaaatcgctcctgctggtctcggaaatgtcctagggtacctcgggagcgtagccgagcctcggccatttaacggatgtacccagagtcatccctcgctctgcgtgctctggggcggctgtcgaacccttccgaggggccagccttcgaacccctgatcagtagtgggcgcggagcccgggcgctctgaggcgactgtcgaacccttccgaggggccggccatcgaacctctgaccagtagtgggcgcagaacccaagcactctgaggcggccattgaacccctccgaggggccagcctttgaacctctgatcagtagggaggctcggggcctgtttccttcgcggagaaggatccttttcggggtatccccctttcccggtccctattgtaagagagagaaagaggaaaaggatacgaaatcgaatgacgtggcgtacctttttcgacacggtcattatggcgaaggcgaagcgtcgcttgcttctccttgcctgaggcgccacctatcccgccgcggagttaatgcgaggcggccgttgcgcgtgtgcgagccgttcgaggaacggaacacgggcgcgccgtcttcacgccgtgagagagggttctctcgctgcccctggatgggacgtaagcttggctgacg

SEQ ID NO: 16130 - DNA, 3009 bp, Arabidopsis thaliana landsberg
tgactcatgttcaatgcaaagaaggctcacaattctggaagttttttaaattgagttcgcgtcctcaactttccctaactaaattttacacatcaactatatctaactaaatttagcacatgaacggttttcaaataaaaaataaatagttttggataaatggcctaaaccgcataagttgaaaacaatttatgaaatgtttgacaacccaaaaatgaagaacttgtttatggtaagtttgataactgacttgtatagtgttccgctagaaaagattgaggatgcataatctatatcagtatttttgaagtatatttttaaagttaacatttattatagtaaattatcacaaagaatgtcattatttatacctatgtatgtaaaaaatctcacaattaattatctactatctatataatcaaacacaattaaaagattttaacattaaatatataattggaaattagataagtagcaatataaataaataaagggtcaatgaaatatatgttcatggagagctacataattaaggaagtatacatgtatggttgatatttagctggaataaaacatgcaaattgaatatgcctattttagccttattttcctaacatgcattaacccaactgaacaaagatatcgaatatctcgcattaaatgcggggacaaaatctgcaaacatatatcccgccggcgttacttgtaaaaacagagaatcataatgatgagcaaagatttaatcggggttgcgtgttggcctatttattactcctctgtcaacgttgcttccttaacaaaagtagaaacacataacaccgtaaagaaaacagcattaacttctgcgaagaaaacaagagcgaagtacttggagacagaggtaagcagttaatgctcatggatctttgttctgcctaggtatagtgtaataaatggtacaccccgacatagggctttgtcttctatcaaacttgtccgctaacgttacagttatggttgattatcaacagtattcatggcgatggttgttaggctggtaaggggagagtggaaacgagatgcatccggatgctatgagcacgtagccgagttggatgggttatgcttggcggtcaagctccgggagagagatacgttggtcaaagtgattgaagctgttaaggaaagagtgaatctacagacagaagatgaggtggaagtattgtatcaatggccgcaatggatgatgggtccagattggcagcgtgcaaaccctatccatattatcgatgacgaagacatgacgttgtttatggcaattcggtctgatctagatgaggttcacttgaaggtcaaaaccataagcaggaatatggggaccccgacagttaattcatactgaatcgtcttagatataggaggtatgacttcggaagcgatatccgataagtattggaatagcagtgaaacaagagcagcctgggattcggcagtaacaagaatgttattcggtaacgtctcaagttatggtccggctggagttaccgggcaaaacaagaacggtgtcggtgctcccttcggcaggcgtgggggaataaatattcgataaaatacaggggagacgggtgtaggaagcgtcgacccgttaaacctaatccaagcccacccaagtgcaacagctaaagggaaggaacgtgtcttggacgatgagagcattaagggcttggagtttgcactttggaggaaaacacaacatggagaaatgttgagagagatgcaggaaagagagattcgtctggctggctcgctgggtggacaactggacagtactacggctaatgtccaggataacatggttatcgggcagacaagctccaatccagaggagtcaatacgtctaacccttggaagcgtagacccagctcgtcccgatgtctcagtagtggcgctgtcttcaactgactcaacatttaagacaccattggaaagtgtgagcttctgtactgaagagctgatggacgaggatgacttatctagtgatgtgatcatggaaagcacaaaggacttggaatttgatcaagagcttgtagccgaggaagagcttgaagcagaggagcagcttgaacctgaggagcattttgaaccagaaaacgagcttctagcgaagaaagagtatgggaaagatgttatcttaacctcgttggttttgatacatgatcatcaaatgggcatgtgtctcatttgtactctttttcccttgtcaagttttgtcccaatgggttttcttaacaaggtttttaatgaggcaaatgattcacattcaaatcacccatttgatgatccaaaccatggtataacattcaaaagttggttagaatatatatgaagtccagccaattttatgaccatcacaagcccaagaagagcccaaaccaagtgagtaatttgctggtcaagaggagtgacgaaaatagcatttcaagagtcattttggagccaagaagtggaagggttatttttaaactttcaaactagtctttatttctttttattttccaaggtagtcttgtgagtttgttccaagacttccttcttctttataaacctcttgtaatctcttatgagaattcatctatctttttatcaaaaactctctcttaaaaatagatcatgggtccattttcgtatgccgaattttgatctttctcgacttatcaaaaggcttttccgcatccttttgtggcgtcattcaatccatcatctcgtctttgagtcgtgtgtcgtctctatttcgacaatatccactccagatcttccaagtgccgaaattgggattcattcctcactaggatcttatcagaacttctctcgatccatgtaaaattggaccaccacactgtctaatccgaaattgaaatgtcttccaactaatatcagggaataatcaaaccacctataatttaatttgtaattttggtagttaatcattttaaatataaaacaaatcgttttttctcctatatcttttcg

SEQ ID NO: 16131 - DNA, 792 bp, Arabidopsis thaliana landsberg
atgtcaaagcataaaaggtgcgtatatatcatctgcgatatatagagaagtatataacccgtcattatttcatatataatatgcttacctctatgggagaagaaaccgctgcgacttggcggtggaagcggcggcaaggatgaattgtatgtatcaaaactcaccatacagttgggagtgtagatgaaagcccaaacctgattaccacaacattcagtgagttcttgcaatgcaagtttcagacatgtggtgcagtttcttggatccaaatcaggagtacactgaacaatagactcaagatcatacaagttatcgaatctagttgtatccataagataatatggcgtaaacgatgtagacacaaagatgatctaacgataacttctcccattttgtcagacagtctctgtccaaatttaccaaatgatttgggtattaaatcgtgagatgaccaccaatagctaggattggtctctagggtcgtgaggaagaacttatctgagtatcgaactatacaatctacgttgtaaatgattgcttctcgatggttagtacagtttttggcaatctcgattgttgcgtccttgacgcaggcgttgcaggttgttctgttgacgtctcctgtgcataagaacattccatggacggtctctgaagctagaccggtcgtgagattgtagtagttagcgaatgatgattggttgctaagagtggagagaagggtcttgagatttttgttgtaagttgtgttgctcttggtgtttctggatgatttcatgcagaaagtttcca

SEQ ID NO: 16132 - DNA, 602 bp, Arabidopsis thaliana landsberg
cacaagggtcaaagcctcgagggatttaagactgaaaatcaaggcacaacaataggaaaaaagaaaacaaatttgtgattcaataatgcatctgaaaagatagtcccaaagagtagaagactatttgatctatgcatagtaattctttgaaatataaagtttacatatgactatcctgtcgtgcaacctagttctctctactaaaatctcatttcttccaaactagtatcacaacaaacaaaataaaatatttgatgtcaagaggttcagacttcagagacataactaaactactcaaaatccaagaatcttgggagcaatgtgaagcaaaggctccaaagcactcggagcaaacttcctcgcaaagagataacacatggaagtgttgcgaccattgtaactgcagtttcttccatcaaagattttttcaaagaagttttctgtaatgtccgatcgcccaaacgtagctgggtggggactcgcccttgaccagtccacccatgtcaagcctccggtagccagactgttggtttctcaatcgcaacattgctgggagtaatgcttgccacatagcaagcgggcctgcagactcttgaatttcg

SEQ ID NO: 16133 - DNA, 567 bp, Arabidopsis thaliana landsberg
catggccactgagtatccaattgcagacctgtcaaaaacccccaatgagtataatgatcactctactcaagaaggagtggaggccttatttcctctctgccacccaccctaagcctaatgagtatgagaagtcaagcttagagacttaaaacaagctcacttgggaggaaatctcatgtctatctttgtatatatctttattttccttgttatttttgatgaatttggttagtgtcttcaggagataagtatcaagagctgagtgaagtggattctggctctgagagtacagtagtatactcgaccacagagcaatgaaaaatactcgaccatgttttagcttatccacgccaagagatcactcgaccgcggtgctggccgcagcaggagaagagaggtcgagtatcctcagagcagtgttggccgccacaaagctgatgaggtcgagtacccacctgctggagctgatacagaacatggcggttcgtctaaggcctgggagcaatcacaggcagccattgacgagcaactacgttcagtcgactacgaagggaagcgcctcactgc

SEQ ID NO: 16134 - DNA, 892 bp, Arabidopsis thaliana landsberg
ggatcctatgagtacataaactaggtgaaactcctttatatattagctaaagaatacccaattttcctcactttctaagctcattcaacaactcgttcacttgttcatcacttagtccgtcattaacaatgacgggataagtgtcatttggaccgagaaacgcgtacctcagaccttttggaagaggctaaaggtcaacctttaaaactttgagttctgactagtcatatgaacttatattctcccctccatggtcgagcatctcagtagagtttgttttttcaacaattaggcacatggtgcatcctgagactgtttcttctgagggaacgatcaattcctcaaacacttctggtccttccattggtatgtgggcgtcaagatactctttgtacccttgggtttctaggtgtaggtacccttcttctccatcgttggttaaggcacttgctaggtgatctccttctgtaagttcttccagtaattcgtcagctaatctatccatttcttcgatccaaaagacttatccattgattgtcggtttcttcatagctctgttaatgtcgaaggtcattttcatctacttccccaggtttaggtcgatgtttccctttttgacgtcaataatagctccaacaggagctaggaacggtcttcctagaatcaatgggtcttttggctcctcatccttttccagtattacgaaatcagtaggaatgtctattgatccgactttaacaggcaggtcttcgagaactccatgaggtattctgactgatctgtcagctaatattagttggatactgtagggcttgtatttactaaaacccaatcttataggtaccccacccgaattattatttttacccccccccaataagataggcattta

SEQ ID NO: 16135 - DNA, 564 bp, Arabidopsis thaliana landsberg
cccaaagtgttccccgattgggtcacagcctgccgaatcctcccgtccgttcccttagcggacattcctgtcggtaggacgacttgggtaagatcggccagttgtgccatcaccgttttcatggaatcccacatttctccgactgaaggaattgcggttgggtactctccaccctttcctgcctcatcattctcttcatcggtctcttccaagagttcctcctcgatctctgtttcccttacccgtggatctacgatcacggatttcagagtcgggggagcccttggttccttatccttctctttggcaacatctttgccctttgaggaagtctcacgggttatctcgaccttctcggtctgacttgttcccgctgcttccttatccttcttttgcttttcggttttgctttttctcacctgaaagttccaagttagtccacgaccctaatgaaacttaccaagcaacaaaacctatccgcaaggcgctgtccggtgagtggtgtttttcccctaacccaaacgatcctaggagcaagcatgctctgataccaacttgaaacgt

SEQ ID NO: 16136 - DNA, 1576 bp, Arabidopsis thaliana landsberg
tgtggaacacccacttggttcccacaacgttttgctttagacgaggcaccaggctccagacttcattccgtttgaagttgttaagctcttcctgcttggccaacacctagtctggatcctgcaaggcctcttctaccctgaaaggcttaatagaagagacaaacgacaaatgctcacaaaaattaactaatcatgagcgagtagttactcccttgctgatgtcaccaagaatctgatcgacggggtgatgtctttggatcgtcgctcggacttgggttggaggggcccatggtgcttcttcctccataacctgttcttcctatgctcccccttgatcctgcccctcttcttgagttacctgtacatcgtcttgagttgggggatgcaccattgttgaggaagatggctgatcttgttcctacagttcttgtggtcgcacatcacctatcgccatcgtgcgcattgcggtcgttggaacttcatcttcatctatatcatcaagatcaacttgctctcttggagagccattagtctcatcaaatacaacgtcgctagagacttcaactaatcccgatgatttgttgaagaccctatacgcctttgtatttgagtcatatcctagtaaaaacccttctactgccttgggagcaaatttagaatgtctacctttcttcaccagaatgtagcatttgctcccaaatacacgaaagtaagatacattgggtttgttaccagtatggagttcataggaggtcttcttgaggaggcgatgcagatagagccggtttatggcgtggtaggctgtgttcacagcttccgaccaaaaccgcttgggcgtcttgaactctccaagcatcgttcttgccatgtcgataagcgtcctgttcttcctctccactacacattttgttgaggggtgtagggagaagagaactcatgcttgatgccctcctcctcaagaaaaacttcaatttgagagttcttgaactccgtcccgttgtcgcttcttattttcttgatccttaagccgaactcattttgagcccgtctcaagaatccctttaaggtctcttgggtttgagatttttcctgtaaaaagaatacccaagtgaagcgagaataatcatccacaataactagacagtacttactcccgccgatgcttatgtaagcaatcgggccgaatagatccatgtgtaggagctccagtggcctgtcactagtcatgatgttcttgtgtggatgatgggtgccaacttgcttcccggcttggcatgcgctacaaatcctgtctttctcaaaatgaacattggttagtcccaaaatgtgttctccctttagaagtttgtgaagattcttcattccaacatgggctagtcggcggtgccagagccaacccaagttagtcttagcaactaagcaagtgtcgagttcagctctatcaaaatctaccaagtatagctgaccctctaacacccccttaaatgctattgaatcatcacttcttctaaagacagtaacacctacattagtaaatagacagttgtagcccatttgacataattgggatacggaa

SEQ ID NO: 16137 - DNA, 928 bp, Arabidopsis thaliana landsberg
  unsure (1)..(928): unsure at all n locations
ccgacccacctcatgggcccaagcccattaatatataataatcataagaactgatcgaattagggcaaattgtcaaatcagggttggttcttcagtgccccaggagtttattttgcgagtgtcgagaagcaacaggtaaagccatttctcacttattttaaacttctataaaactttctgaatgtgaatatacaattgcataattttttgtgttgatttcattctctctttagtggaattggttcgatttgattaattccagttaacttttgcatttttgatacaccatcgatttgtctctgatttagggtttggttttcttctacctgtgtaattggcagcaaaaccattagattaaaagattggagatatggacagaataagtttgttgcccgatgatttcctcttgcacatactgtcattgcttcctacaaaagacgtgttgaacactagtgttttgtctaaacgatggcggtatctttggaagttggtgccaaaacttcagtacagccttatcgataagaatgctgatcatgggacatttgtgcggtttgtggacagatcgttgctacttagcatggctccggttttagagagtttacatttaaagttaggtcgacaatgcagcgaagtagatatcgggttttgggttagaattgcagtggaaaaaggtttgtgtgagctagatttcgattatgagcattataagactgagccttgcagattgcctcagagcttgttcacatgcggaacactcacggtgctaaaactaaaaaacgtatcgctcaaggatgtacaattcccggtatgttttaagttgctcaaaacgctgcacctggagtatgtgattttcctagacaaggaaactcctcagaagcttttatcaagctgccctattcttgaagtctttgattngactcgagatgac

SEQ ID NO: 16138 - DNA, 1087 bp, Arabidopsis thaliana landsberg
tagaggtaatcttacctaacttgacaaataaaactggatttttaaggatccactttagtaagcatttctgcaaatagagtcattgattattgataagccttaccttgactcccttaaagccagcatatccttgagagtcttttactttgtcgggtaagtcttgcgaaagtacacttcgtactcagggctttgtcccatgttgttttaggtgaggaagcgacaaacttttgttgcttctgttcaaaggtggtacccaaagaagagaaccaagactagagctgcgggagggaaggccctccgttaaaaactttttactgcttattcgggaggagtttttgcctcccatggtttgtaataataatactcagcactcgtatattatgttttggtctgtaaatatttaactctgtcttacttttcaataaaagtaagttattgcaactgcttctccactttcgcatctccaatgaattgtaatgtctgcaagacgggtgaacgttcctggtgaggtaaggaaagataccgagcttgtcaagtagttcaggggcacctacagggttgtctaaagtccgttggacaaggacaactgtaggtgggcctaattacttgggaggttctgtcacaacaaagatgaacttatgtaatacatactattaatctcacaagcttaaacaagtttaaatctctaaggttctcctttatttatttattaaataaataaaacatacacctacattagttcatattcagtcctaaaacattagagtgtgtagactgtgagtgaacccattttatttcaacagagaataattctatgaacattttgcaatttgaatcactaaatttagagttcatatgcaaaagttatgaaataaacaagtttggaaattcaaaacatggaattagagctaattctgtgaatatttaaaagtccagggctaaatctgcaagattacaggggcctgtgtgcgaaaacttgggaagacgggttgattcctataaaccgagggtctctttaagaaaactaccgcgcgaaggggtatcgggtgaatctaccgtcagatctaaaaccgtcgcctgagattag

SEQ ID NO: 16139 - DNA, 4144 bp, Arabidopsis thaliana landsberg
  unsure (1)..(4144): unsure at all n locations
gaggtcgagtgaaattttgaggtcgagttcagccggtgaagtccagaggtcgagtacttcttcggtgagtcagaattggtagggacgaaaccataagtcgacggtcgagtcctgtggttgtaatggagtagttcatgagacttcgacggtgaacgaggtggggaactcgactatggcgactaagagaaggtcgagtatggcgagaacaaagtgacggcgaacggcgaagtgaaatggtcgagtatagcgacgaactcgagtgaagttgagtcgactgactctttggtgagggatggcgattcgtggtggagtagagaaattggagtgtcggtggagagacgaagagagatgggtcgagtaggttttacttttagggaatgtgtggtcgagttcaaaaggtgtggtggagattgattatgtgattctctctccatcttttcttcaggaacaaaacgcgtggtccacactctgttgacttgtctttggactttgttccctgttgactgggaaaactttaggaaatcttctgtaaatttgataaactccctacaagtctctgtagctcttgttggtcgagtataatgatgatttaaaaaatatgggttttaaacctcacatatacttgactgatatactcgaattcatggtctccaggtgcaacagaaagttttaaaaattttgcactccactgggctatacactcgatctccagttcttctgtagagttaaagttttgaatttttactctatcaacacgttgctcctttgtttctgagaaccacaaacacaactgagacaaatcaaaaataacaagaaagaaaaatttatttacagagatagtcatgggacttcctcccaggtgagcttgtttaaagtcattaacttgactcctttactcctttaatcatcaagaagttcctggagatgaaccgacgtcacctctgggaggatttgatctactaagtatttcttgagccttagaccatttactgtgaaatctccactcttaccagctagagtgattgctccataaggacggactttagtgatacagaaaggaccagaccatctagacttaagctttcctggaaagagtttcaagcgagagttgaatagcagcacctgatcaccaacctggaaatccttggtgatgatcttcttgtcatggaaaagcttggtcctctccttgtatattttagagctctcataagcttctaaacagatctcatcaaggtcactaagttggatcaaccgcttctcctcagcggtttttatgtcaaaattcagatgttttaccgcccacatggctttgtactcgagctcaacaggtaggtgacatgattttccatagagaagattgaaaggagttgtaccaatgggggtcctgaaggctgtcctataagcccacaatgcgtcatcgagctttgcagaccagtctattcttgtaatcccaacagtcttttccagaattgtttttatctccctgttggagatctcaacctgcctgcttgtctatgggtgataaggggtggcgactttgtgctttactccatgcttcttcaggaggttcttaaaaaccttattgatgaaatgctttccaccatcacttatcactaccttgcgaactccaaatctcgggaagattatggtcttgaacagctttagcataacttttgcatcgttggtaggactggcaatagcttagacccactttgatacataatctacgacaaccagtatatacttgttactgtttgaagatgggaatagacccataaaatcgattccccatacatcaaagatatcaacttccaagattgggttctgaggcatctcatttcttttgctgatgttgccctttctctggcatgaatcacattttgaaacaaactcctgagcgtccttgaacattgttggccaccagaagcgtgcttgtagaatctttgacactgtcttgaatgtcgcgaagtgaccaccatatgcggagccatggcaatgcagcaggataccttctacttcatcttctgagacgcatctcctgtaaattttatctttacagagagtgtaaagataaggctcatcccagtagtaatggtgtatttctctgaaaaacttcttcctttcataactggtcaggttgggaggctccactttgcatgccaaataattgatgtgatcagcataccatggggatcttccctcaacaacgttcagttggtggaactctttctcgctgtagctcccatcgaagaattctacaaccatgagttgctcttctggcattgagtcgtctattagaatgggttcttcaattctcatccttgaaagatggtcagctgcaccattttcaatgcctttcttgtctactatttccatgtcaaactcttgcaacagaagtatccatctcaacagtcttggtttagtatccttcttggcatacagatgcctcaaagctacatggtctgtatagacagtgaccttggatccaaccaaatagcttctaaacttctcaaatgcgaatacaacagctagaacctccttctcagttgttgtatatcttccttgagcttcatccaacgtccggatggcgtaatatatgacgtgaagcttcttatctattttctggcctaaaacagctcctacagcgtaatttgatgcatcacacataatctcgaatggatagtcccaatgaggcgctcgaacaacaggagcagataccaaaccttccttgatggtgtgaaaggatttgaggcagtcctcatcgaattcaaattaggtctccttgcacaataatctggttaacggcctagctatcttggagaagtctttaataaattgtctgtagaacccagcatgaccaaggaaacttctgatgtcgttcaccgtttttggtggctgcaactgcatcatcacttcaatttttcctttgtcaacctctatacccttttattatatcttgtgacccaacactgtgccttccttcaccatgaaatgacacttttcccaattgagaacaagattcgtctcctcacacctagtcaatatcctgccaagattcaacaaacatgaggagaaagaggagccatagaccgagaaatcgtccatgaaaacctccaccatctcctcgattcaatctgcaaatatagaggtcatgcacctctaaaatgttgaaagagcattgcataaaccaaatggcattctcttataagcaaaagttccataaggacatgtgaaagtggttttctcttgatcattagggtgaattggtatttgaaagaaaccactatatccatcaagaaagcaatagtatgggatgattagctaagcgttcaagcatttgatcaatgaatggtaaaggagaatgatcgttcctagatgcagcatttagcttcttataatcaatgtacattctatgaccagttataatactagtagggattagttcatccttttccttttaaactacagtcattccacctttttagggacgcaatgcactggagaaacccaagtacaatcagagatagggtagatgacaccagcatcaagcagtttcaaaacttcttttttcactacttctttcaagttgggatttaacctcctccgtggttcaatgctagagtaggattcattttcatgttggatcctatggttgcataaactaggtgaaattcccgtaatgtcagacaatgaataaccaattgctctcctatactttctaagttcagataatagcaggttcacttcatcatcatttaactgtgcattaatgatcacagggtaagtagagtttggaccaaggaatgcgtaccttagaccttttggaagtggtttgagatcaanccttcggtgccttaagttcagactagtcatctgaagttggaatgatcggctccccagattcgtcggtagacaaggtcgagtggttgctcgagtacgtcctcgagagtgcaggttgaactcgagttgactcttcttcgctcattaccattacctctgttgctggtccattcaattcctcaaagggttttgattcttccatcgctttatgggagtctaacagcttctggtatcccaatgtttccaaatgtagaaacccatattcaccacttttggttaaagcactgttaagatgatcttcttc

SEQ ID NO: 16140 - DNA, 796 bp, Arabidopsis thaliana landsberg
ggaaaatttgctactctctttgatctcgaaatattcgttttgtagatttgctttaaatgcagggcttactggaaggcgtgagtctttctgcgaatcactccagtcttaaatggaattgcgatctcctagggttacaaaatccctataaattgtggttccaagttttccttactttctatctaccctttcttttctttttttgcagcattggagtttaaccttcgatgctcgaagttcatgccagacttttctatggtcggaatgatggatgaagatatcccaaacgtgccaggaagtgggccttcaccacctcgcagcttcttcaggtcccaaatccgaggtccatgtgcactgatcaagggacttttggacagagaccaagaaatcgcgatggcattcatcaaagctcttacggttcagcatcagaagcgttcgttggaaaagaggaagctccgaaaaaagattaaccgaatgttacgtatagtcaccgtaatatcaagggaacttcacaacctcaactctcatctcggggattggatcgaacttggaatctccgaattcgctcgcatcccggattgtatgatgccgatcatctatcttgctggccaaggagtccaagtgttttgtacgtcgagaagggtttcttaactcgaaatgtatacgtggtgaaactcatctttttgcttattgcttgaataagtgtcgtttcatatccgggccctgtatattcgcacagtcgaactttgggcgtccttgtctgttcgcgtaatcagactccgttcccggtttcatgagt

SEQ ID NO: 16141 - DNA, 529 bp, Arabidopsis thaliana landsberg
tgaaccatttttcctagtaagactctctctccccaggcattcaatttgtttggtttggatgatatcgaaacttacgatttggtgagtttctgtttggattggcgagcaatgcatgttttagttttccttagtgttagatccttcaatattattgcttgccttttagggatataaactgatatgtcaaggcagatacataagtgaacgagagggaagtttatgatagtgttaggtctagtagtaacttaagctaaaaaagatctgcttccttgagttaattgatcttttttgattagctaaatagatctgcttcttgaagcacttcaactgtaataattttatacttgtgtggttttttaaaagtattatattgattttagcaggacctgattgtgctgatgatactactgctctctgtttcttaggtttgatcgtgactggaagaagattgaagattttgttgaagatcatcttgcagtgattaccactgatcacttcatggaccgtatggctgctattcatgttgaag

SEQ ID NO: 16142 - DNA, 3753 bp, Arabidopsis thaliana landsberg
tcaaatcttcgtttctctagtgtatgaaatgtgaatttaaattgaagggtgtatggttctcatagttattgtagatggtacatgttacttccttagtatatagagatgactattacacttttgaaaaatccaactaaatcttgagtttctttctctgtttcataaataaataggctttactgaaaatcgggattcgaggtgttactgtttctgatgttcgagggtttggtgcacaaggaggttctactgagagacacggtggtacgtccttgaattcaagaattggtttgatgattcttcttagtgtcaaaatgggttcatgacttttctatatacattgttgcatttgcaggctctgagttctcggaagacaaatttgttgctaaagttaagatggaaatcgttgttaagaaagaccaagtacgtatatggttaaaaaaatcgatacttcttaagcgaaattcgagtttgaaccattactttttttttatttgttgcaggtggaatctgtaatcaacacaataattgatggagcaaggacaggagagattggtgatggcaagatttttggtaacacaataagttttcttgttactcttttcacaatcagatttatgtttgatacctcaaaatgcaaaacgaaaattactcagattgtgattgtttcttgtttggttatatacagttttgcctgtgtcagatgtcataagagttaggacaggtaaaaacttcaaaagccatattctttttaaaagaaagacacaaatcttggcttgccttaaaacgtgtgtacatgttaataaaacattttcaggtgagcgtggagagaaagcagagaagatgactggtgatatgctttcaccgtcttaggaacaaacagagctcaagaatggtgttattttcatttcgttctctagattctgcgaataatagtgaatggagtctgtgtttggtttcatgttgaatcgatcaagatgtgtttttaactgtaaatgaattacgcagaaacatctgtcctggttctcagacatcggaactctgctcctaataaaaactgaagtccctgtttttatgttagtaatctgaaacaacaattgtttgaagacgccattgccaagacttcttgtaagaagggtttacattattactatcactaatgatcctgaaacagactatacaatacgttgagaaagaagcgaaaaggtgacaatcatgataatgcaagactgatagtattgtgttcttcattttcaaggtgaaattttgtagaaaacgaaagtcagaaaacatttgaaacagcaagatcgtatcaaactaaaattgcaagattcttagataaataatacattaaggaaatcaacttataatggaaatgaacttgtgaaagaaatggttacaagaaatctataaggaacccccactcgctagacatcttaattcacactcatttcataagcgcaataaggagagcaacagtattcttgtgaggaggttccaagtctcttcaagatgataggaaaaatgcaacgcaactgacaacagctgcaaaatggacgagatacactattattgagcacaaccttatatgatctgctccaacgccttaatgtgcttgttggcatgagccctaaaaattttccgagcacacacattatatgtaaactagcccggtggtctttacacgtgtagaaccatgtctctgaattggtttctttttcacaaatgtcacaccaaaatttgtcactagccttttcgccatagcatagtgagagaggatgattgtcaactctatgctttaccacttgtggtagagtggcgcatttgaagcataagacaaatctacaaccatcttcaatgcatcttagcacaccaaaacgtctattcttgcaaccattgcacctttcatattctgaaatgttatataagggatgatcgggatgacttggatggacaaacggctcagatattgaaccacacaaaacatcgaatgtcttgtttgcatgctggtacctgaaaccattggacaatctatcacaagctttacacctaaaaactgtagtctccttagtaactaaagtaagacgctcattgtgtagaacatgccatttctttctaagaaatccagcgcaatttttgtggcgaatgaagtcacaatccatacaaccatagaaggattggagacagatgggatgggtacatgccttgcatcgcttgttgtcatctcaaagaaaaccattaacatggagtctaaggtaatgctctttgtggctaaaattggtgtatagtgttgtcatctattaccacatatgcctctatatcttctgtttcttcaggtactccttcgaattcttttccgttccacacatcatatcttgttgcacatttcgaatgaacgccgctgacaagaaaatcccccacaagtccaatccatcttcttgtgacaaattccacatacagaattcacaacaccgagaagagaagttcgagaaacacgatgatcatgctgattaatgtttatgacgcgtggtaagtcaagacaatcttgatgaatcatgaaattacactaaacacatatgtaagggcttcgatctccattcaacccgcaagcattacatgtaaatgacaagagtcttgggagaagggtgagttgatgatcatgagctttcaaattcagaagagattgttgtggtgggtttaaaacacaacgtagatccaaggtgaagttgcacggagaacaatgatagaacaatctatcatcaatctttcttgcgcaaagacgacattttccatcacaattatccggtaattgacctgagaggagcttaagagggtgtaaggagtggtaagaatggtttacctctgatgggtgttttaactccgatggccgccatacgcaatccacatggaaaggtaattgacattcataacatacgtaaggaaactcagcaccagtaatcttcccacatttagcatcacagttgaactcgatcaactccttgtgaaggttgagcttgtggtgatgcgtctcaggaatgtcaataacctctggtggtggatacttggcacaatatagatccacgtcgaaatcacagagatcacaacgatagaataggtcactaatggtccttccacataaattgcagctattacagccttcgctacttcgaagctgaagagtgtgattggggtgagatggatgttggataaactcggaggactcgccacatttcttgtgggcgaaaaaatcgcagcttttgcaataataaccaacactgacagctttcgagagtccacaacaatcacctttccttagatcattccaaggcatcataagatgttcatggaccaacggcattaacactccctcagaatccatggtcatatactacgagatttagaagaagaagaaaaagaagatgaagagaagaagaagaagaaaaacgttggatctcaaatctgaaagctatgctcctttcacgtttttttatctctcaaaagtcttctcttgttaatctcaacgatgctcttatgaaaatgatagttataattaaatatgtcagacttttggttttgtatgatagtgacaatataactaatcatattagtattttactaaacgaaccacttgtaagaaatagttaattttgattattagctgtcttcgagcaattaaaaggccaactgtccccgttccctcgcccaaataatttcatctccaagttacttttaatatcagaaaactactcgttaaca

SEQ ID NO: 16143 - DNA, 1261 bp, Arabidopsis thaliana landsberg
ctatctcttcataaaatagctttaaaccaatcaagtagagtttcttctcaagtctttttattttatttttatcaagggcgttcttcagcagtgtctctccaatccatctgtatgacaactctcaacaatctttcatgtaatcaacaatttcatcgaagctctcttcttggttcctctaaatccttccaaaatcttggtatctcatctaacggttcagatttctcctatccatcaagtttcactgccaagaagaacctcactgcttctcgagctctctcccacaacgggaatatcgaaaaccctagaccaagtaagttaattgatcctttcttgtcttccaaacttgattaaatatatgattacagagactcaaaatcaagaacacaattcacaaactgagtttgttttttcaggcaaagttcaagaactgagtgtgtacgaaatcaacgaattagaacgacacagccccaagattcttaaaaacgcattcagctttaggtttggtctcggagatctcgtcccattcacaaacaaactctacaccggtgatctcaagaaacgcgtgggaatcacggctggtctctgcgttgtgatcgaacacgtccctgagaagaacggtgatagattcgaagctacgtacagcttctacttcggagactatggccacttgtccgtacaaggaccatacttgacttacgaggattcgttcctcgccatcaccggtggcgctggaatctttgaaggtgcctacggacaggttaagcttcaacagcttgtgtatccgacaaaactgttctacactttttatcttaaagggttggctaatgatttgccactggagctcataggaactccggtaccaccgtctaaggacgtggagccagcaccggaagctaaggcgcttaagcccagtggagttgtaagcaactttgcaaattagtgaataaaattagtcttatctttctcgtgtcctgtatatataataatctttttcatagagacttttatattcttaagcttgtaatcaaataatttgtatggatcttagtatccttgtgaatgcagtatgtttgagttgaaaaacacttgtaatcgaatctttagttttgagttttccccgtttgggaagtaaaatatcttcttcttattttaattgggttgaaaataggtttgtgcatagtgttttttatcggcctttcaaagacgtcacaattacatttataggagttagggttggtgttgtaatccatagacgttacca

SEQ ID NO: 16144 - DNA, 1124 bp, Arabidopsis thaliana landsberg
gtatgtttcatctcttaagctaaacaatggcgataacacaaagttcctctgtgttccgctcatcacgaaactcattggattgtattgatgcattcctgtctttaaactaaagcttgctgcctctttaaacttctcatcagtcgcatccgaaccacattctagccttagttttgtcccttgctttagggtttgatcgctgtacacaaaacaaccttttttgctctctagtcttaacgaaacgcttcctagcttcccgtcaagtccagatactaaccgaaagctagaagctcctttgtcactaggagaagaagcttgaactgtgagggagctatcagttgcttgctttacaatcatgccagggaaatcaaacggctcaagcatgaccagccttccaattagtccttctggacccgaaatccgtggtttagaattatcagtcacgagcctgaaagtcgctgcaacggcatcttgtgtccctggctcgggtgatactctcattgtgatggtttggttgctatttgaaaacacgtaagatatgtttccagatttttgtgagagtgtgacaaggtaactgttttgagtttcaggtataggggttatccattttccaggtttagcctgagttgtgatgctccagtccctgctcgtgtgtccggctaacaagtaggggccatagagtatggcttgaagagatgcgtactctggccgatcatctgaaatactcacaaaataatgtcaaaacagagttgcatacaatttatacatatactgctagttatagattgccggagtaagggtaccagtctacaaaagcaaaactgtgtgtttataccttttatagcttcggttctgatactcattggtagctccatggttacttgatcaccagatttccatttctgtttgattgataggaaattacctgcaaagaaaaagacaggtacaatatgattctcatttcacaaactagagactgtaacagtcaagcgagttctgctttttagaacctaatgctcaaatcacctgaagttggtacgtataagggtcgcccattcaaagatactttggcacctatagagttagtccaaacaggaattcttagattcaaagtcgactccttcgcc

SEQ ID NO: 16145 - DNA, 811 bp, Arabidopsis thaliana landsberg
tttttcacactcataatcattggaaagataagaaaactcaaaattacggtgtctatgttgggggaaccactgacacggattattatgggttgatagatgacataatgatgattcagtatcacggtgctgttggtttaaaggctatggttttcaaatgcaggtggtttgacgcaaccatagatagtgggataagaaaacatccatcaggtctcactgacgtggcaccgcgcacacattatgagaaatatgatcctttcatattatttggtaattgtgatcaagtatgtttcattccttatccacgcgtccgacacactgttgcaaacgactggtgggcatgttagatttgttatctatttagagttctttgtctattttctcaagttcaatctgcctctaggatttagatctttttgttaattttgtttaaggttatctgggtttttatttcatgtttcattcatcacttcagctttattttgttaagatgtttttttatatgacggatttgttttgtatttggttcttataagaccgatttgttttggtttatgaatttatttgataactttggactcatatgttgaacattgttactaatgtggcagaaatggatcgtttgatatgatgtattaaggctgtctttgcttgatttatttatttgtcattgcttgattttgttggagcaaattactcgtttgattaaataagtcgtttgagtttgaaagagtctttggttgatgtagttggagtcaataattgaccgatttttacagtctgttatgtcacgtttgttactctgttcttgagt

SEQ ID NO: 16146 - DNA, 948 bp, Arabidopsis thaliana landsberg
taatttcttagctcttgcctaccaacagttgctttgtttcttagattttctaagttttggatttaaggacacattttcgtgatttccgaagataagatgtctcaagataaaaaaaagttgttgctgagatgaagctgagcgaagacgagaagctccttgaggaaaagactgctggattcattgagtcaattgcaaaaaaaaacagagaaaattacgaaagaaattgtagaaggcttatctaaacatactgatgacagcgacaactacgatgcagaaagtgggggtgaagactccgaagatcggccctagcaaccaagccattcagtctttggaaaatcaactattaaacagagtcatcttgataatatgagaggaaggtattttcgggatatgtctattgtgagggctgacatcggagacaagactgttcctgttcccgaagaaaatgaagtcgtgatctacagaagctttttcaaagctgggctttggttccccttaaacaaatttgtggttgaagttttaaagatatatcagatttaccttcaccaccttactcctgaagccattatcagaatggggatcttcatctgggccgtgaggagtcaaggtttggagccaagtgcaaaatgtttctgcaacatgcacgaactttcatatgagatgaagccttggggtaaagaacagtatcataacaattttggttgctatagctttgttgctcgttctggctcaagctgccccgtgccaacctttcggaagagatggcctggagattgggcggccgagggatggccacgaaataataaagaagagcgaaaacgatactcatgatgctagggaagcaacaaaagcagctgaaaaagcctcggaactcgaaaggcggataggtattgcttaatgggttttaacttattttttattttttgtggcttcgaactgattcacatt

SEQ ID NO: 16147 - DNA, 844 bp, Arabidopsis thaliana landsberg
ctccacttcctcttctgatagcgaaactacaatgttagtttgccataactctcgattcgtagcaaatcaaagagacgaggcccaatctagtcaggctaatcaaattgagattccgaagttgatagatgaatcagatcgggatggcgctgacggttatccggctagacttacagaaaacccggtaaactatctgaatcgattcaaacccctcatcgatctggaagtcgcttacaacgtcaatccgagatattcagaagctgaagtcgtggcgaggctacttccaattaagaccgccgaatttgatcttgatccagttgtcgactagaacagtgagatcactgcgagtgaaactctctcaaaagaagaatccgtcgtcgaactgctttcttcttgtgggtgtggagatcgcccaatcatatacatgattcctggtgcagacgattgtccctggagtcctcccaaggggtatgtttgcttatacgaggcctacttcaggcaatgccacctctggtttccaatcccgtccttaatcatttctttcctcactcgccgtcgtatggcgatctcccaagttactccagcagcaatctgtaatttcgtcgctgccttgacttttggtgctgaggaaggctatcgagtgaacgttgaagagcttgacaacgatgaaaaccattaggtcgcctggatactaggtggtaagcaatcgccccaaatataacttcctccctggccctaaggttagcaatttcaagaactgggaggagttctacttcttttgtagggttgatcttgaatcttacgagagtccgttctcgggaaggaagaggatgtctgcagaagatcc

SEQ ID NO: 16148 - DNA, 1882 bp, Arabidopsis thaliana landsberg
taaatccatcaggaaattccaaacgaaatacctatttaagttcttttggagaatttgctctaaacaaaatttgttcttttttttttgttaattataaacgatttatgttgtaagagaatcctccaaacttcacaataatttcagatgacattgtcgaaagatcttactagaagacaaaacagaggaaggctagcttttggagtgttggttgtctttttattttcaatcaacttttttaagtttgattgaatgtacttttaaaaatacataagtattgtcttgcccaataaacaactcatcatcattgacataaaagtagttcaacacacgaaaagaagaagacaacatcaaattccattgttagttcttcctttttctagacaacaaagcctccattggctctaataacttgaccgttaatccattcaccaccatcaccggccaaaaaccctacaatctcggttatatcctttgactcaccgatcctccccataggacaagcccctgcaagcatcttcaccgtttcatcactctttccagcataaaacatctccgtcgcaaccggccctggcgccacgcaattcgcggttatccggcttcccttaagctccttcgccaacactttcaccattgtctcaacggcggcctttgatgctgcgtaaactccataacccggggcgagaccaccaaccattgatgtagacatcataatgattcttccaccacctcctctcataacccttttagctgcttccttgcaacacaagaaagaccctcttgtgtttattgtgaatgtgttatcgaaatcttctactgttgtctcggataaagatggatactttggatccaaaacacctgcacagttcacgacgatgtgaactttagatccgaactcttgttctgtttgatcaaacaagttgttgatctggtccgggtctgacacatctgctttaactgcgatcgctgactttggttgagatgagtcgtttagttctgaaaccaagagttcagcttttgatgagctcgagacataattgatggtgactcttgcaccaagagagtggaggtgaatcgcgatttcacggcccatgcctctggtggctccagtcactatagctacacgcccggctagagggagagacgatgagcttcttggattattctccatttctcgtgttttttttcttctaaatttttgattaaaacaagaaaaaatgaggaccacatttatagacataaatacataatggtggcgttgttggatcactttgagatacagccacatgtacatgggtggggagtcaacggtctcattttgagacatgtttttgtttcgtaagcagtgacgtgtgtgcattacactcatttgaccctatgtgataatctctgaccactattacctaagcatatatgttactaatactacaataactttccaaattgtctactcaaatatattcaccacctaaagcttggttcaaattttactttgagaagtaagaaaatatctaaggccatatataggtcacattatcaccttactcatcaatgaaaagcttactctgggaacaaaaccatatagggttatgtttgttttgtagacattggtgtcaacgataaaccacaatggtgaaagacatattcacagttacaaattgactttgatttttttcatttgtgttggtttattgatacatattgtgaagtgaagtggcttaggaaaaaaaaaaataataaaaaaaaaaaaaagaggaaggagacactctaactgcaacagagggtctcaagtcttcaaagaaaaaggcaaaaactagccccaaatccacttacctactttgattctgctcttatcttagttttgcattcttcaaatcaattctta

SEQ ID NO: 16149 - DNA, 2166 bp, Arabidopsis thaliana landsberg
aacatgaaatatgtaaatcaatgttaccctgaaagtggactctctggataagtaagaccaacgaaaccgagttctggaccgccgtatattgcttgaccctacattaaacaaagaggaaatcttagcataatgatttaaaactatagaaaaacagtttatgctatagtaaaacagaacatatgcataccagtattgttatattgttcccaagtgttatggctgtaggaaaagaacggtcttgagtggttgcagccactgtcaagacccaaggagctacattcgaaatggtctgagccgtggggccagcattaccagctgcaattacaacaggaattccctttgcgaccgcatggaatgctcccacggaggtatgctccgtttcaggaaataaaggaacactaggtcccaaagaaagtgacaaaatatcaacaccatcatggatagcttcatccattgcttttaatacatcagctcccgaacaatacccactccagcatgccttataaacagctatatgaacaccgggagcaccgcctcttgcagttcctcgtccgaggcctacgtagcttacattaggcagaaaagaaccaccaatggtcgaggcgacatgtgtgccatgaccggcaaagtctctgggagaaagatactcagggttctgagttctgttcacgactccaaattcggcaacaagaccatcaacaaagtattttgctcctatcagctttctgttgcaatgaatcgaggcgttgaagagttctccagattcacagccgcctttccaacgacttggtataggtccaaagcctttgtcattaaacatttcagactctggccacactcctgtaaccacattttatgttttctattagtaatcatgtcttaaagagaatcaaacatattttcgatatgcacatacctgagtcgatgactccaacgattacattgtaccccatattggccttttgtaggagactatctgaatttcccggagatacacctaagtaatcccaagttcttgttgttgtcatttcgtataatgtatttggtatgacttgtactacttcaggcagttctgttttcaagaaagggcattgatttgtttttaaaaaaaacaacttcttggtttaggtcaaatcaagaaacagagttcaacgctaaaagtaccagaaatttgctgtgcttgggactcagtgagcttggctgcaaagcctgaaaagccgtgtcgataactatacactattgaatcaaggacagcctctttgctgaaacatgaaaatcagcaaagtaacgtaaactatctgagatatttcgagatatgtatatcttccaaaagttcctatgtagaagtactaaatcataccttccaagaagtgaccacaacatctgatggtgagattcagtgacagactcaggattgtcatgttccttctctcccaagtaaactacataaacctatttaatcacacaagcaaaaacaatagtcaatgcttatgttgcatgagcaagagacatctcgcataaataccaattaccttgctctcagctacgacgaaactgatctgcacattcaaaactatagatagaaataacgccaagaaaagtatggttttgctcattttctcgtttgaaagaagaaagagataaatgtttcgatgtttaagattgtcaatgaagcaaaggctttatataaggtctaacgttcgaggactctttctacaaccatgtcggttgctttgtttttgagattcaatgtttcatccttgacatagttcaaattgaaaatctatattattttaaacattggattttcaatattaagcagctgtgaatagttctctaatgagattagaagtgatcaacataacaacactagagttgtatctaagttaaagtaattcaaatattgaatttaaaaatattaagaaactttgaataattctctactgagaataaaactaattaggttaagaacactagaatattttcttggctaaattactcttaatctcgaattttaaatattaactctgaatagttcttctactaattaatattggatggtaaatatcaagctactctgaatagttctctaccagagattaaaagttgtgttatgaaataagaagactaaagaagtatcttagagaagtgaactgtctggattag

SEQ ID NO: 16150 - DNA, 896 bp, Arabidopsis thaliana landsberg
gtagaatcattggtactccaagtccgatccgtactcatcagctgggatggtagtttgggtagaaaaattagttactgcatattcatttctgctctactaatctggtgtaagtaaaagggttgctcactacactggaccactgactttcataagatatccttgctctagacatgtcttgcaatagtttcagataattctgtttcgtttatcacatgccaagactgcagaaacaaatatatacttgcactatcaatcaggtgcaactgtggattggtgctcggttggcatcatcctctttgaactcattgtagaaattctacccttcaaagcagaacatcctcaggtcatagactaatcactgctttgtttcttattaatgctttgacaaaggaacatatgttttctcaaaatcttagatacgaaaattcatacttgggctggtcttcaaatgccatgtttttatttatttggcttctcaactcatttaaacattcattcatttgaagtcagcacatatgtgtctatacattttctgtgatgactagttccaacaagctgtaaactgttaatgacactaatttcatgactcacatcaagcagcacaccttcgttaaagacatcaacatgggacacactagcaaggcaaaaggtgcatttatttatcttactcttttacagacataagctttgctacttgatgccctcttaaagttgaacactatttttctttaggctgcatttgttccggcttcagagagtgaaattgacacaagatacattagaagccgctaatcttggaacgcatcggatgagcaatttttcctgaaaggtaaaagtacaagattgtagtgatgctgatagcttgagtggcagcagtagttgcttgcgcaatcatc

SEQ ID NO: 16151 - DNA, 2710 bp, Arabidopsis thaliana landsberg
tgtacgtatatattattaccgttacgcacatatgtttatatgatattgctaatcgtgaattgtcttcaaatgataataaataaaatattatttaaaatagaaataaacatgttagatgttgttttattgtaaaggcgacatacaaaatatttattgagtttgtacattagaaacttttgattattttgattagataaaatatcttttggagttttcatcataaatctattcatatataataattaaataaaattatatggtcagagtatagttgttcctcgtacttttgaaaaatgttatgtacgtacatgtataataatgtacgtacatctttgttggtgagttaaaattgttgagaataaacaagattttaaactaaacccttaaacatacacgataatattgagatacacgtacacgtatacgaccgctctaaacagttacatcataaaaatgtctaaatcacataaatctaatactatgtacgtacacaaaaatatttattggaacgtacatggtacaacattaaaatgagtttaattattctctaaccattgtctacgaaaaaatttaattttatttttttgacatccagattaagttattatttaagttatatgtatgctgtatattttaatatagattatgcatatataatatttcaacgaatcgtactctcattcatgtaaaaccgatcttccaatactaaattgcacaccattacaattcatttcacatctaccatgcctatatgtattcgtgtacgtaaaacattcatctttacataattcaccagatacataattagtagtgtacgtacatattctttgataaatgtacgagtgtacgttaacttcgattttataattgtaatttgggtaattggaatataaaagtctaaatataatttatgttaagtatataactatattttgaatacccattcggttctcaatttgctttggataattttgggtttacaaatacaaaaagaatctctaacaaaacaatttatgaatccagaaatttttaaaaacgtatcattactttcatatcacgttctcaagtgtaattaatagaattaacacgaatttcttacccaggacacatattgtctccccttcaatcctttaaactttgaaaaacatcaactgaaaacttcagattcttcaccgtaacacaattttgattttcgtttttttcctagaattctaatctcaattatgtaaatatcttacaatataatctctattataataggtaatcatgagttttagtcttgtcaaaactttttagcattaaaaacttctgagcccaaccaattttaaaaaattttaattccaatctttagtgtcaaattcgccgaaacccagaaaatatttaatgcatttctcgtcgatgaacagtgtacgtacaaacccggttctcttagattccagcgacgcggtccgtacgtacaaaccgggttcagtttcgtcagaggcattttgatcaatttttggctgaatggctaagaaatgaaaggcccagcccacagtgtcaaattttgaaattaaaagtgggtcaacgactactgtgcgcaatttaccctatttactaaccatcgatatagagtgtctttacttgatggttaaaacaattattcaagttataaacaaagcgcaacatgaaatacagtagtaatatacatgtacacattacccaaaagtgtggctaagaatatgtaaattagttctaatttatttttaattctaatttggtcgtttttgcggtttaatagaagaggcgttttctctttttctgaaaatgataactgatccttctcttcgtttgctttgccccacatcacagcgtaaaagcctaatgttatcaaaattcctccgatcaaactgcaaaacgaaggacaaaatcgaaggtgagtagatgtttttgtttatagatatgtttatgaagactattgattcattaataccatccgagatagagagaatcattgagaaaaatggcccccataaccactgctattaaaatggacaaaggtttaaatatggctaagtacagaggtcctttatgtcgtactgtccatgaatgaatcacatagtatactgaagttactattgcctgaaatattttatttttaaaaaagtgttaagatgaaaaagaaaatattttgataattttctttaacatatatataacataccgtagtaacaattgtaaacaatgtaatatcgaaatgaatgatccaaatgcttgggttgttcttttcgactactagtccaatcattgaggtcacgattgaaatacatagaatgtagagaatggagactgtgaatgcttcaggatattctctcattatatgtgcctatccaataaacattaaaattaaattaaatgatgtttaataaatgaagatataaaccacgtcaatttgtgtagctttctccaagcagtctagtttgctatgcattcatacatgtttagaaactagagtataaactctataaattaataatgttgggactataaaattttattaatttatttaataaatattattttataagataaattaatatttattaatttaaagaaatatttaagcaaaatataacactatattttttggatagaataaatgtcaattgcttactcgactattccggtgaaaataaagcacactaaaaaatttagaatatttagaagaaat

SEQ ID NO: 16152 - DNA, 343 bp, Arabidopsis thaliana landsberg
tcaggtggtggatcacacgtcacatgatttcacgaagaataatggagtcagcttccgctttgacacctaagaagaataatggagtcaatcctatcatgagtgtgcttctgtttttccttgtgtgtaatgtaattgactaattgccaataccaatactgtgtactgtgtactgtgcacacaaattggttatatgcaataaaataccggtttaagttaaccaaccctggtttataaaatcctaataattcttgaattggttttctaaaaaaacaaagcaaatcatgaatactaaagaaattaaaaaacatcatttggtgtttctagtaatctgctctgttgccag

SEQ ID NO: 16153 - DNA, 839 bp, Arabidopsis thaliana landsberg
aattttggtcctgcagcaaagaaccccagtcccagaggactgtaagctacaattccaatcccgagctcccttgagaaagtaatgcaaagaatgaacattacaagaggaggatataaaattatatcaaggaagagggatgtttgcggaagattctgcacctgcaagtaggaatgatgtcttcttcaacgtctctcgaccataaagaccattccaactgcacagcggttagcgggtgaacagcatgggctcttcttatagtcgaggcacaggcttcagacaaaccaatgtactttatcttaccctcttcaactagcttcttcagttctccaatctttgaaatggcaggacaagacaacaccataacaatcagctgaaggattcaagaaagaagaaagattgccaagaaaaagcttacagtgacttcaatggggacagtggtatcgatcctatgctggtaataaagatctatgcagctaactcctaaacgccttaagcttgcttcacaggcagctctcacataggctggatctcccctgtaacccaatttctgatctttcaagagaagcccaaatttggttgccaattccaccttctccctcatcccatctttcaaagcctgattacattcacatagccaagcaatttcaaatcctaggcaactcaatagtgtatgaacaaacataggatatctcgaattcaaacctgaccaaggagcaactcgttggtctcaagaccgtaaatgtcggaggtgtccaggagtgtgatgccggagttaatggcatggtgaatgagagcaatgagatctgtctcaaccttggtagttccatcgaagatggaaa

SEQ ID NO: 16154 - DNA, 1570 bp, Arabidopsis thaliana landsberg
aagttgtatgatcttcaaatcgaatagtgtagccaacttcctccccaagattcactcccatttcctcggccactctcgcagaaaccgcctaagcaaattacaaaacaaagcatatatgtgatcaaatataaaaacttgagctgagatatcactcttcaaagttcaaacttgagttgtaagattttgtttagggagagaaaacaaacctggacagctaaacgtcttggctgtgtgcaagcaataactcggcctccttcagcccacccagcttctttcaggtactacaaaatataataaacaaagctattgagctaaacaagaagaccttgctattgatcgaattgtagttttctccaattctccaacttccccaacagctattgagctaaatattgcatgattttgcaagattttgagtaacttttatgcctctctctagctacattgcaaatatatcagcaagttactatcacaatccaaattcacaagtcgcaacctttgactcctatcaaaatttgcctactggtctaagaaccttgaaattagcaaaggtaggtgctttccccaaaaatattaacgaagagcaaagaatgaagaagaaacctgaggaatctgagtagttttaccactacccgtctcgccaacgataatggtggtagcgtgattctccaccaaatacagaatctcagttctgtacttgtacactggcaatctctgtctttgcttctctatattcgcatacccatagctacaatttcgactttaagttacaataacaatcatctgtagaacaattactgccaaaaagaaagagaaattagcatacctagaagaagaagaggatgcgagattgttggacatgaacactatgcctccttctccatcctcttcgaaacgaggtttctcggtccctggtttccaaaacgccatcttttcttcgcccaagagctttgccttcttcagttatttcagtttatgagaaggctttttctctcttatgtgcttttcgttgttaacgccgatggcgacacggttgccggcgattaacaggttcgggtctaaattttaggcatttggtttaaatgatttcggttcaatttaaaaaaatcaatttggttcggtttgatatcggttatatgttcaccattccttgggattatttaacaattaaaagaaaatgtatcgtcttgcttcttcttcccacactactccaccactccataacaagctctcaccttttctcctccgccgtaatctacgccaccaaagtcaacgacttcaccgtcggaattgtcagatcagagcaatgagagctgtaatccaaagagtctcatcttcctctgttacggtggatggtcgaatcgtatcggagattggtcctggtctcttggtactaattggaatccatgaatcagataccgagtctgacgctgattacatgtatgcttgtacaaaatgattaatgcttccatttaaattttcattataaagtttgcagattctgaagttgaaacatgtttatagatgtcgaaaagttttaaacatgagattattttctaatgaaaccact

SEQ ID NO: 16155 - DNA, 1216 bp, Arabidopsis thaliana landsberg
  unsure (1)..(1216): unsure at all n locations
tcactttttttttttttttgtcatcatcatcttattgatttataaatcagtagtgtagttactatagcatagattattacattagaaactcataaatgattcaggaataaagattggttttggagaagagctttagtaagaatatcagctggagtattgtgatgtctttttatccaattgaaatggattgattcaaacttccttgaccaccaatgaatatcccgtatccagttgtgaacgccaaaatgtaccttggatccgttaattaggtcaaacagcatcttgttatctccttcatagcaaacccgtttgtaaccatgactccaacagtgnnnnnnnnnnnnnnnnnnnnnnnnnatttcactctccagagcactctgctggaactgtcaaaggcttggtatagacttgacggttcgacgtcttaaggagataaatcggaaatatctctgagacgtaatttgcatctccaaaacaaaacaacgcaatgactatgtgcgaggcaagtgctgtgagttgggttttagtaactttgtaatggtgccaccatcaggtctaagtggtggtttagttgtactttggaagtcttctgttaatgtttctatttctttcaattcccctaatcttgtagattgttatgttcaaagtaatgaagtgggtttaaatttgtcttttgtctatggtcatccaaacccaagtcatcgtaacaatctctgggaacatcttgaaagactagcaaacaacaaaaatggtcagccatgattcattctgggtgatttcaatgaactgttaggcaatcatgagaaaaaaggaggtagaatcaggccgaaagcgtctatcatgcaaatgagacaaatggttcgtacttgtgatttctcagaccttaaatccactagtgatcgtttctcatgggttggaaaatagggtgatcatcatgttttatgctgcctagaccgcacaatggcaaacaatgcttggcattcgcttttttccaatcagaaacagagttccttgagtttggtgaatcggatcaccggccattaattactcacattgctgatgaatgtgaagatcattgaggaattttcagatttgatggtcgacacatggataaggaagaattccgtgactcggttattcaaggttggaatacaaaaccccgccaagagtcactctcttattgtctaacatcctgcagacaacatatctctagatg

SEQ ID NO: 16156 - DNA, 4713 bp, Arabidopsis thaliana landsberg
catgtgtgcaggtcgactctagaggatcccctcgatggtgggtagcttctacggaatcctacttgcgactatcactacaagaaaataggcgattagcgagggaaatttgcggtggaacaaatccctcgcaatttgctacggatttgcgagacgtttgcgttggaagaaggaaacctcgctactccctcgcaaaatttgcgacgaactcaaccctcgcaaatttgcgagaagattgcgaggaatttgcgtggaaagcatcatttctcgcaaaaacgtcgcaaatttgcgagggatttacgggtaacatgtctccctcgcaaattgcgacgaatttgcaacgtctgtttattctgtcacaacttttgcgacggagtagcgagtcttggcgggttaggtgagcacgttttaaattatcttaccagtctggttggtaggtgggattccctcgcaaatttctagcaaaatcctagcaaatccctcgcaaatgccttgcaagtccctcgcaatgttttttgggacatctataaatagccaatgtaatgtctaagaaatcataactcaaatcacaacatttacttacaaaaaaaaaaataataataataaaaaaaaaaacttattacaaaaataagaatgtcttggggcggagagcatgagatttacacattacgaagttggaagtataatcatagagatcaagcgaccggggaggtgacgagagagtattacgacggactgcgcggtttcatgtatcaagcgacaaacgaacaatttgctcgtgagaacggtacaatattctgtccatgtcgtaagtgtctcaatgagaaatatttggaatttaatgtagtgaagaagcatctttataatagaggatttatgccaaactactatgtatggttacgtcatggagatgttgtagagatagcgcacgaactagtaatacaaattatggtgtcgagcaacctagtaattttaataatgatgcgaattatggtcagcaaatacctgatcaatttggttatgggcataaccaggaaaatagatttcatgatatggttacggatgcatttcatgaaactattgtttcatttcctgaaaatattagtgaagaacccaacctagatgctcaacatttttacgatatgttagatgctgcaaatcaaccactctacgagggatgtagagaaggacattctaagttatctttggcatctaggatgatgactattaaagctgataataacttaagtgaaaactgtatggattcatgggcagaattaattaaggaatctttgccaccggataatatatcggctgagagttattatgaaatacagaagttggtttcgagtcttggattaccatcagaaatgattgatgtatgcattgactattgcatgattttctggggagatgatgtaaatctgcaggaatgtcggttttgcgggaagccgagatatcagactactggcggaaggacgcgagtgccatataaacggatgtggtacttgccaataactgatagattgaaacgcttatatcaatcagaaagaactgcggcgaaaatgagatggcatgctcaacatacaactgcagaaggagaaataacgcacccatcagatgcaaaggcgtggaaacactttcaaacggtatatcctgattttcctaccgagtgtaggaatgtgtatcttggcttatgcacagatggatttagtccattcggtttgtctgggcgacaatattctctttggcatattatcttgaccccatacaatcttcctccagatatgtgtatgcaaagcgaatttttgttcttaagtattttagtacctgggccaaagcatccgaaacgagcgcttgatgtcttcttgcaaccgctgattcatgaactcaaaaagttgtggtatgaaggtgttcatacgtttgattactcgagcaaacaaaatttcaatatgcgggcagtgctaatgtggacgattagtgacttcccggcatatggaatgttatcggggtggacaacgcatggaagattatcttgtccctactgtatggatcgtacagatgcgtttcaactaaagaaaggcagaaaaccatgttggtttgattgtcaccgtcggtttcttcccctacatcatccgtatcggcgtaacaaaaaactttttaggaagaataaaatagttcgtcttcctccgccatcttatgtttctggaactgatttgtttaaacagatcgattattatggtgctcaggaaacctgcaaacgtgggggtaattggctcaccacggcgaatatgcctgacgaatatggaagcactcacaattggcacaaacaaagtatcttttggcaactcccatattggaaggatctattcttgcggcattgccttgacgtgatgcacatcgagaaaaactttttcgataatatcatgaatacgcttttgaatgtgcagggcaaaacaaaagatagtttgaaatcaagattggacttggcggaaatatgtagcagacctgagttgcatgttacacgagatgggaaattaccggtttcgaaattccgtttgtctaatgaagcaaagaaggcgttgttcgagtgggttgttgctgaagtgaagttcccagatggatatgtatcaaaattttcaagatgcgtagagcaaggccaaaagttttatggtatgaaaagtcatgattgccatgtattcatgcaacgattactgccatttgtattagtagagttgctaccggcaaatattcatgaggcaattgcaggtaataactatttatatatatacatactgtatgttttgttttactcaactattacttggtcattactaacttacattaattaaatacatgataggcatcggagtatttttcaaggacctatgtacaagaacactgacaacagataccatagaacaatttgacaagaatatcccagtgttgctctgtaacttggaaaaaatatttccccctgccttttttgacgtgatggaacatttgccaattcatctgccacacgaagctgctcttggtgggccagtacaattcagatggatgtatccttttgagcgattcatgaaatctcttaaaggaaaggcaaaaaatcttgctagagttgaggggtcgatagtcgcaggaagtttaaccgaggaaacgtctcacttcacgtcgtattactttagtccaagcgttagaacaaaaaagactcgtcctcgacgctatgacgatgacgtcgtattactttagtccaagcgttgcacatacatataacgttcctgatgttccagataccttttcccaaataggaagactggcagggaagttgaaagaagtttggtgggacgaccatgcgctttctcgagcagctcacaattacatactccgaaatgttgattacattcaaaaatttgagaggtataaagtcattcagttttattcattattttgtatatttaataattaataactgagatattaattaaggaagctaagcatctacgttaatttgtaggttatttgattcagaaatccgtgaagcatgtcctggattagaagaaaaagaatatgaaacttacaaagatcgggattttgctggatggttaaaatactatgtaagtataagaataattagaaaattcgtttacttatttacttataaaaaatgataattaaacttaacattttctttgtgtaggttacaaacggatgtggaaacgaaccattaccactttggttgcatgagctcgttcaagaaccaagatctaagatcacaactgctccgatgtacttcactcgcggatatacttttcatacgtatccatatggaagtcgaagggcaactgcaaattacggaatccatgtggaaggtgaaactgagttttatgggattctacaacaaattctagaagtcgaatatccgggacttttgaatttgaaatgcgtccttttcatttgtgattggtttgatccggtgataggtcgaggggtacgagtaaataacttaggcgtggtcgatgtcaatgcaaacaagaattatgccaagttcgaaccctttatcctagcatcacaagcagggcaagtaagctttctaccttatccacgtgtgaggcctaggcgtgaactgtggtaatcggttattaaagttaatcccagaggccgtatagtcggtcttgttgatgatgttgtgatgcaacaagaaagtgtcagagaagtttccataccagacataacaacagaagatgttatccatatttacctacaaaacagagaattagaagacatcactcattacggtttcaaagaagaagaacatcagacgaattcggcgattctcatgtagacgttgagtctgaaaatgatggtagcaattcagaaaatgaatcagaatgaatgttattattgtttaattatcaactttttacaaaatataataaaaatattactttcgatgtttttaccaaatataatataaataaacaaaaaaaatctgaaaatgtgattaaaaatttgaaagttataattttctaatttgaaagtttataattataattttgcatttttaggtaattattttcataatatttctattttttttttcaaaccagttcctttgcaaatccttagcaacttgcgagggatttacaactacgtcacgcaatttccacgcaaatgaagctgaaaaccctaattgagtgcgcgtgtaccttaaac

SEQ ID NO: 16157 - DNA, 275 bp, Arabidopsis thaliana landsberg
ctctgtggttatttaatctctttattgcttcagaacatgtctgttattggattcgatatcgaccctgaatctcttgaaacagcaacactaaatgcagaggaacttgagtttttttttgaaatgaaatgagttttcttttggttgtatagcaaacactattgctataattggtttgttttgtaggtgcagatagatttcgttcagtgtgacagtacaaagctagagttaaaaggtacaatcctcctttcatttttggtacaatcctacccgtaact

SEQ ID NO: 16158 - DNA, 569 bp, Arabidopsis thaliana landsberg
ccaacctcagcagcaccactcgactgaaaagatattaaaatagaacccttctttataaagcgtactgacaaaaataataataataccatgcttagtagagtatcttcttcacacgaaccatggaaagaacttcttctaggagagcaagtaagtcgctcaagaggtaactgtagactccctcagtttttatctcctctgacacaaaagcagtaaagaaattttgtagcacggaaggaacttggtcttccaggtggtgttgtaacggttgcatattgtgcatcaaatcttctttgagtatcttaatactcacgagggcctgcgatataacatgtttttgtgagttaatcaaagagaatgaggaagtcaagagatatggaatgaactaatcagaagacgagagtttaggtattgaatctttaccttcagcgtcatgtcaagagctgaattgtatctggctgcagcttctccagctgctgactccaaatggtccgacagaggatcttctccatgtctgctatgcatatcttgaaaatggcgaatgaaagaaataagaattatgcattttaaaa

SEQ ID NO: 16159 - DNA, 3223 bp, Arabidopsis thaliana landsberg
  unsure (1)..(3223): unsure at all n locations
cttgctcttttttttctacttgttcatgagaagttgtgaagtgctgttatatatagttggtttatatggttagagggagagaaagagagagagaaagggcccaagatttggattaacataaataaatgaattgtgaatattaactatcatacacaaataaaatcaaactcggaccgacatgtttcagactattctcgtgaatcgaaaatattaattatcttcctttgtaataagtaactgaagaaaatcgtaacgtatgtaggaatccgtaattgtaagtttgtaaccgatgaggaagtcgaatagagtccatacgattaaagtttgttgcttgttagttcaagaaaacgtgataaaaatggttttttctgatacgtggtaaaaaagattgaaaatgacgtggatgtatttgataataattccaaatgtgaaaactacgaagcattttgcaatgaaaagttttgtagcttccttacaaataattttagctatcacgtggagttcatttttttgttattagctgtgaaagttcgtagatgttttaaccctaacaatataaattaagatcggtatgattttcttctgtttgagaatgtttgggtagcttaacgacgtactcaaccttgaaatatttaatgccttgagatatatactaaaagaatctgacgacttcaacatttttaaaataatatttaactttaacttccttatctcagaattgcactaattttattgatactttactacatgtaaagtgatttctaacctacttcagttatcaaagtgctcttaatagttcaaaatgataacctacgcaaggaagaggatgctctttggaattgtacaattctataaaggcaataatatgaaattatatagttcaatagatggtgaaataaactgtatgcatagttcttgtaagaagagagtaacaatggctgtaacttgtaattatctattttcttcaatcgtctctcttttgagtaaaatattacaaaagtagacatatttctagacatagtactgtactaatataaaacgtagcactcaccagttccatctctataaaattaagttatgtataatttccttacatacgtatgtgtaattggacggtgacttttattctgtattagcaacggacggtgactatctaactacattatttatgccacttagcgatgatagttaactgaatttatgactaaatttgagaatcgcaattataatttttaaaaattcaagagtgttaaaagatgattatttatgtgtcatgcaatagcaaattaggcgtacgcctatattcaacataccaatcaaacacttttcgtttataattctaataactacattattaaaaaaaaaattagttcaagattattgtatgttggattattcaagtagagcttttaaacaatttaaatgtaataattccgaaggagagtcgatttaaatatattatgggcaaaacttgtattagtaaatggtccgttgaccatctaaatagaaggccgacgacttcccaataatagaaacatggttctctgaatttggaaggcacatgtggatactatccaactacatattgtgtaacaaatacttatttaaatcccatttttaaattaattaatcaaacaaatttagtgaggttaggaagaataactatgattgattttaaatgtgaaaaaagtagaaaactattttcttaattataccctaaaattattggtatataaaccttcagaaggatgaatctaaaataatatataatgcaatgtatattttattagtataaagcttcagtatcggaaacatagagatttggatctgcttaatttgtagtatatatacaacatctccttcgtcgctcacgtaatgatcttcttttatactttttgctagaatttaaatgcatctaagataatgcaatgtatggtatatatagcttcagtatcgcaaacaaatttgttgtttccatctgatcgatcgtattcagagatactaactctctggttggtgacacaataaattgatacagtaagcaaaaaatcaactggtctgaaatagaaaaaacttcaatctcaagcctgcttcatttcaatctgctcttactttgacctctccatagagatttggatctgctttatagtatacaacttctccttcgtcgctcacgtaatgatcttcttttatacttttcgctagaatttccagtaaatgtaatggcaacggtccagacttattaggctccctgtaatacttccctaatactggtttagctgcttctgtctgcataacagtggagcaagagtcagggaaactagcatgaacaccaaaaacacaaacagtctttactttcaatttacttactgcttctactagatgataatgtgggatctgcgggaaaagatgatgtatcacatgagttccaatatcatgatggatgttattgatcaatccgtagtcacgatccaatgttgtaagtcctcctctcaggtaactccactcctgttttgggagaatcatgagatttacacaccagttggctttaaccttaaaagaaagagcgatgtagtcaaagaacagtggaagcagagaatatgtattttaccttgccacggtaccaaggaagcttatctnnnnnnnnnnnnnnnnnnnggtaagtcacaaagtccaaccacattacatttatctgtatttgacataaaaacctttttgagtaaggcagaggaaattttttacaaattgctcaggctggaacaggggagtggcagcggcgcattacccagtaaggaattccataaagtttgagcatttgaattggaccgattgtgaagttgagacaaacaagcagagcagccattgcagtccaacaagcagtagaagtgaggacatcctttctctctttagggaggaacaagtcactgtctggatggtaatgagaaccctttttccccggacttcgagcccactgaaacagaagaatagacatgagcttttttacttggtgtggcagcttaagttaccataacaaatagaggagttcttaccaagtagaaagggtatgcaagcatcacgagaggcagtgtaaatctaaagaatctagtcggcttgtccaaagtattgtagattttctcagacatctgcagttacagaaacagttaataaaactgcatctaagaaacaccacaggactaaaacaagatatccaaaataatacgtt

SEQ ID NO: 16160 - DNA, 454 bp, Arabidopsis thaliana landsberg
aataatgcttacaaataatcaataaactatatctttgtgtttgacttaccagtttgtttaaccgtggaatagcggaatttcgaaagggttggcaacatttcttgagagctgcccgaatctgaaaaccctagtcgtggtagtaaatctgctaaaccctatgataattttctcatctctatgcagcttctgccatatcatttgattgtatgttctcctctcctttttcctcagctattggatagttataattattactaccaggagctacatctcgaggatatgaatcaactcaagtgtttgcaatcctctgtcgagtttgtggatttcaaacgattcaatggacatgttgcacaaatgaagctattaaggtacttcttagagaattgtgctgccctcaagaaactcactctacatttggattataattcaacagaagatgaaaccattaagaaac

SEQ ID NO: 16161 - DNA, 2693 bp, Arabidopsis thaliana landsberg
  unsure (1)..(2693): unsure at all n locations
caagtgtcatactgattgttggcgtggcctgcaaccaaaatttgggttttacttaattcacgaagatattcacgcggatgggtagaactaatatccggaaaaacaagaaatcaagaataagtgtcaagtacaatatttatgttgtcagaatgtcttacagtcctgttgtctccacgcgagataagcctgaagaacctctgctgatgcacaacttacaacttttgaactgaaggacggagcatataataattttctttggggaaaaaactctttccattttgttacataaactgcagcaaagaaagaagctaccaacgacaaaatcttactgcatataaaaaaaaaacaagaaagtgaaaaacaatgagtcaatcagagaagaaaaaaccacatatcattgaggaaaaggttttcttcaagtaaattcactaaaaatatggaatcaactttaatcgaaaaaatacctggctcgtctctggtagaatcttgatgttttcttgaatacaaagctacaaaagacatgtaaacatataaatcttgtacaagatacatagaggtgaaataaataaagtcaatggagtgtatttaggacctgtattcgtcactgtatccataagcaaagattatgtcaggaaactcttccaaaaccgcagctgaacatgaattcatcaaattgagggctgtttcatcattaggcttctcaaactcatgaacttgagaaaatctgtagttatcaaacaaaggtaagcaggtgtaagtaaaatgccaaagaaaaaaaacattctttcaggaacaatgtcaaatcatgcttccaaaatccatcaaagatgcagcctttaatcattattttccctcaattattccagagatactacaatctacacaccatcaccattgacattggagtagtgataaatttcatatagatcattatattatacacaatctgtaaaatttacctagaaaaatcacgaccatcgattcgaacaaccatcaagttaggaagcatgacttcatcctccaattcgaatgatttcacatactcgtatttgctattcgccatatccctcaaggtttcacgaaagttttcttctttcttctttgcttctatgctatcgactttgaaactaccagacacaaaaaaaactgcaatcgaacaggatattaaaccgaaagctgagtcgacattgctctgtgaaagagaaaccaaactatatgagcaaagacggtttacttcacataaggagataaaaaaatggcagtattccttaccaatactagttcaggagcatataagatttttaatgcagtaccaataaagatcacaatcaattcaggaacatataaaactttccaataagatcattttctcaagttcaaaaacaatgaattcttagctagggaatcgtgtgcaggaaagtacagaatttcaaatcctcaccagtaagacaaggagaattaggacaagttttaataccttaagacaaatatggttcgagagaagcgacaacatcaacaagtgaagggttcgtgtgaaatcagaaaacttttgtgtcaaagcggaaaataaataataagagcacgaagatagttcttctatatctacattaactcttactaccacacagaggagaggcgaaagtaagacagcaaagaggagcttaagaagaaaaacaagcaacgaagctttagatcattgtttaggttcatttatctatcaccattgtctatttagtgatctctgagctaaatttgattttggaagatgaaatcagtggcaataaggtgagagagattagtggaactaacataagagccaacgatgtttatgaaagatacaatttagtattcctattgacaatcgaaaatccaataatctcaatcgcaatctaaaaaagatgaacaaacgcgaacttatctttctcttttgtntaaaattgttcagctaatcaagtatgccacgtcagcgcctctcgcaggttcacaaaactctcttcagagtcgactctctctacataattaggtttttgattttagacaagggaagagaaccctagtttttttgctctaaaacctcccattggaggtgctcttaggttccgtttagaatccttcctatcttcttgttttgcctctgtggctgctactgaattcgggttcaagattgtttctggaatggctcagtgtgtgaggtcaactctaaatcctgtgagaacaccccagagctttactaggaaagcgtatgtgaaaagcccagcttttgcatcagtctcgttccttagagcattaccggagttcaacaaatacccaaaaccttgttcattggttatgtcttgccagggcaaggctcaaaaccagcaggaggagcgaccacaactgtctcttgacgatttagtcacgagtaaccggaaaggggaggttcttggcacaattaaagactcgctttctaattgtctctctgagactaatcttcttgccactgttcctggtctgaaatctagaatcaagggaaaggttagtaatgtttcttttttggttcttatctgactgaaaagaccaagcttgtgctaaaccaatacaataagtttagagttgagaactgatcagaaatttgattttgcaggtcagagatatttatgatgctggtgattatctggttcttattacaactgatcgngtgagtgcattcgaca

SEQ ID NO: 16162 - DNA, 668 bp, Arabidopsis thaliana landsberg
tgattataaagaacattattagggtacaaagtggacaagggcacaacttgcctgagacttgagattccaggtaccaacttgctcttcgggtggctcgtaacctctcgctagtcgtagtaatacaaacaaacacggcataggcaaaattaacattgcaccaaacataagaataactgcgtaataataatctgcgtgtcgctacgagatcgcggggacaagaatcactaaattcggagctacgattaccaagttatgaatttttggagttatttagtacatagaatagagtaattcatgtgaataattttaaatcaagtttcatggttagacaaaggtactatgtgataaaaactatttatacaaaattaatgccactggaacgaatcaatttagagttatggattttaggttatgaatttctaaaggctttatgtgtttagcacaaaattaattaggagataaatttaatcatgagtttcatgctaatacaatatcattgagtattgaacaatattaaaacaaaattataggaactagaatgggtaaatttagacttaatatgaattttctatgaactatacaagtttctagtattggttttgtattaaaaatcattttctaaaataaattctgaattttctcaggcttctgaactgcggacacaattt

SEQ ID NO: 16163 - DNA, 852 bp, Arabidopsis thaliana landsberg
  unsure (1)..(852): unsure at all n locations
tgtcatgattgtgttccatatatcgatggtagaggttgagtatgtgtgactgtgtttgcccttgcgtttgataactactgcagggtattcccagagatttcgcaaagcgatatggtttgaacataggtaggcatgagatagttttgatggacgaagaaggaaatacatgggaatcagaagttaaaagttacaagtctggtcgggtttttatagctggaggttggacaagtctctgcactgcaaataaattagaagttggagattcttgtacatttaaactgctccgcaacccgaaaattcccgtgtttcggctctgcagccgcccaaaggctggagcagaggctcggccacacaagagatctcgagtccaaagtagcagcggggggagtagacagaagcatgacgtgaggcagaagttagatgaagaaggagggccatctcgttgcactcggtcatctaacaaggctactggtgatcaagaaaagttgcagcaaacgcaatcttgctttatctttgatcatgtggctaaggtgaaacagagcgttgaagatactttaaatagtattagacggttcnnnnnnnnnnnnnnnnnnnnnnnnnnnnnnnnnnnnnctttgttacaggaaacgaaaactaagttatgatttgaaacatgatctacgcatgtatggagcgttaggttggactttttatagcactctcccacgtaatattaaactactagctacaatgggggatcaagaaagcacattcgttttagggtttaatttattttagggtttcttcagtaagagttattagattttcttttaacaaaaaggttaaatgtttagattctttgccaagatagtc

SEQ ID NO: 16164 - DNA, 2139 bp, Arabidopsis thaliana landsberg
  unsure (1)..(2139): unsure at all n locations
ttgtatacagtagtaataaatctgtacattctgctttactgtgtttgatcttccttcatctgtattaatcatcccaacagcaagagcaagcctctcactgaggctccacaacatattttcttcatgttcatcttcaacgtcatgtagagcggatctataatcaggagcagagcccaggtccttcatcttctgtgtcagaagctccagcttctcatatatcctcgagcaatgtggttgatcaccggagaaaaattcgtgctttttccctctaataccaacccagctgctcccgggtttattcataatcccattcttcttcatcttaactctcaatttgtgatacattcgaccatctaccagcagaagcatatatatttgacaataagacataagcagcgcttgattttgagtccagattaaaaatggctgcagcagctttctcgcctctgtctacatcagaatgcatcctacaagcactaagtaaagccaaccaaaccatttcattaggtttcacaaccattctctcgataagttcttctgcttctttcaattttccgcatcttcccaagatatcaaccatacaagtgtagtgttgaatctttctatcgatatgatttattccacttgacatgtaatagaacagctttcttcctttctctaggaacccgcaatggctacaagcagagagtaagccagtgaaagtgatctcatctggctctttgtttaggcgtatcatttgaccaaatatgacaaacgcccactttccacgcccatgctgcgcgcagccaacaataatggaattccatgacacaatgctcttcttgaagatttttatgaacactgaaacggcatcattaacgtttccagaatcgctgtacatcacaacaagagaattacccacaaaggcatcagtttctaaaccaagcttcacagcaactccatgcatctccttaccccaatccaatgttcccaaagcagagcaagagtttaatccgctagcaaatgttgattgatttggtaagatactgtttcttaacatcccggagaatatactcaacgcatcttcgtgctttttgttcagactataacctgacaatagagcagtccacacagcaacttgttcatgaaccttctcgtcaaacaccttccgagaatcccctattcttttgcagtttgcataaaaagttatgagcgaagcagatacatattcttcatataaaaaccccaacttgatgatcaagccatgncccccgatcccatatgaaacgctggagcattcgcgcaagcggtgattacgcaagtgaatggtcttgaagtcgattttatgcaacaacgcaacatgttcttgaacaaatcgagagcctctccactcctctcattctggtctaacccacagatcatttgtcgtccacgaaatcacattcttcccaggcatttgcttataacaacttcaaggcatcgtctactttaccaaactgtaaatacccatgaaccatcgaattccacgctgcagtatctttcacaggcatttgataaaacaatctctccgcttgatcaaccttaccagacctaaaacacccatttaccatcgctgtccatgaaaccacgcttctctcaggcatttcatcgaacagcttcactgcagtattcatatcaccacactccacacaaccactgatcatcgaattccatgatacaacatctctcgcaggcatttcgtcgaacagattcaacgcatcaaccaatctattactcctcgtgtatcccgtaatcatctttgtgtaaagactcacatgaggagatggaacctgattgaaaacctctcgagcctcatcgattcgtcgactcaacaagtgattacatatcaaaacctcgcgattctgaaactccacagtaactgagaaacttctgtaacatttcccatggataacgtgagatatagagaaagctcgaaacctgaatcgttgaaaaatggcacgactccacatttcctacaacggtcacatcagcgtaaaacaatcacaaagccacactcaatgtagcttcgtgtatagaacggcaaagttccagagtcaaaaaagttttgaactttccgacaaaattggcttcgcgatttgaatcttctgacggtttaaatga

SEQ ID NO: 16165 - DNA, 2616 bp, Arabidopsis thaliana landsberg
agtacatgatagactaaggcatctgaagccactctatgtaactggtttggtataatctgaaatgtgtctaagaaggttaggtctctcaacttcaccggttaaggtgtttcaggccaattgggtcctgaaatagggcaactcaggggcggggagatattggatatgagttctaacaatttctctgggattataccttccagtttagggaactgtagctcacttgtgtacattgatttgtctgaaaatagtttctctggtaaggtccccgatactctcggtagcttgaagagcttggccgatttgtatctttacagcaactctcttactggggaattgcctaaatccttgtttcgcattccggtgttgaattatctgcatgttgagcataacaacctaaccgggttaatccctcaaaatgttggtgaagctaaggaacttcttcatctgcgtttgtttgacaatcagtttactggtacaatccctgagtctattggaaactgcagcaagctggagattctgtatctgcacaagaataagttagttggttcattgcctgcaagtctcaatcttttggagagtctcactgatctgtttgttgcaaacaacagcctaagaggaacagttcagtttggctcaaccaaatgcaggaatctggtgactttagatttgtcatacaatgaattcgaaggtggtgtccctcctgaactgggaaattgcagtagccttgacgctttagtcattgtgagtggtaacttgtcaggtacaatcccttcctcattgggtatgttgaagaatctcacaattcttaacctttccgagaatcgtctctctgggagtatccccgcagagctcgggaactgcagtagcttgaacttgttgaagctgaacgataaccagcttgtaggcggaataccgagtgcattaggtaagctgaggaagctagaaagtctggagcttttcgaaaaccggttttcgggtgagattcctattgagatatggaagagtcagagtcttacgcagttgctagtttatcaaaacaatctcactggtgaactacctgtggaaatgactgagatgaagaagctaaagatcgctacgctgttcaacaacagcttttatggagcgataccaccgggtttaggtgtgaacagcagcttagaagaggttgactttattggtaacaaacttacaggagagataccgccaaatctatgccatggaaggaagttgagaatactcaacttgggttctaatctgcttcatggtacaataccagcttctattgttttctgtaagaccatcaggagattcatccttagagaaaataacctttcaggtcttcttcctgagttttctcaggatcatagtctttcttttcttgatttcaatagcaacaacttcgaaggaccaatcccgggcagcctcggaagctgtaagaatctctcgagtattaacctatctcgaaacagattcacggggcagatacctccacaacttgggaatctacaaaaccttggttacatgaatctttctcgtaatcttcttgaagggtctctaccagctcagctatctaactgtgtgagtttagagcgttttgatgttggcttcaactcattaaacggttcagttccttcaaactttagtaactggaaaggcttgacgactttagttctcagcgagaaccggttttcaggaggtattccacagttcttgcctgagcttaagaagctgtcaactctgcagattgctagaaatgcttttggtggtgagattccttcgtcgattgggttgatagaggatctgatctatgacttggaccttagtggaaacggattgacaggtgaaattccagccaagttgggagatctcatcaagttaacaagactcaacatatctaacaacaatttgacaggatctttatcggttctcaaaggtcttacctcattgctacatgttgatgtctccaacaatcagttcacaggtccaataccagataacttggagggtcagttgttatctgagccgtcgtcgttttcaggaaatccaaacctctgcattccacattccttctctgctagcaacaatagccgcagcgcgttaaagtactgtaaagatcaatctaaaagcaggaagagtggccttagcacctggcaaatcgtgctaatagcggtcttatcgtctttattagtcttggttgtggtccttgctcttgttttcatttgcctacgtcgtcgcaaaggaagaccagagaaagatgcttatgtcttcactcaggaggaaggcccatctttgttgttgaacaaagttcttgcagcaactgacaatctaaatgaaaagtacaccattggaagaggagctcatggaattgtgtacagagcttctttaggctccggaaaggtctacgctgtgaagagacttgtattcgcgtctcacatccgcgctaaccagagtatgatgagggagattgatacaatcggtaaagtcaggcacaggaatctgattaagttagaagggttttggctgaggaaagacgacggtttaatgctgtatagatacatgccaaaaggaagtctttacgacgttctccacggtgtagcccgaaagaaaatgtgctag

SEQ ID NO: 16166 - DNA, 2145 bp, Arabidopsis thaliana landsberg
aaaacacaacgactaagagtagtaacataacatagaaacgatttagcgtttaagaagataacagaaaaagaaagagggcgtgtttgtttttctagacaccatcttgttttcttcttcttaaggacggaagtttggataaaggtttggtgccaagcgtggctcaacggacaagtgaagaggtttagccataagcaatgatgcatcatcttcctcgaggcttaacggtccaaaatcttgatggagtttccagttaaacccttgaagaaacctagccaacaacataaccatcatgatcgtcccgactttaacaccgatgcagccacgtcgaccggtgctaaacgagacaaaacgcatctctgtttccaccagagtaacctcttttgtgattccgtctccttggaggtgacgctccggtttgtataccaatggatctttccatattttagggttccggcctagcccagggcggcatacatgaatgtggctacctgtccaatcatcaatatttcttaatatataatgcaaaattgtatcgagattttgttaaggaaacctatgtataaatttactagttgtcctggtattttaaacaaaaaagtattacaaaaaaatttaggttgtatcatatgtagccacaaaccaaaaccatgtgttttattttgttaacgaagctcatgcataaacttactagctataaacgttaaatcttatgtaagtaaaaaacatatgtattccctatatgttttacctttgggaataaaataacccccaagggtggtatcttgacgggcaacatgaggtgggacataatgagcgcttgggtgaatcctgaatgtttctctgcaacaagcttttaagtagtttagatttggtatgtctgattcttgcacaagcctgtcttttgcaactacttcatccaactccttcagagcttttctaagaatctacgggttctttaacatttccccaagtgtgcactccatgttatttgccggattatcgatcgctgctatacaaaattcctgtaaaaaacaccggaataccaaataattaatctacttagattatatatgtgtagatctcgcaatttagtcaatatatagtattcaacataattctttttttctttctgttaggcttatttagagtacaatttctgtgtataacatacactcttttataaaagttacattttacttacgacgcattgagctttgatttcgtctggcgtaaccaagtagtttccgttttgatcttttagcgtaatgaacgtatcaagccaatcttccacagcagccttaccacctttttccctccaaatttcgaccctctcgtctattatgggattgttgtaactacgaacaagattaacattcactttcgctctctcctcttcaccatcaatattccaaccacctaaccatcggtccacgtaatccacgggactaaaacctggcaaacagtttagagtgttgaaaatcacctcaagatgatgtttttcggcttttcctagtctcccatcatccgaaaacatgttttctttcgtgacatgtctccttccaaacaacattctcatggtcactgcgtaaccataaactctcgaaagttctctaacgtcgaccgtctccgaccgttgatacatcgagtgaatgtaagcaatgagattatccgcttcgatggttctcgcagcttccaacatattcaacgttttaacggacataatttccgttgtgatcacttttttcatcttcatgaaatgttcaccgtacgatgaggttcccattgttttgtaattgtctccaatggactctacgatggaaagttgaggccggtctgccaaatctgcgtctcgctctctaaaagcttctctagcgatctcgtcggagtttatggtgatggtgtgggttccggcaaagttgaaacatgcgatatccgtttttagctctttcatggcaaggtggaaatatttggacctaggacgagtcatgattagttcgggtagattgccgaggatgggccatcctggtcggccaggaggaagctggcgacaccggtcttttgtcttggaaggcattgagaatatcgacctagtaaagtgattgatgcgatgaagacgataaatcctagtaagatttgaaagcatgt

SEQ ID NO: 16167 - DNA, 802 bp, Arabidopsis thaliana landsberg
cggctcaaggatatggatcgattagtcgtgtgtatatcgtatgcggagaagataaaggtatacgtgtagatttccaacgatggatgattgagaactctccggttaaagaagtgatggagatcaaagatgcagatcatatgcctatgttttccaagcctcatgaactctgtgatcgtcttctaaagattgctgataaatatccctaagcaagaatatctatgacaatatcaataattttcatgggaataagtttttttattgttctgttcacaaaatatgtggaaaaaaaaaaagacaacaatagaatttacgcacgaggtaatatctaatggtccaaaataattggagagtgacactgacagttcaatgagaaactgtctcaccataaatgaaaaacaacaaaacaaccacaacattagaagaaagcaaaaagacaaatatcaatcaattgagaaagagaacatgaaacattatgttcttgttcacggcggttgccacggcgcatggtgctggtacaaggtcaaaccggtgctggaagcttcaggccaccgtgtaaccgttgttgatcttacggcttctggtgtgaacatgagcaaagtggaagagattcagactttggcggattacgctaagccgttgcttgaagttctcgagtcgtttggttcagaggataaggttatcctcgttgcacatagcctcggagggatatcagttggtcttgcagctgacatgtttcctagtaagatctctgttgctgtcttcataacctctttcatgcctgatacaacgaatccacaccttt

SEQ ID NO: 16168 - DNA, 1241 bp, Arabidopsis thaliana landsberg
ctatctttttgttcccaatgaagatatcgttaccatcaatcttcccgtagattccttcacctggaaagttctggtaatcctcaacctcttcaggcctaggctcaacagaaacagattttgcataatccacgattgttgctgccattggatgacttgatttgctttcaacacttgataccctgaaacattatataacaagaaagtctcagtcataagttatctcagcaaacttgttatggtcagtacacaagttttttttttaccagtaaagcaagctgcgtaggtttatatctctagagagtgacttgaaatctatgacaatgaactcacctctagtgatagtcccggttttatcaaaagcaacaatcttgatctttgagagtgtgtcaaggtaatcagctcctttgatcaaaagtcatgatgtggctgcctttgtgagtgcacagaaagtggctactggtgtggagaggataagtccacaaggacaagcacttactaacacaactagtgctaagtgaacccaatgtttcaggttgtgaaccttcaatgcaaatgggatagccacaaaacagattgatatcaggatgatcgctgcatacaagcaaaaagatttaaggtctcaatcaagaacaaaaaaagttgtaatgaagaaaaaaagtcaggtgctgatactaacctggagtatagtacttggaacatttatctataaatctctgagtttcggttttgctgttctgagcttcttctacaagttttgccatcttcgcaaccacgcaatcctcagctagagcagtggtgttcacagttatgtaaccttgaaaaacagaggagctggaaatatcaaacattgaaggtgaaggtcataagaaaaaagtgtaacgcttgagccttttttataccatttagattgatggttccagcccaaaccgtcgaatctttcagtttaggcacggggaatgcttcaccggtcaaagttttctcatcaacttcacagtttccatcaacaacaactccatcaattggtatggtttcaccagctttgacagctataactgtgttagtcttgagttcatccacttcaacttcttctccagtctctgcaatctgggccttttgtgcagctaaactcatcaaagattgcatcagtgcacttgcctgaaaatgtaaataaatccttgagcactaacaccatctttgacgcgtgaagcgtcactgatcgaaaaaaggtgcaaatctttata

SEQ ID NO: 16169 - DNA, 3425 bp, Arabidopsis thaliana landsberg
cccttgctcggcccttcatcttttgtgatcttggttcaggcatcacagcaaaattctggcaggataattggaaagggttaggacctatcattgatctcacaggtcccatcggtccgcaagcgttgggtctccctattgatgttgtggttagagacgctatctctggcccttcttggaggattatgtcgtctagaagcaggaacccaaccatcagactcattaagagtattcttccaagccctgagaacatgattgagagtttgcatgatgatacttatctctggagtcctgatcatcatgcaccttcaaacaccttctcagctgaaaagacttggctcgctctaaatcctccttctccagttgtcccttggcatcggtcagtatggttctctggcaacatccctaaacacgtcttcatctcctggattgcaactttgaataggctgcacacaagagacagattgcgcaattggggattaaccactactgcgacttgcttgttatgcaacactcatgatgagtccagagaccacttattctttgcttgcaggttcagtagcagcatttggaactactttactgcaaaagccaacctccttcctccaacgcagtttgtgacctgtcttatttgggtgaacaatactgctaggaacaagaacattaccctcatcttaaagctaatcttccaagcctcaatctacttcatttggcgggagaggaatcaacgcctccactcttccaatccgcgtcacgctccttctatcattaaggaaatcaaaatgatagttagggcaaggctagatcctctctctcgggcgcagagacccattcctcctgctttgacgctcctcgccacttggttctctatcttccagtgacgctttctgttgttgttttgttcttgtttcttttgcaggcttgtttctcttaggagtttttcggttagaccttcttctgctttgaggactgcgttcctctgtttcaggccttgaccttgtttgtaagctctgttctgggtctgcgtacccctatttaagcatttgtcatgtatgtttttaattctaataaaaataataaaaaaatactgctatcagttctttgtcctaaatataatttataattaagttaagaataccaatatccctattcgaatcctggtgagactctctaatcaagctgagtcactaccatttttctgggccggatttcggtaatcttcttgctatttaattatacttaaacctttttaatatataactaaatacatggttttaatatggttcgttagaaaagcagaacaaaaccaaccaaaggcaaggtacggctatgtgataaaactactcatatataaacaaagattcgaccatgaatttaatttactactaagaaaagtgttcaaatcaataaaatacaaagctcttatgagaagtcacaaacctcttatgtccatcatgttgagtcgataccaatttgctgattgaatacttaaattcatatttaattaaacgcacagtttaattcctggtttaatccggttcattaaaaaatttcataaccagaaaaatatttacacgtttgttacaatctggtttactaaactcttaccgaattagcgtttaatataattcttaaggaattagcgtttaatatgattcttaagccatagagtttaattattgtgaagatctttcctttcatttttggttttatactaaaattttatccgcagtttaccgcggataatcggtttatttggtttttatactaaatatttgaataaatttgatatcctaaacttataaatataaattttttaatcaaacataagtaaataataattggaatatttttttggttgttatttagtgataagagaaatgtgttaaaatgtgtttaaaatatgtattaattagttatgtgtatgtacttttagtgaaagtaaagtatttacaaaaatgtaagattcacaaaattggtgtaatactttttatgattataagtgttttttaaactatttgacaggttatacacttttttggcaaaataaagagcgtatgaattatgatatttataattatatgtctttaaagtgaagataaaaaaaatatatttcacttatttttattgaacggtttagattgaagggaattaattttattgaacgatttatattgaatcagatcatataaagtttaggagactgttaagaccaaattacccttaatgattttgaatagcaaagaacaaaatccaaaattgaaatcaaaattgaggccaaattagacaaaatttcaatttgtacttcccttttaataataaagggattgcttgagtcgtctactatttagaagaacatacccactatatctgaaccaaaatcatgacaaacaacaataacacaaatatgaacctctaaagtataactttattatttctcattgttttgagtttttttggtttttttagttatcatttttttatcgctgtaaagaaaattagataaataaaaaaaggaatataaatattttaaaaactcaacttttacgttagtttgattttttatattatacagcttgaaacacggtttttcatatttgtaagattaaagtatatcaacaaaaaagacgtagaaccaaaaaaacagttcaaagaaaaagaacacaaacgcagatattgggttcttggacccacttttttgtttggccaccaattatatcaggtccctctattcccttctccttatcaacatcatttactattttcataattttggatcttgtttcgcaattacatgaaacgtaagactaaattcaggttagtttaccgccagttggtgaacacactactaattaaggaagaatcactcgaaaacagagaagacgaaagtacacgcatgcatgtataaatgtacaataacaaaataataacttaaaatacattaaaacgaaaaaaaaacatcccctccacttacatctcataattataagcatccatatataccatcaaacttactctcattctcttctcaacttacatttacaaagaaaaatataaaaaaatgagaacgattatcgatttaggaaaacaaaaaagtcatctacaaatcattgattctccgacgaacgttgactgtactcgtgaagtcggacttcgaagaaccctccgttcactcatggagtgcgtaatcccatattgttgcacgtaccaacctcctcccaccgaccaaaacgacaccgtctctgtctcttcatccacttcttcctccgaccaaacaggcgttgtcgtcacgggtactttctatggtcaccgacgtggccacgttagcttctgcctccaagacgacactcgtccctcctctccacatcttctcctcctcgagctagccgttccaacggcggctctcgctcgagagatggaagagggtt

SEQ ID NO: 16170 - DNA, 815 bp, Arabidopsis thaliana landsberg
aatttgagactcacataaaagtttcattttcacaacaaaaggatacaatagtatttgactcatattttggattttagtaacatattctctatctcacaagctctctatctcacaagcccaacaaaaaatacccattcctcctatttctaaaaaaagtatctagtttccaaataattttagggaaaaatgtcaaaaaatgcgcggaatatcacatttgggatgaaaaaatcatgaattttcaaaatgtcatttaaatcgtaaaatttgatttgacttttctaaaaaataattaagtttcattgacttggcaatttcgggcatgccgttaaatttttgctaacagaacgataacggggttaactgtccgttagcagaataatccacatatgcatcaatatatacaaactgtttacgtttttccaacgattatgttgatgtggcttggtggtaaagcacgtgcttttatctcttagaatgcgggttcgatgcaaacaacaagcaagattttagttagagattttttttttttttttctggttaacattctctagccctagccgccttcttgtgaggaaataaaacgcatcgagacaggcttcgaatcaaaaccagcgattttaattttgtagatctggagatcggatcttgtaataatgacggagcagtaacaagagagtaaagatgaggatttacaaccatttcggagatctgcgtcgttggaatctacgtcgaagagaggaggaagaagatggcgacgggatttaggctacggattcgaggtagccttcgccgtaaacttcgacgggataagtcca

SEQ ID NO: 16171 - DNA, 1065 bp, Arabidopsis thaliana landsberg
attacaaagggtttacagaataattctttgaatgtagaacataagatgtttagatccaccttaaagagtcttatacaaaaggaaagagaaagagagagagatggtgatcttcgagctcaagaggtggggcggcgagttggcaactctcggtgatggctagggtttacttgttatgaaggcacacctagggttagggcttagaacaagtatttatacttgagggctaagaattaggtttaggggttagaacgtcaatccgccggataagtaagtgatcgggctgagtagtgggcttcaggggaggagcctaatgacggtgtcacaaagagagaaggacttatgcatgacctaatggtcggtggaaagcttctcggagcttcccgggttcaagtctccttggtcggatgctttttggatttattatttccaaacgcccaattcttgacatatcttcactcttcaggtcatatcttcgacacggctttatggattgcttcaattcgacttcaacgttaatcttgactcttctagctttgcataaataccgaaatgtctcgtttccggatgctaaacttctgaagtactggaattgatcgccttttgatactttttgctccaaaactcttaaaaccttcttggcacctagaatatgtgtttctcctcctcttggctctagaatggcaccaaatactctctgaaacataagaaaacaacagctaaaactggctaaaaagtcgtgttattaaagaaaaaagacatggagacgatggacttggcgctgaagagcttcctccgatacaccaagaacggagagacaatgagaggagatacaagtgacacaactccgtaaatgtactttctcaaccacctatacagctatagagggtgggcattgtccaaaagcaagaatagagcaaaaggagcggtttgcattggaggagtggttacaccaattctcctatcgtgcgaagtccctccgagatcgactcagaccgaaccaatatggaaggatatcgcccatctcaagcttacccatgtaatcgagcacccaatgcatgatgagag

SEQ ID NO: 16172 - DNA, 1733 bp, Arabidopsis thaliana landsberg
  unsure (1)..(1733): unsure at all n locations
aaattctaaatcataaaatctccatttaatgaatagatttgcccatatagaaacacagaatatcatttctattagatgatagttaagttaaatgaaggataaaacaatcgttggaaaacaaaactctggaatcttaattaggggagaagaaaaatggttgagttttcgttcttatctgaaaaaaaaaagctaaagagattggaatagtgacgtcagttccagcccatacaaagagatgcgaacctataatcgaatctgatcctccgaatattcacccatcatcttcacgatattactattttacccttctcttccaaaagagaaaaaaacattttaactctcaaagattcgttttaggtacgcgacggcccgacctcgattctcttccacttctttcttgttccaaaaacctaaaccctctctctctctctctctctctctatctcttgaaaaatcaacaaaacattggaatcaatttctctatgttttgattctattttaaagatccaatattctttctccattgagattaagcttctttctcgctgtcgtctctctatagatcttggttcttagtcccttttgaataataatgatggtggagatggattacgctaagaaaatgcagaaatgtcatgaatacgttgaagcacttgaagaagaacagaagaaaatccaagtctttcaacgcgagcttcctttatgtttagagcttgtcactcaaggtaataataatccaatcaaaatctccaatttttaaacaagtctcttacaaatcttgatggggttttgttatgttttgtttctgtatagcgatcgaagcttgtcggaaggagttatctggtacgacgacaactacatcagaacagtgttcagaacagaccacaagtgtttgtggtggtcctgtctttgaagagtttattcctatcaagaaaattagttccttgtgtgaagaagtacaagaagaagaagaagaagatggtgaacatgaatcttctccagaacttgtgaataataagaaatcagattggcttagatctgttcagctatggaatcattcaccggatctaaatccaaaagaggtatttaaagttttgagctttttaaaggagttttagttttcgattatgaggaaataatcatgtgttaattgaattctcagagcgtgtagctaagaaagcgaaagtggtggaggtgaaaccaaaaagcggtgcgtttcagccgtttcataaagcgcgttttgtagactgatttgcaaccggcggtgaaagtagctagttcgatgccagcgacgacgacgagttctacgacggaaacttgtggtggtaaaagtgatttgattaaagctggagatgaggaaagacggatagagcagcagcaatcgcagtcgcatacgcatagaaaacaaaggcggtgctggtcgccggaattacaccgtcgattcctaaannnnnnnnnnnnnnnnnnaggatctcatggtaattacgattaattttaattacctgattatcttctatctgattggttcattagtgattcataatcgggttgataaagaactgtttttaaacattaaaacgtctcaacatttacattatattagtaagtaacaaagattattatcaacattaaaaaatgatttttatttgacattttatttgccaatcttgcagttgctacaccaaagcaaatcagggatcacatgaaggttgatggattaacaaacgacgaag

SEQ ID NO: 16173 - DNA, 572 bp, Arabidopsis thaliana landsberg
ttaaaatatcctctaatgtcccttcggaaacccatgtccaagagatgatcagcttcgtcaagcacaaggactttcacacccatcaatcttgttgcgaatccagaagtgttttcaatatggtctttgagccttccaggtgtagccacaaggatctgagagtgttcaaatatgtgattattcaacaatatatagatataggtcacggtatctgcagccatcttagaagcgcagtttaagggaagtgcaagatttgctcataattaacttcaaattaaaacacctgtagagacggaagaaatttcttattacctggcaaggattcgtttgcatacgcctttgctctgtaggaagctttgtgcctccaatcacaacttgaacaccaatagaggggtgatacttcagtaaggtatttgcctctgccgcagcttgactggcaagttcccgagtaggacataccacaagcacaataattgggggttgcctactatcccggcttgcaggaggagatttgataacagcttcaattgctggaagcttgaaaaataaacatcaacgataagaaagtagaacat

SEQ ID NO: 16174 - DNA, 1382 bp, Arabidopsis thaliana landsberg
gctacagctgagatgatggtttttatgtgtcttctgcgcaggggatactcggattttatgcaggtaatttttttttcatttaactagttctgtatattcaatgctagttctgtatcttaaatgtttaattttaggcctatcgatcgccctgagaacgagggatgcaagctttcaatcatcgatggaatttcgaaactggaagttcagagttctttatctttaccgatcactataatcgactctggaaaggtcagtcacttaactattaccatttttatttatttttttatttttattctcctattctgcatacagcaaatgatttcaatctgcgaaatgtttttgctcagtgccttcctgtagatgcgaacgaatggaatagaaaacttgataagcaacaggaaaaagcaccgtcaaaaattgatttgctggatgaaagagattgcagagaattgaagattgatggggtatgaaagtttcattattttttatgaactattgtcagtttaagtgatagtgtttggtgtcaactgcctttgcgtgcaaatacatataatgagcaataagcacttttgtttccaaatcgttgccacaaaactaagcacctttgtatttcaaacaagcttatcaccgattgtaacgttttatgtatcaatatgttacaggaactacccattggcaattctgtgcgtgctgggaaagctcctccgaaacagattgttgcagttgtccgacctgcatgcttcacgtctttaactccgtcaaagaagttggaccagaaaaatatcgttaagatggatggggaagaaatggtcatggtagtaaaattgaaatcaagtgataagaatatatcttcgcagcgcttgtttcctacatcccgtaaagggattagtggtctttacatcttctcacttgggtccaagtttccaaaccttttcaagaaagctggcacctacaatttttctttctccattgtaagtaactttctacactcttcttttttgtatatgaaaggattgtttgataaatttaaactaacagaattccaccttacaattctatctgtcagttataatgtaattgctcaaacactttatattcagggcaattcgattaagtgcaacaaaacggtggttgttagaccttcttctaaggcagcaaggtgggaacttgacgataatctggagtcccttccgtgcaatgttcggtaagactcataatctttttagaaatggaatttatatgcctcagacctctcattttccttcacattaaatcttagattgtcgaacttgatcaatataatggtgtttctacagggtgggttcttctcttccacctttccgtatcgcttgctttgatgagtacaaaaacaagattcc

SEQ ID NO: 16175 - DNA, 4720 bp, Arabidopsis thaliana landsberg
  unsure (1)..(4720): unsure at all n locations
aaaccaagcccaacgatgaaactaatacaataagaattggtgataaaattttctgtctcatggacctggaaaatctcttctaaagcatttggctgtcactctcaggttggtaatggtgaaattgcaagcttctggtatgatgtgtggactcctcttggtcttctcttacattactttgccgattttggtccaagaagcctcaggattccactgaatgtcacagtttcctctgtttgcaacgagaatgactggaatttacctcatgcgagctctgaccaagctttttgtaggctcatctaacaactatgtgacatagtctatgtctctcccttcactcaactccagggacgaaaattatggctggttcgttgacggtcttaagtgtacaagtttctcttctgcgaaaacttggtcggctctctgacccttagattcagcaattggtataatgtggtttggtttaaggttgctactccaaaacatgccttcttnnnnnnnnnnnnnnnnntaaatagacttcctataagagaaatattggcttcttggggtatgtcaacaaatcacctcatactgactagcttgttcagtgtcgaactgtggaacaaggcgcaaagaaaacttggtttccttccaacgacctttgattcttggcaggctttaacttcttggacaaaaggatcatgtcaaagatctccttctcttcttagaaatttggttgctcatgcgcttgtttatgggatttggaaacaaagaaacaacatcattcacaatcatcaagtcattcctccttcgactgttttcagagaagctgaccagattgttcataactcgagtacggctagaagacatttcaagaagttcccaaacataatgcaactgtggttagaataagttttttaactctcacgtttttattcctttgtaaagtccaaacatttcatttctaatgatattttcaaggttatgaaaaaaaaatgcaagaagaaggaacatcaatagtcggtacaggaattgctgctgcatattaaaccgcatcagctttgccaaagtgcctacaccgtcgtacttgtgaaaagtgacccaaatgctatgtttttctctaagtatcagagagtctctctaagaaacagaaggttcaagccttggcattagttgtcgcacgtgtgattaacacgtgtgtagtcaacgaaggagtattagcgttatatctttagctcattctgtttcatcgttcattgagttgttgtaacaagataagagagagagagagatcctttgtagagagagaacgtgatcggcgatctagtggagtccggagaatgtccggcgagacgtaaactaaccacatcagttagttgaactagttaaagcttggtgtcgtgtcttcagtgttagacagacacacgagagtctagagtgtttagtgagctaaacttgaagacgattcatcttgaatcgtacacttgtgaagagcgagctcaacacttagatttcaccgaattaaatataattttccaaaaggtggaagttggaaaaaattttgagggatgaaatctagtattgtggagagcgagctcaacacttagatttcaccgaaataaatataatttccaagaggtggaacttggaaaaatctttgagggatgaaatctagtcttgtgaagagcgaactcaacacttagatttcatcgtaatgaaaatatttttccaagaagtggaacttgaaaaaatccttgagggatgaaatatactcttgtgaaaagcgaactcaacacttagatttcacagaaatgaatatatttttccaaaaggtgtaacttggaaaaatccttgaaggataacttggaaaaatccttgaaggatgaaatctagtcatgtgaagagcgagctcaacacttagatttcaccgaaataaatatatttttccaagaggtggaacttggaaaaatacttgagggatgaaatctagtcttgtgaagagcgaactcaacacttagatttcaccaaaatgaatacatttttctaagaggaggaacttggaaaactacttgagggatgaaatctaatcttgtgaagagcgaactcaacacttggatttcaccgaaatgattatatttttccaagaggtggaacttggaaaaatccttaaggggtgaaatctagtcttgtgatgagcgagttcaacacatagatttcaccgaaataatatatatttttccgagaggtggaacttggaaaaatccttgaggcatgaaatctagtcttgtgaagagcgaactcaacacttaatttcaccgaaatgaatatatttttccaaaaggtgtaacttgcaaaaatccttgaaggataaaatctagtcttgtgaagagcgagctcaacacttagatttcaccgaaatgaatatatttttccaaaatgtggaacttggaaaaatccttgagggatgaaatctagtcttgtgaagagcgaattcaacactaagatttcaccgaaatgaaaatattttttcaagatgtgaaacttggaaaaatccttgagggatgaaatctagtcttgtgaagagcaagctcaacacttagatttcaccgaaaaaaatatattttttcaagaggtggaacttggaaaaatccttgagggatgaaatctagtcttgtgaagagcgaactcaacacttagatttcaccaaaatgaatacatttttctaagaggaggaacttgaaaaactacttgagagatgaaatctaatcttgtgaagagcgaactcaacacttaaatttcaccgaaatgaatatatttttccaagaggtggaacttggaaaaatcttcgagggatgaaatctagtcttgtgaagagcgaactcaacacttagatttcaccgaaatgaatatatttttttaagaggtggaacttggaaaaatccttgagggatgaaatctagtcttgtgaagagcgagctcaaaaaatagagttcaccgaaatgaatatatttttcaaagaggtggaactcggaaaaatccttgaaggatgaaatcttgtcttgtgaatagcaagctcaacacttagatttgactgaaatgaatatatttttccaagaggtggaacttggaaaactttttgaaggatgaaatcttgtcttgtgaatagcaaactcaacacttagatttcaccaaaatgaatatatttttccaagagatgaaacttgaaaaaatccttgagggatgaaatctagtcttgtgaagagcgaactcaacacttagattttaacgaaatgaatatatttttaaaatatgtggaacttggaaaaatccttcaaggatgaaatctagtcttgtgaagagcgagctcaacacttagatttcaccaaaatgaatacatttttccaagaggtggagcttggaaaaatccttgaggtatgaaatctaatcttgtaaagagggaactcaacacttggatttcaccgaaatgaatatatttttccaacaggtggaacttggaaaaatccttgaggggtgaaatctagtcttttgatgagcgagctcaacacttagattttaccgaaatgaatacatttttctaagagatggaacttgaaaaaatccttgagggatgaaatataattttgtgaatagcgaactcaacacttagattttaccaaaatgaatatatttttccaagaggtgggatctcggaaaaattcttgagggatgaaatcttgtcttgtgaagagcgagctaaacacttatatttcaccgtaatgaatatattttttcgaaaggtgaaacttggaaaaatctttgagggatgaaatctagtcttgtgaagagcaagctcaacacttagatttcaccaaaataaatacatttttcaaaaaggtggaacttggaaaaatctttgagggatgaaatctaatcttgtgaagagcgaactcattacttggatttcaccgaaatgattatatttttctaagaggtggaactagtaaaaatcattgaggggtgaaatctagtcttgtgataagcaagttcaacacttagatttcaccgaaatgaatacatttttctgagagatggaacttggaaaaatccttgagggatgaaatataattttgtgaatagcgaactcaacacttagatttcaccaaaatgaatatatttttccaagaggtgggactcggaaaaattcttgagggatagaaatcttgtcttgtgaagagcgagctcaacacttatatttcaccgtaatgaatatattttttcgagaggtggaacttggaaaaatccttgagggatgaaatctagtcttgtgaagagcaagctcaacacttagatttaaccaaaataattcatttttcaaaaaggtggaacttggaaaaatctttgagggatgaaatctaatcttgtgaagagcgaactcaatacttggatttcaccgaaatgattatatttttctaagaggtggaactaggataaatcattgaggggtgaaatctagtcttgtgataagcgagttcaacacttagatttgatcgaaatgaatatatttttccgagagctggaacttggaaaaatccttgaggcatgaaatctaatcttgtgaatagcgaactcaacacttagatttcaccgaaatgaaaaaacatttccaagaggtggaacttgaaaaaatctttaaggaatgaaatatattcttgtgaagagcaaactcaacacttagatatcg

SEQ ID NO: 16176 - DNA, 1030 bp, Arabidopsis thaliana landsberg
  unsure (1)..(1030): unsure at all n locations
taagctcgcaaactacatggaagttgatgagcccactctaaggtcagggactaactatgggcattcttataactattattaccaaatctacttctctctttttctttgacatgtnnnnnnnnnnnnnnnnnnnnnnnatattgttaacatacaagcacaagacccattcagttgattccgatggtaggatcatctccaatgcagacattgatttcttcatcaacaacgtatgttctttcttctctctctgtctttctgatatcgatactctggtgcttttacaacgtttgtaacaactctaaacctggtgacactgcaggacatgatctacgttgtcgaatcaaaacccgcaaaacgttatggtgatttcttcttgcggcagattgccaaggtatgttgtataaactgaaactaagactagtgcacatgaactcttgttttgatctttggctcttcttttttttcctccattgcgcagcttgaaggtgtgatcaacgacatggatcgtgtcaagctggaatgacgacttttctgtgttacacctaattatcaatgcccaatctgatatgatgctttctcttataaaccataagtttacctggagccaaacactttttgagtaactgtcttcaaatttcaaccataaatcatttttgttttgaattattgccatttttttttttcatattgagtatggcagttcagtttttgatcgagttcctttcgaactatttgtcctgtttctatatgccaacgacgagtttagtcttcagtagtacaactttttccgtttaagatgtgcaagctttcttgttcttctgttagaaaattatatgattgtctcaatctcatcaacaatagtgaaattgtagtgtcatcgaatcatttataattgtttcatcgctaattcattaaagtcacttttttctataaccaaccaacaggtggaccaaaaacccaaagaggaccaatgacgtaaagtcttttaccaccaaatatttgttttattaaaatccaaaaaatttttaaa

SEQ ID NO: 16177 - DNA, 1215 bp, Arabidopsis thaliana landsberg
ttctcagcatgtctttttcaccaaatagtctctagcaatatgcattttctcatcagtaacatacccagagagatcaatcacctccattctgtctagcagaggacccaggatcatttctatcacatttgcagtgcatacaaataaaacctgcaataaattagtttagaccttacgtcaaacacaaaactgcatatcatgaatatcaatacacagagttttcctgaaccgtgatggatcaaaaaattgcaaagagtagaaaaaaccgccatggcaaaagagtaaaaaaacctttgataagtcaatagtaacattgagaaagtggtctaaaaattttgcattctgctctggatccataacctccaacaacgcactggctgggtcgccagtgtggcacctaccaagctgccaaggaacagcagacaaattattgcaaaagcgtaactggatatatatatgtttgaatagaaaaaacaaaaagccaattcaaatactaacaagctagctaccttatcaatctcgtcgaacaaaataagaggatttgctgttcccacactctttagacattgcaccatctttccaggcatggcaccaacatatgtttgacaatgcccctaaatagtgtttaagagaatcatatatgattatttataaatatttgaattatagttttgccatgtatatataatataccttaatctcagcaacatcggatagtcctccaacagagaaccggaagaacttgcggtcaagagcacgtgcaattgaacgcccaatgctagttttacctactccaggtgggccagagagacaaatgatcttccctgttgacacattttacaaattctcaccttcagaacttataaatgatgatgacaaaaagttttagcaatgaaagctgaatgagaaaggtaaagttacgaccttgtgaagtgcctctaagtcttcccacagcaataaactctaatattctttcttttacatcagataatccgtaatgatcctcgtcaagaatcttttttgcccgtaggacatcaaaattctcataactgcaaaccaaattaaaatgattataaatgagacttctcaatcagtgcacaagaaaattaatctaaaatggtgttataactctcctctagacatgagcttgaagcatgacaaacctgaaattttcccaaggcagcaccggcgagcaatcatggtagttataggtcaaat

SEQ ID NO: 16178 - DNA, 765 bp, Arabidopsis thaliana landsberg
ctgcccaagctgctctgtgctctaattcactggaagatgacaagctttaccatatagaagatgaaaaggtatggtaccaagcggagttttgaaagctgtcttgtaggcccacaatgcatcatcaaacttgtaggaccactcgtttttcgctttacccactgttttctcaagaatctctttaatttacttgttagaaacttcaacttggccgcttgtttgtggatggtagggggaagcaacccgatgctggactccatagtgtaaaagcaatttcgcaagaatcttgttaatgaaatgcttacctccatccctaatgactatgcgtggcactccaaaacgagggaagatgatatatttgaagagtttcatgacaaccgctgaatcgttcttcggactagctatagcttcttcccatttagagacataatccacagctactaggatgtagagattcttgttggaaggtgggaatggtcccatgaaatctataccccaacaatcgaagacttcgacttcgagtataaatttctgaggcatctcattacgcttgctgatctttccccttctctgacaagggtcacattgtgatatgaacttctgagtatcccgaaacattgttgaccaccaaaagcctacttgaagaactttggaaattgttttgaaagttgcaaactgaccaccatagctagagttgtgacaatgcgatagtatatcaggaacctctgttgcagcaatgcatctcctgtatattccatcagaacaatg

SEQ ID NO: 16179 - DNA, 2523 bp, Arabidopsis thaliana landsberg
  unsure (1)..(2523): unsure at all n locations
gaaggatataaggtttcatgaatctgagaaggtccttgatgcttatttttcgatttcttatcttcttctttttagggttgtggcgaatttgtcttctttatttttctttttatagccttttttgttttgtttttccagtctagagtaaaaaagcataagtaaaaaaaaaaacttagcgcgaaaaggcaatggcgggagtgattaaaatannnnnnnnnnnnnnnnnnnnnnnnnnnnnnctgttcgactttaccagtctatgtggcgaaatttcgttggtcgaaggaagcagcagtaatagcggcagttcatgtccatttccaaagatagtatgttcatgtctataaccttcttagttcgttgcaaatcagtagtttattacatgttaaaaatcatttggttcatctgtcatattggataaagttacaaattttagagaattccgctattccaccatttcgctatattattaatgggaatcatttgccacaaaatgggagaagttactctaaaaaccaagatctcgaacgataagataaagaagcaaaaacctagattgacaagaaaacaaacatccttccaaaaacctcaaggtacttcatgagttgtcgataaaaacataagtgatagataaaaccaacaagcagatagcagagagcaacgacagcacaagtgatgagattactagtaacgaccaataccccaaactctaatgactccatcggtgtaaccactgaagagggtgcttccatcagcgctccagttaaggcttgtgcagtaaataacctgacccaatcaacaaacaaattgaattcagtcactttccatggttatttacatgtactattacacaacaaacaaagggctatgtatcaggagaaaaatattactactactatgatcctaacaagaaatgtcaggtaatcaatgagtatggacacacaaaaccattaaaagacaaccttaattgacaatttaggctcaaactggggcgaaaacacaattatggtaattgctatatatggaagattaaaacagataaagaagatagagagcctaagtctccaaacggaatggtaattcaagcaaacataattgcagaatctgaaactgaaaccaagtgtagaagaccatttacatatatcatcgtgtagcatttgaatagaataatccatgtaagaaactttttacgaactttcacattttcaataacagaccaacattacgaattatgatatactcagctatgggtaatacttaatcacaagtcataatcaacatcataaccaactacagaaaattcttcctatacaaaagctgaaaacttgtaatcgattaaaagcatatgattgaccatcatgggaaaatatttgtgtaccttcctcttggtggcagcaggaccactgttgtcagccttttcagcctcagccttgagatcaaccttcaaatcctcaacaatgctcttgctctcaaggtcccaaatcttaataccatgttcagttgcagcacagagccagtacctgttgggactgaagcaaagagcatggatcacagagttagcttcaagagagtaaagcttcttcccctcagccaaatcccacagcaaaacaacaccgtctttgcctccacttgcacaaagagaaccatcaggtgatacagccacagtgctcacgtaaccggtgtgaccagcaagagtcgatctgagcttgcagttcgaaaggttccacactttcacggtcttgtcccacgaagcagatacaatcgtcggctgaagcgtgttagggctgaatctgacgcagctaacccaatcacggtgtccctcaccaccttctgaaatggtgtacttgcactcaccaagagtgttccacagcttgatcgtacggtcacgagatgcagagacgatctgacggttgtcgagtgagaaggcgacggagagcacgtccttggtgtgtccaacgaatctacgagtggagacaccagcagcaagatcccaaagacggagctcgccgtcccagctgccggaaagcgcgaattgtccatcggaggagagaacaacatcctcaacgaagtgagagtgaccagtgagacgcctctgagctacaccgtaggctttgtcgtccttggtgagtttccacaaaatgatggatttgtcgcgggaagctgagacgatgatgtctgcgttatcgattggggtggcgattgccgtcaccatgtcagtgtgtgcacgcatggtgcccttcaaacgagtccttccgccattttcggtgtctggagatgcctctgaaactagggttttcgttttctcgggggaggcggaaatacaaagaagaagggcgtgaaaaacacaagaagctatttatatgatagcaactataaatggattagggttcatttaatatgggctcatattatatatttatttctgggtcttatgtaaatgggcttatctcagcccatatttggtggaagcgctagtaatcttgtttccatgtgttagagagcgtgttctcccaggggtctgtc

SEQ ID NO: 16180 - DNA, 1076 bp, Arabidopsis thaliana landsberg
aaaatgttctaattcatatttttgtttgtttttaaaataggattgaagtataaattatcaagagttttggataggatgaagagctgctcacaatcacaccaatcaaaattggttcaaccgaattaaggaccataatctgcgatttaattcatttttagttcagtacataaaatttcgaatgtaatttggataaataaactgtccataatattcctcatacaatttgtttttggaccatcattggtattgtactctccgtaaaccgatttcggtttaagaattaaccgaattattttttttggcgaaaaagggttgttcgtcgtctaccactagcgattcatttctcaaaattgagtcagatagttcggtagaatcttttcaagccgtgtcatctcttgttcggtaacagttttttctcttgtcatgtatgctctgatacaccatggaagaaggttggtccagttacagaaattgtctaatttcagagtttcagttcaaaacggatctgctttgtccaattccttctcttttgctagtgttgctgatgcgacccttatagatagccttaaaggtaacaactttacagtctcttacctagttgattcattgggtttaaccacaaagctcgcagaatcgatctcaaagaaagtaagcttcgaggagaggagaaatccggattctgttctgagtcttcttacaagttatgggttcacaaagtctcagatttcaagtatcattactatctacccacgattgcttgcattagatgctgagaaatccattgctcccaagcttcagtctctgcagtccagaggagcttcaagctctgagctcactcagattgtttctactgttcctaaaatcttggggaagagagggcacaaatctataactgtatactatgatttcgtcaaagacattatagaagctgataagagttctagttacgaaaagttatgtcattcttttccacagggtaacaagaagaataagatcagaaatatctctgttttgagagaattgggtgtggctcagcgtttgttattccctttgctcatctcagatggccaacctgt

SEQ ID NO: 16181 - DNA, 829 bp, Arabidopsis thaliana landsberg
tatttgctatcgtcaaatctatgaagttccatgtaatataaactacatccctccaaaacacataccacagatttagccgacttcccaaacaaacaagtccagattttcttgtgtgttgcagcatccaaattctgccaccaatcaacacaggccttcttcctccaatacgaattggcagccgcagcagcagcattcaatttctctttcaatttgattcctcttctcttgccactatttgtgttcagccaagctaatctcatgcttacctctaacctatttgcaacgaaggcttccatgctataatagcctttggctttgagccactctaattctacccaattggaccccaaatcactctcttctcctctcagaaatgctccatccgataagacgtccatagtctccacgaaacgatccacatttgtaagaaattcctcggccatgacgacagaatcgagggaattgacggagcaagagcaatcttgagccctttccccttctccagaaccaaagagccgagtagagtcgaaaacgaaacgctctgactcgttggactcggaaaccctggagattaagccacgagattttttaaagcagagactggggagatcggaggaggaagggaggtctgggaggatgatgaaagagcaagggcctttagtgcggatataaccaagcatctgaaggaggatttggacgaacttgggatcaacgacggtgaggtgagagaggcgctggtggacgctgagagaagagaaccatcggaggatcgccgacctaggattggggatagtattagccattgaagaggaagaagagtggagggtac

SEQ ID NO: 16182 - DNA, 604 bp, Arabidopsis thaliana landsberg
agctttcattagatctacgaaccaatagtttcttgagaatactctgttcctacctcttttcctaattttttacaacacaatcaacctgctgttatcttactttgttttattactatttcaatcatcaccttctagcttaatctcgacattcaacttattgtttgaacaaaagaactttgtgaattcgatccgtaaatactgcaattgatctcttatatgagagagtagttctagggtaatttgaaccttatcagtgatttgagagtagaagagatggctaggaagatttaattcaagtttgctaaattatcaggattagtacattaccattctagttatgggatagatatgaggttgtgggtgtaaattcttaaatcaattcacatttcaagttcatagtataataatcatacttgtttaatttagtatgtctatatcatacatgatctctttgatgttaagaggagcatccagcttggttttgacaacacaacatcaaatttggaaaaatatttggatgagctgaggttagatttgatgtctctaacgtacatggaggttatgagcgtctttatgtgtttagcattttaatcaccacaatagt

SEQ ID NO: 16183 - DNA, 531 bp, Arabidopsis thaliana landsberg
taaagttttggagttctcataagtatgtatcggagttggttgttataatgctaattttcaaaggcctggagttcacccagctgttttatgggaacacacatggaagatactgtcagaagattttcagaggaaagtaagagacaagttaaaatatccaggttagttaaattgttttaaaaaatgttatatacgttttttaaaatgttattttacatattttattacattcatcctaatattataatgtatatgcagaatacatattgcctgacgaagacaggattcggttatgtttacaagagctgcaaaaaatattgaaacgacatggaacagatctttggaggtataagatgttgccgcagcgtaaacctggcgatgaacctgcctttaatcagttgatactcgatgagcgcaactacaatcgcgaaacattgaaaaaaattcatgatgattggttaaagatgctaaatacggaacagaagaaggtatatgataaaattatgaatactgtccttaatgacaaaggaggtg

SEQ ID NO: 16184 - DNA, 2630 bp, Arabidopsis thaliana landsberg
ggagagataccagcttgttaagcatttccgttttccttggccagtgaatgtaaagtccttatttgtttcttggttttgcttttgatttttttcttggtttgcttttgatctcttacacttgcggaaaatagcatgagttacagttaggcttttataaccccatttcttcttcagtgtacctaatccaagtgataaaggtacatgtgttttgaatcatttaacaaaaatggtattctctgttttcaatttgttggtacagcacgcatctttgagtcctgatggtaaattactggctattgttggagacaacccggagggccttattgtagaccccaacacaggaaaggtacatatttgcggtcctggacataagtgtgtgagatactcaaatggtttgtcaccacgtgtgtgctttatagttccacatctttggaatttctgcagacgttggaaacactatcaggacacttggacttttcctttgcctctgcgtggcatccggatggagtcactttctctacaggaaaccaagataagacttgtcgtgtatgggacatccgtaacctatctcagtctgttgctgtcttgaagggtaacctgggagcaatccggtcaatccgctacacatcagatggaaaatacatggccatggctgaaccggctgactttgtccatgtctatgatgtctcaaacgggtatgaaacagagcaggaaatcgacttctttggggaaatctctggaatatctttcagccctgacacagaggcgctatttattggggtatgggaccgcacttatggtagcctccttgagtttggtcggcgcaggaactattcctaccttgactcgtatctttaagctagaagagaagtatacacaaccctgtccaatgaagaaaagagagctcattcagcaaccagtgaacatgacagaagcaaagcatagatatatggatatctcaaagatgtaaatgatgtgttgtgcaaatgctagttagttagtgtcttttgtttccttctccggctggtgtgttattttccttatgtctggttatgtctggtctcaaaaggttcaagatgtgtacagaaagggctggttcagtggtggcacagactggattaggacttgagggtggctccgcagcgggttctggattcaaagtcgggaggatcattgttgttgtgtttggtggcttgtgatcttttctttttgttccttgtacttgtggttgttgtaggaactcgagtgtttagatcctgttctgagtttagaatttggagatacttaactaaattaaaataaattaataatagtcctttgttcgttataattcgattacaaaccctaataacagatgatttctctaatcactaaacaacaatggtgatgtgtcgtatactacttttggaaattacgtccattattaacataactcaatgttcatatttataacatgaaatatttattgtggtatgaaacagagcaggaaatcgacgtcaataccggccttaggtcctatcagactacttgttggtttgtcaagatctcatctagtggcagcttagcttccgtccatctgagagaaccattgcatgaccgcaaaaccttgctccacgcctccaccgccgaactttgagcttaataaagatactacagacggggacttaataaagatatatcacatatcatcaagtaacataacgaaaagaaacatatgcgccatgtttttgaagaaagatctggatatatggatatgcctgtaattcactacaaaaatggcacttactaaaagaaacaacaagagagacactagttcacagttagtaacctcctcactagctctaaagccataataaagctgacaaatcctccaactgatagaaaacattacatttagaaagaaaaagaaaacaagttctatagagaaaaggaaaaatgttacaacagacacgtaagacaacaaaagggagaaaagctactgagccactgtagaagcagtagctcctgattcatgtgaagacttatattccaacatctcaattctgtatctctccacatccttaactcctttgtcttgataaacctgtaatgatgaacaaatttgtaagcaaacactggtttaatgaaaaaaaaaaaaaaaagtggatataattcgatgatgattggttacctgtttctcagattcagtgagattgctccacatgtgtcctattttcttagtgatggatcgttcttgtccatggtactcaggtttaagcctcgcgtactgctcagcaaaaaagaagttgtagccactcctgtggcatttgggtttttgagtatcgactacagccaactttgatttcttcctatgccggcgttgtgatgatggtacaatggctgaaggtgtttccatggtttgttgggactgacttggcgtttgaggaatgtggtaaaggacacctttcagctcttgagaacccaatttcatcgtcaccagatagccgctatcaaacttcccatcaatgaatccttgaacctcatacccaacttgtggttcatcaatacctgcaggttccacaatgaagcacaaagacacacggtcaaaattttactagacacacacgcggtaaactcaaaacatatgagga

SEQ ID NO: 16185 - DNA, 2550 bp, Arabidopsis thaliana landsberg
aatagtaaattactctatatttggcagttgacacttatacaaaaacctacatgtcaatagtagtagtgctatacaaaaaactctaaagtcctatatgatcatggatgtacattacaaattgaggacgatattcatatgtctctttaaagaacggatgacgactcaacagaaattggctaatgacgatgaatataatctcccgctaactttttaaaaaactagctagctgaggtaatattatctcgtatctacggtactcccactatgcaaacacttacaattaaaattttatctatattcatacgaataaaatattacgtacaaacaacattatatatatatatatatatatatatatagttagttaagacccaattccataagcatagttttttctctcgtaaaaaaagataagtttgaaagcagaggaacacaccatgcagtataatttggagaacgcagaagtgaagaagaccggagattctaactgctggtacaggatgcttgccatgcttggtctggttttcctgattctcctttttatcacaaattaaatttttaattaatcaattttcttaattgtatgaggttaaataatatataatgtgtatgacaaaaagttagatgaatgaatatacctgaattttgtgattttggagtagtggatgattgaaagaagttttttttatatatataacgaagattgttcgtaaatatccacaaaatcatatatcatcttctcatgtaactatgaaaataatgtataagatatatcccgatctcataatttacatacaaaaatatcaaaataatgattcttattatatacattttttacttaccttggtagaattttcaaattttagtagtttctcgggactgaacaaaagagaatgagattataagaagtgcaaagagtttgaaatgaaatccatgaattacagatcaatatttttggaagcgtttttagtagtatttttgttttacctatatatttgagattagacccacaccaagtatttataataattagggatttttaatagtagtttttatttatatacataataaaaaggcttttgttaattttttaaattggtaaactttactttttaataaaaacttataactatatactttaattttgttaattgtgttcagatttcatatactacattataaaaatgttttctctttttttattggtctacttgattttttttgttaacacgtagattgatatttggtccacttggatttgacacgtggcgagatataaaccgttagataatgggatatcaaaagtaacacttgattagaatggcagggatcccttgtttctctcctttccactactctccctccaaaacaaaaatcacaacaacaagaaaaaactttgaaatccaaaaaaaaaaaaacccgagaaaatttgaattttattggggaaaaaaagaaagaagatctggaagtttctatgaacagtaatggcgaatcgaggcggcgaaaacgggaaattggatcggaagaagacgatgacgatgaattgggcggggttaggcgagtttgaagacgacgacgatcattttttcgatagctctaatcgtatctccaccgtcgtaccttcggatttagcatcatcttctgacgaagaagaaggggagtttgatgattgccggatctcgttttcttctaatgtgtcgtcctcctctcgcgctgctcctgcgccggatatgtcgccggattatgatatttggatgtcggcgccgggatctatcacggagcgtcgtcgaaggcttcttaatggaatgggacttgaatctaagaagactaggctcggagctatctcgattcaacgcgtgagtgaacctgtggcggcgacgggtgagtgctcacgttctcgcgttgcggaagtgaaggtggaggagtcagatcacaattctccggtgaatcaaagagttcgtcgatctccgtcgatgtcggttttgcttgtacggtctacatctgattccgatatcgaagcgtcttctgctgagaaacagaggaaagaagagatgttagggaaaacgtcgaaatcgcgattgactagaaccgcgtctgcgattggagctccgtgtgcgaggatttgtccctacttcacccaaacgcaagcctcgccgccggacgcaccaaacggtcatcatcagtctcaaggccaacgtagtggtccgttgctctcttcggtagtttccaatactcgttttagtgcttttttcttgattaagaaccttgaccctgggaaagagttcattgtgaaggagtatggtgagaatggaatgtggaatcggctaccgatttgcaacctggtaagcaattgacaatggaagaatttgagaagagtgttggttattcatctgttgttaaggatcttatgagaagagagaacgcgaattcgacgatggattttaggaaatttaactcgtatgtgtcaaagagtttgagagtaagtaagaagagaggagctgctttgttaaagaacataaaggacgttgctcattctatagctcttctagg

SEQ ID NO: 16186 - DNA, 1890 bp, Arabidopsis thaliana landsberg
  unsure (1)..(1890): unsure at all n locations
gacatggcgcctctctaacaagttagttgtctacgatatcgaaaaccaagtcattggatggaccaatcacaactgtaagcattacaaatcctatctttgtctttattgccacaaattctatgagatttgatgtattaggtgtgttttgactgtaatgaaatactgaatcacacaggctcaggaggaatacaagtcaaggatgaagaaagtggagcaatctatactgttggtgctcacaacctctcatggtcgtcttctttagctattacaaaacttcttacacttgtttctctcttaattcctttcttctgtaacgttgctttatagtttcagataaaaaccctcttgggacaaagtttattccttctgttgtttatcattaaaggaactgattcccatttcttgaaaaacaattgccactttcatgatcgagagaaagggattgacacaaattctgtaactggaattggagctttttgaaaagacagaaacaggaaattgtcccaacagactgacaaaattaagcctgaggggattcacagaattacagacacaagccattattacatgatgtgatgttttttcactcttctttactgacaagaccaaaaaacaacataaacattaacaagagagaaagacataaaccaaagacaaaactgacaaaaatttaggttccaaaaccaatgaattatgactcaaaaaagaatagagatcaatgaagaaagttgaaaaggaaaaacaaaagaacaaaaagacacagtaccttgtcttgggtgatttatttgatatcattaatcacctctcaacttcttcacttcaactcttctttctctattcactttccaggcacaaatcttggtaagtttaaaagtgtattaactcttgcaacaccttcaagtgcagaatactctgttccaggttctgaatccaagttatccgcttcttttatcagcttctcagtttcactttcgtcgagagcaatctctttccccgacctgacagtactcgaacggcctagaccgcttggtcctgatgcatcatcatcctcagtcgtggcttttagttcttcttcttctccatcttcaagtttggagatggaagaagctgtagatatggcgtttgtgttgctggagtctagatacaagcaaacagcggcacagtcatcgactttggaagtcgggtatttgtatctccaagctctgaccgcagactcgactaaagctcttgctgcagaggaacgcgatggagctgaagctacaatcgccactacatcttcatttgagagaacatcccaaatctatcacaatagaaagaaatgtgagcagcaaaaattgcaaatagaaaagatatgtgtctgagagagagagtatttaccccatctgtagccaacactataaactcatctttttcggttaactgacggaaagatacatcaggcacagagattaggccaaaatctttaaggcaaaagtcaccaaaagcacgtgccatagcaagtccaggtgagtcacaatttggcagccaaactctacaaacttcaggttcatctctaagagcaaacactcgtcctcgacactttcttattctctctgcctcagctgcaagttcaattgagggaataaaaaaaaacccaataaacatgattaatggatccatcatacatccacaggacaacatcatacattcacataagataatccaacctgggagatttggcttaagatccacagttagttgaacagcgaccagagtattttcactgtctcttgtacccattacagctctggaatccccaacatttccaacaacgagatactgaccctgcaatatngcagaggatacataataagatcatgaaacaatgaataagactttaactttgaacat

SEQ ID NO: 16187 - DNA, 1294 bp, Arabidopsis thaliana landsberg
caaaccaaacaaaacaataacatatatctacagaatttgttttatctaaaatatatacatgcggtgtatcacggggtaatatctagtatgctacataataattgattgtaaataaataatgtgagaaaaaaatctccaaaatctcaattgccaataacattacaacaagtgtgtctctcaataatttctttcttttttgaacaaataataatagaaaacgctttacttacgagctaggtgtgtgaaacatcttccagtcatatggtgatacgtggcatgggcgaacccaaataatttttttttctatatgttgaatagattcaacacctaaaagtctaatgcaaactttttttccacaggtccaatgcaatcagttttagtcacatgctgttaaagtattaaatccctctacgtattaatattttattcctacttaatagcatgtatgtattttggcaaaaaaatgctaaatcggagatgaagttaaaatatattgtgtgctctaatatcaaattaagaattatatttcgtccaagctacttagtatgtacatgttgtattcactagttgtccttcctttcttcttttccatggtcacaatttggttcattgtttcttctaagggattgagcaatcacggtttttcgggagagtgtttttagggcaatatctctttatatatttaagaatgctaaaatgtagtatttttgttggttcttgtttcattgccaagattgtacgaggcgtgatgaaggcagtgaagagaataagggtagtttcgtagacatagtagttgaagagctaaagctatgagaagacgaataacacacatacatgttgctaagaaaggagcgtcttagcaagggagaaatccgaggtgattctacataaacagtcacaattgtcttacatgtgggagcttcaagctaggcaaagaggatggaaagatgtaattgtgttttcaaatcatatatatgaaaggaggtgacctgtctccatatgaatgacatgttacaccatagagatgaaattttctttattctctcatcttattcggaaacctaaaaaggtatggtgaaaaatataagaatagaagaatgagaaaatggaggcttcttaaactaattttaaatattatttgcttaacttaggacttgaaaatatattctgcatattttgaagattggtgaaattaatgggtaattttctcagacatggaaatcttggtttattatttttcctgtatgactctgcaagtatagtagggtttcaggaactactaggtgaacaccca

SEQ ID NO: 16188 - DNA, 372 bp, Arabidopsis thaliana landsberg
aagaaaatacgtcaatctgaatcaaatggataaacttgcaagttgtgaatggataaaatacttgtgttcgttatccttgtagttttcaagaatctgcaacaagtagcacatggaaatatcagggaacgtcgtggcaagaaacattagaggcaaaagttgggaaatgtaacactctgtatcagaatccaagaaatcaatctaagtagtcaccttttcaaatttggaagccatcgaacgaacaccaaccgatgaatgagccatagcgcaagatatgtatggcattaaaagtgacaccatagggctctggttatcctgaatagattcacacatagattcgagtgtttagacacaacagttaactagtaaggatgc

SEQ ID NO: 16189 - DNA, 2670 bp, Arabidopsis thaliana landsberg
agaatatgtttaatgtactcccattttgtttataaaatatttacatttattttttatttctatattatttttcaaaagttaccatttctattctttgcatatataatttgttttctttcataaatatcttaatatatataatattataataaaaatattaattaatgtgatgtcaaaagtaccaattagtgatacgactaagcgcgattggtcacttataaaaatgtgatagtataattaaagttatgagactaatatgaattatttatgtattcttataagtaaatttatatcattcaatgagatagttgttgtgattatatggcttttgtaattaaagatgaagtactaataaatttagtactttatttttatatattaactagattctgacccgcacatacgtgcggggtttcatattttaagaaatgtattggaatacatttgtagtgaaagatattgtaatgtgtaaattataatatgcatagaaaaatgtatagtgttatttatgatacaataactaaatttttttattaagttatattatttatatttcatttgtgttttgcatagtaaatcgaatgttagatttgtttcgatttacggaataatatagagatatttggaaaatctgtgtatttttgttagtttgatgtatatacaaattagttgattttgtttgaaatttgatcaattagatgatataatgtaaactttagtccgcggtacaccgttgttcgatttttttgtaactaaaaatttgaattttaagttatagttgttttgtaaatattgtttcttttgtttagtgtttaagattgtataattgtgttaaaatggttaattctaagattacactcgtagattatcgtcccgtatgagtatcaacccaaactcgttccaccagataacttcattccgtaaaattaaatattatttttgttattttaaatattcttattgtaatatattaaaaaaatcatgggattgacctgtgctagatcttggattaatatatttaaaaataatttgtgatttataaatttatgatattgaagtatataaaaccaatttttagtgtatacctttcaataagatgtagttcttataattatgaatattacaaaagcttgtaactattataatacgtttaaaagtaaattttcttttatataattcaaattaagcttagtgatatattttttaaataatgaaaattacctttttaaaaaaaaatacttaaaaagtttatatcatttaaattctaattaaaatgttaaatattttaatctatactgaaacgattttctagataattacaaatctaaaatccaaaagttatcttttgaatatgctaaatcataatttaaaatcatttttatgtgtactaatcagaaacaattaatatagttttgttaagcgaattgtataaaatctaaactaaatgataatttgttattaaattagattaaagtttccaaattatctaataacatattaccaaaagaaataagtttacatatatataatttgaattaaaataacctaatatgttatggaaacgtttttaaatgatttccgaaaatattggatagttattaatttattgatttaattcgtttttttttaaaacaaaatccaagatatttgtttagttgtagtagttgttagtttattaaattatccatgcaaaaattcatttacttagttttaaactaccctgttgtagttcacacaatgcttctcaattaataatatagattatcttataattttgtttataatgaattataatataatatattgttatgtttttttcatttatcattaaaatttaccgagcacaccgaatacttggattttaacttcgatctaaattttgttgttgcctcgtgttggagaatgtgaggttttgacttttgagcattgctatgagcctatgagcagtcttgagctttggaaccctatttttgttttaagcgtatcatcaagaatgaagaatacaaactaaaggctataactagactgatgagtgcataatctctggagttgtctctttcggtatctccaagccacttggatctgcatagctgctcgtaacctccaataaggagactcgtaccttatagctccttgcactcgatggcttcttaagaatcttgaaaacaagcttgttacatcttcaagatctgctacactcagcgaaaacgcctccacgtttgtcacacacctaacatttctgttgctaaccaatccctttggtggcatctttatcctcgtcccatctgcaagtttcaaaacgtattcagctccaaagttccaagtttctaaccaaaaaacattaagagttatgaacactcaaatgttattagtaccggggtttatagaagagaggcaccaagtgagaagttcttcaccacaaacgtctccttctgataaaggaagaacagaaccgtcttctccaatgctctccatctcacctctcactatgaataccattttctctactagacctctgtgatgcaacaccgtgctactccttatgtaagtcctctgtttcagcctctctctgattgaatctaaaactgattcatccatcaacgacaatattctcacctgcaaactaattaacactaggattcagaactagctttttgcaacactgtggag

SEQ ID NO: 16190 - DNA, 2437 bp, Arabidopsis thaliana landsberg
gaaagataatcagaaacaattggcgtggttgtcccggtttaacctatatgcaaaacacttgtaacttactcaacgtttctctaactacattcaagcctccaagtttattccaggaacaactttgctcttcttaagcttttctccaacggaggaaaaccgcttattttgattctgtcctggtccttttggtatgtattttgaaggaaagacaactaactcttcaattggggaaaaaattattcatttcgactcatgtggcactacatacaacatgtaataggccaatgcccaactctctatcaacataatatataaagcagagtccatagattcagatattagcatttctaccttctttgcgagcgaggtgccttgttgcggctatggcatggacacacggcatcttgtctatatcaaaatgtttgcaagaacaagttttcattttcaaatccacctaaaagcttaccgagttgagatcaatcacgttgtattcttggttgtaactgttaagctcaatccctgttaatttggctgcaactggaaatcgaatatgcaatatgttctccacattacacacccacttctgatgtgcttgaggaagaacctgaatctttcctatgtttgttgaaccataaagagaacttatgaaacatcgcatcaatcagtggtaacaggagatacttcctctcttttctaaatacactgttgatggactatatagcattgctagtgtctatgttataattgtctcttttaaaatggcacctcgtctatttctcaaaccctacatcaactagaaaggtagcgggtttatgccatcgactagtaaaataaccaaactctttgttgaattcagtctcacgcaattcctgaatttatcaatatctctctccttgtcaaacttcacatgaagtctcatgttttgagtcaaatgccatatacaacttgcatgaagcgccttcaggtacacagtcctaacggtcttcttttatgcctttgatgcctgtcacttatagacattaatccaagaacatcaaaatttacagattttttagcttttttaaaaaccaaatccaactaccattcttcttgttatcaattattccaaatgcacgaggataatggtgatgcttaggattttgagttgttgcaataaccaacatcccaccatacacagttttaagatgagttgcatccacaactatcactttccgcattgccctaaaaccttcgatgatagtgcctaaagtgatgaaaagatatttgaactttttctctccttccaactccacataagttactgtccctggatttaccttctctaacatgtaaagataagaaaataacatcgtgtagcttctttccggagtccctcgcacatcactaacatgtagcattttgcctcttaaggctgtggagtatgaacaatgcaccccaagtcttcctcttacaatcgacataatgttttttggagttggggtctctaaatttctgggataatcacaatgcaaaactgatgctattaatcttggtgtgcctcactgtatactgttgcttgtaatctcaacaccccgagagcatgtatgcatctttctatgcactctaacactccaaaaatgagatttcttagttctcgcaactcttagataccaagtacaccctttagaagcttggcggcatcgtagcataagtctcaacgggtctgacttaatagtatagactccaaaaacttctttctttgcagctctgttaaccaattcccacacagcctcccttggacaaaattcttgaccaatttcaatacctgtaccatcatcccattctataacctgcggagtaacttctacatttcgtggaatatcgtgaatgtcatcataatcaatcctatcatcctcatcttcttcctcaacagaattcaccggcctttccatcggcctttcgacagccacgatctccgtacctactacattctcacaatcattcacatcattatcatatccatcatgcaccatctcacatacttcatttaaaacatttacaccaactgaacttcgacgctccggtacagaaatttcctctctcctctcaactcctataccatttaattcctccacatgcaaaacaggaatccgatctctcttcatcagattctgttaaaaatatgaagacatcctcatcatctacaatatatgtctctctcctaactttagacagattgtaactcagtttcaacttgacagaagcttcatcaatcgcaaccttcttcatgatcttgtcaactaacatcgaatagctaatcttctccaaactactcgtcttaaacgatatagcatatagtgaatttttaccaatccactcattcacttcagaatagtatcctccaaagtcaatatgttccttagtgtggatcttcttcttcatcgctcctgaaaataca

SEQ ID NO: 16191 - DNA, 1385 bp, Arabidopsis thaliana landsberg
  unsure (1)..(1385): unsure at all n locations
ctgctgatttcatcttctatgcctcttcctacaatacacaatgagattaagaagaataatttcactcacgcaagccagatcaaagattctaaactcatcaagtcttaacaatccctaagaaactcattatcaacaaaagaaggcaaataattattgatcagatatatagttccactaaagatgattcaatcatagaaagaattcaaatacatttgaaatgggtttcctcttcctctcgagcttctccttcttcgacttaactctatcagcttcagccaacaaagacatcctcctcgcagtcttagcataagggttaagcttcaacatcacattcagatttttcttcaacacagctctcttcacaaatcagcattcaccatcttcgccctaggtaaaagataacctttctttatctccgacgacttcttaacgaaccggaacagaagtctcagcaatcgttgatacaatcgcgtgttgtttcaaattgacattgacacgacggtgccaaagacggtgagtcttcgtcggagcaaacattcgaccactacgacacatgtttctgatagctgcttgaccggcgcgatgagtacctcctctggcaacacgagggatacgtgatatggctcgtcatgtaccccaagactcggcggaagtttgatgaccggcgtgctttgagacggcgtaaggttgacgactgttgttaagtaaatgtaaacaacaaaaatgtgtttgttagaaatgtgagtgattatccatcttggataagtcttgctcaccaagtcacttgctcaccaagtcacttgctcaccaagactcttgctcaccaagacacttgctcaccaagtttctcctctctatatataattgtntgtttcattgtaaaataccaacacaagaagagaagagaagagaagagaagagaatcttacctctcacatatttgctctctctctacgttttctcccacatttgttttttcctaaaaacatataatataataatattactccggatattgtctaaccaaccgatcgtctatttgttcaagcatcttttgaggttatacctcctccttaatcgaatggtaggctatgcctcttcgaaatgccataaatggctcattaattgaatgattatttatctatatagataatcatgtcaaatctagctaagctcgatgtcgttgaccttgatgtatctggcaaaaattatatgacatgggcatctgatgttaagatgcatctaagatcaaatgggcttcttagcaccatagatgcatctgaaacaacatcagatgagagcaaagctaaagccatggtatatttacgccaccatctccacgacaatttaaaaaatgaatacatcacgagaaaagatcattggat

SEQ ID NO: 16192 - DNA, 2000 bp, Arabidopsis thaliana landsberg
gtgaggtattggtaggtatgttgttaggtggcttgcaaatcgaatcagacaaagagaagaaaagccacatgatcaaatttgaattcagagagaattctcaagctcatctggttcttaaacaacaattacatgaccagttccgcgagtggttgcatcctttaagcgattttcaggaggatattataccgttcgaattctactccgttccccattcatacttcgggttttacgctgaacatttctggccaaagggtcagccagagattccaaaactgattcatcggtggctatcgccacactcactcgcgtattggtacatgtacagcggctttaaaacatcatcaggggacattatcttgagattgaagggaagtctagaaggtgttgagaaagtagtaaaggctcttagagccaaatctatggattgtcgagttaagaagaaaggaaaagtcttctggattggacttcagggaacaaactcagctttgttctggaaactaatagagcctcatgtgttagaggacttgaaagagcatttgaaacctgcttctgaatcactggacaatgataaggaagcagaagaacaaagcatcaacttcgactcaaactctgatcacagtgacgattgtgtcaattcagaagcacatttttgatgaaaaggaaacaatgttgatttttttaactagctggggtttgatatataataaaacatcgttaaattagtaactaaattcaacctgaccacttgaagaaattcattatctggttggatatttttcattgcaagtgattagctaaaaaaaacacatgaaatatctaatttgtaagttggaacaactttccaaattttataaaaacaaatccctcaaaaaatatgtagttagtttaggggaaaatgatcatttcatttctccaaactatttgcaattaacacaattactttttaattatatgtgtacaaatttaattttcaatttgtcgttaacttaacatatttggcccaaaatttgatcaatgtttactagttaaatagaaacgttaaattactcgattaaaacctaataaactccaaaaatcctaaaatttctcccaaattgaaagctaagttattacttcgaataaaaaaaaaaaaaaacttcatctattcatcgtacttcgccaaaatatgcgaattcgattttattatttagctgaaattcatttattactattttctgcatggcaatgtttcgttaattttttactttcaattttattgtaatcttaattcaaattataatatatgtacataatttaacaatgtgtttgataactttctctaaaattgttgtcatttattatttatacatagatatcaggaccggtttagagtgtgtgccaagtgccaatggtgcatttgtactgtttaagcaatcatggtcctattttctcaaaaatatataataaatgtccaaatccatacataagatataaacatgttttttataattagatacagggttctatttttctctgagtcggccctgatagatacatactatcagattaggcagaggtatggactatggagtaatttatgggggcacatccatccgttggtatgatcaaaatttagtataagtcttcagaaagtattttttagatgggatgaatttgcctctctattatcccaagattgaatccccatttccttcagaagcagtaaatacaaattaaactactgagctacaaattcgggtaaagctacatgtgtatttttaatctcaaagttgctgtaattatgaaatgtgaacgatatagaagtgacaggagcttgagtgccccatgagataagaacttatagatgtatattaatttaaactgtactgtctaaacctagacaacgccgtgacgtctttgcccacatgtgattattcgttaccacctctcttagtgtggtccaacaaaattggcctctcagttttcattgaaggcagggatagagatatacaggtagtcac

SEQ ID NO: 16193 - DNA, 608 bp, Arabidopsis thaliana landsberg
tcttgaatcatcgagatgagaccactcttaatctcgaagttgttgttctgtatggcaggaggtgcaattcctttcctctgacggtgatcccgtgatgcatctctagcaccaatgtttgcagggccattctgttgattttgttcatcagccatttcgagtggttgctggggtacaagtttgactgtgtttctcctttctctgaatacgcgagctatgcggtcgatgttatcgttgaaaagaagacaacaagaaaaacacacagttaataactgaaataaaaattgaaaaagaacatgatctaagcaagtctgaaatcttaaatgtaacaaacaaacacccaattggcaacgacgccaaattgataatagaaaatagttttttagtcaattttcctcaaacatcaatcatgtcgttgtagtattttaggttgtcaatccaaatgggtgtgatgctagcaattaagatgcaatcaaagttcatagagtcaaaccaagcaataacaggttttggggtttctaccagtcctaagtgaacatgcacgaaacataaattcaagcagaacagtaaaaacactcgaccaacatagcttgttgtcaagcgctggattt

SEQ ID NO: 16194 - DNA, 1426 bp, Arabidopsis thaliana landsberg
  unsure (1)..(1426): unsure at all n locations
aatcctttttgggacatctcgtagaagattttcatcgcatcatctaccttcttacactttcaaatttgtttatgagagaagnataagccactacatctggaaaacaacccttggtttccatcaaataaaacatttgtctggcctcatctacacaaccttccatgcaaaacccattgatcaatgaagtataggtgaaaatattaggagctatagacatacgaatcatctcattgtacaattcttcagcatccaaaaactttccttctttcacaaacgcatcgatcaatgcattgaaagtgattacatcaggtttgattttcctcttcatcatacccctcagcaatgaatcagcatctctccatctaccagagttacaaagaccgttcacgagagaggtgtacataacaacatccggtctaatcccgtagttttccatttgatcgaaaaggctcaacgcgtaattcacatgcccgtttttgcaaagactatcaatgattgttgtatacattacaacatcaggtttaatccccatctccaccatctgattcaccatagacatagcctcctcaattctattcccgagacagaacccattgatcagagaagtaaacgtgacaatatcaggctcaaaaccaagtttcatcatcttcccaagaaaagaagaagcaagataaggttgtgacgattggcagaaacaattcatcaaaagattgcaagtatagagatcatgtgaaactcccattatctgcagatggtcgcagagattgatcacaacatcaaacttcttcattttggcaataacattcaataacttagtgaaatcgagaattgaaggaagaggacgagactcaaccatgtgagtgaacaaatcgagagcttcattaaactgaggagagtgaagaccatttctcaaaatctctcggtaatatcaaaaagctcgaacccagaaactaagacctaaaaggcggctaaaggagagagcttttccagaattacctttcacaagacgatttcggtaaagttaaaaaaatctcatcgccattaacgcaaatcccagacgaaattgattatgccgttgatcgatttactacaaaagctacaaaaaagtttggatgagatcgaaggtcgttgtatataagaagcctaattttcgtttacttggaagatacgaagaagatgaaatttgagatttgagtaaagaagcggcggaagaagaagatggcgaatatttgtacacgtgtattggtttgacttttgtacaatatcgttgacttcacgaaaccagtctacaacgaccggttaactaaatcggtttgttcatttacagatccctagaccaagacttcatgttatgaaagataaagatcacttgcagaagaattcctcttattattaaaaataagtacaaattgaaatattgtcaaat

SEQ ID NO: 16195 - DNA, 2241 bp, Arabidopsis thaliana landsberg
gattacatcgaaaatcagataaccagcgttttagttatggtttcgtttccgattatatcgattttaattcgaccacttggtttatagataaatatcggttgaaatggtttggtttagttttcctcttcggtttagtacggatcacactctactacaattgggtagcgtgtaactgtcaacgagcgtctcacaatctaaccgttgatcaattctcttgacggtcgtaaatacgccggcaacatcgaacgagaagtcaccggaaaggtcacggagaaatgtcccccatgagcttctccgccgcgtacgactgataattggtgcgattctttaaactagttactgtgatttagttgctttatcttctgttgttgggggaattgtaggtcactgatgacactgctcttggaatttgtcttaagttattacgattgattgagttttaggttccttttgatctttggtggattctgatgttggagctgattcatcaacactaaagcaaagctacaagttttatcattggaggagatatgttcaaatgcaagttggaaaatttctccaattggatgattggggttgatgaaggtattagagtctatggctaaaggtccttgtctttggtctcgtggagtattagaatatggatccttgtgatgtgaagttttgggtcaagttgggatattttataattaaggagaggctgattttttccacattgtcgtcattgataaagtcttggttttgtgttaaacaatgaccaaattcccagacgtggtgtagtgaacaaccaaaaaaacaacatgattgattgattctgaaattcactttaattttcaagagagagtttctgaggatcttgatatcagaatctgtcatgagagaagcaggagaagagaaagtggcgtggaagtactttaccagagatgttgtgccgtttgctgcgatgtttgcggtggagtgtgccactgttgggtcaaacacgctgtttaaggctgctactttaagaggattgagcttctatgtctttgtcttctactcttatattgtttcaacacttctccttcttccactttctgtaatctttggaaggtactgatctcctctctttgcccggtataatcttttcaagaacatgaacttacttttgtacatatgcaggtcaagaagattaccagcagctaagtctcctcttttcttcaagattttcttacttgggcttgttgggtaataacatcgtactcctgcttctagatttatgggcatttctggctttttttaacttgagtggaacaggttcatgtcgcacattgctggttgtaaatggattgcatacagttccccttctcttgcatctgctatcagcaatctggggccggggttcacattcacactcgctgttatcttcaggttccacctctttctctgctgtttctgtttttggaaattagtctagacagtggaaaacggagtaattccacacttactaagcatacaaaatctcaagccttttgcgtatatagaatgaattgaaattttcctttttggacgtcatgggttttccatcttatgttcagtgactagtagtttatacgctgtagcattcgatgccaatcgataccagtaaatacggaaaacttctcacgtttatttaaactacaaagtacttagtcgtcacataagagtaagactcactaatacaagtacaactcagtggttggttagaaatggtttgccctcattctttcatgagataagtttggtgcatatgatgatatgtggtctatttgttactatcaatcttttttttgaactggtttttcttttgggtgactcattaaggatggagcaagtaaggttaaggagctctgcgactcaggctaaaatcattggtgcaatactatctatatctggtgctctggtagttgtgctgtataaaggcccacaagttctcgcctctgcatcttttacaactgtattacctaccgttacacttcaccagcatttgacctcaatagagtcaagctggataatcggagggctcttgcttgcttcacagtattttcttatatccgtctggtatattcttcaggtacaaacacttgaaaatttcactaaaaaagactttgggtttacacattaaattctgtagctgtatatggtttcagactcgtgtcatggaggtttaccctgaagagataaccgtagtctttttttacaatttatttgcaacactaatctcag

SEQ ID NO: 16196 - DNA, 437 bp, Arabidopsis thaliana landsberg
cattaccacaaagaatatatctgagggactttgctattggcctattcagattgttgcttccacagcttcttcattttcttcttctttggttttgttgatcgctggagtttggtttctcttatcaggagtgatgtttgaggtttagattagtgatgtttttgaggacttatttttgtggatatggaaactatatgttttgtccatgtattaaattgcataatatggtaaaattttacttggaagagtgagaatcatttagttatggatccaaatatttgatcaatggtgggcataagaaaacaggactcgcaaaaaattgaaactctaacggcagttaatgtacgtgatcagactaaaccggtccaatgtcattttaatggttcaaatttgatagcaactacgggaccacaaaccaattacacttaaccaaacaacta

SEQ ID NO: 16197 - DNA, 1067 bp, Arabidopsis thaliana landsberg
atccccctcgttccagccttcgaacccctgatcagtagtgggcgcgacgccgagtagcctgaggggccgttgaacccttccgaggggtcggccttcgaacctctgaccagtagtgggtgtggagcccacgcgctctgaggcggctgttgaacccttccgaggggccagccttcgaacctctgatcagtagggaggctcggagccaggttccttcacggggaaggatccttttcggggtatccccctttcccgatccctgttgcaagagagagaaagaggaaaaaaggaaaaggttccgaaatcgaacgacgcggcgtaccttttctgacgcggtcattatggcgaaggcgaaacgtcgcccgcttctcctgccagaggcgtcgcctgtcctgccgcgaagttaatgcggcggggctattgcttggcggggcggccgttgcgcgtgcgcgagccgttcgaggaacggaacacgggcgcgttgtcttcacgccgtgagagagggttctctcgctgcccccggatgggacgtaggcttggctggcgacgtgaccgctgctcctgcccgccagccaccgccattactgccggcccatttttggccgcattgaccgtcgcgccaggctggcgccactgggtcgtgctctgggtcgcctcgagttgcggtatcggttcctcagtcgaagaggcgcggtggtggcacaagtggcggtgcggtcgcttgcatgcagcaactggcgcgccggttgcttgacgcgtgggcctgggcttccaagctggcgtgtcagaagtcggagaagcgcgtccacctggcgcggttgcacgccgtctgcatggctgcccgccccttccgcccgttggtctgggcaaaagtggggggtcgcttgtaaccgctggacagtcgtgcgcaccacgcgcggcggtttggcttcttctgccctgagctggtttgcatgacatgcgggacccagcccccgagtcgcaggggagggccttggagcgtgttggagaagactcagcccgcggcgtctgggggcgcacgtagggagagccgcctttaaaaggaggga

SEQ ID NO: 16198 - DNA, 1578 bp, Arabidopsis thaliana landsberg
  unsure (1)..(1578): unsure at all n locations
aactgattcttggcaaacaggtgatgaatgaactaactacctgtttttgctctaagcagtgagaacgaccaaagtgccccatacattatagctccaatggagtttaaatgtattgctaaagcaatagcataagggctcgatgatgaactgatctctgttctaaaatatggcagttcaatgtcaccagagctggaaggagtgaaacaaaaaacgatcgggattaaaagagaccacctgataagactcatacatctttcggaagctatatgttcactactcggtacaaatgactaaaatttctatctggactccccagagaaaactatgaactatgattaccgtgaagggatcggttgagcagtactgtaagacgcattcaaggaggcaactactatgattgctaagcatatctgcaatactacaacttgctgtgtttcttgcaacttcacatcctaccacatgcatggagcacattatcataatccgaagtttagaagttatcttgagtcaacatcaggaaaaaaaaagaaatggaaataatgggatacctttacagagaggaaaaatagactaaatgataagaaagcagacaccagacaatacaggcatgatgatcctgagagttttgtgctaaggatatacaggaaatatgcactagcagatgccattgcagttgtgatcccaaataacgcgaaacgcccattgctcttactgattccaaaaggtagattcccttccccaagctctgcacttagagcggttactacaccatacataacaaatccaatcactggaagaggaacacctggcaaaatgtaaaaaaggattttcattgagttcaacttacctgcaatgcaatgttggacaaacaacgaagacaaagcactacatagagtggagtgaagcatgctatttaactctaacaattctatgcatactaagtaccaaagctcctaaatgatatagcttcaagcaaagattcacagagactatcacatgcgagtatttaatcatgcctactataaaagagaggaaaattagctacagaaatcaaacgctataatcaataaagcgatggataataccgaaaacgacggcataatcgctgttgaggacatcaccgcaagtgccaccaccaatagggcaaaacgcatcggagccagtgaccttgaggtaagtcaaatacgcagtgtctaacatcccaataccgccgatnnnnnnnnnnnnnnnnnnnnnnnnnnnnnnactagtagatacttcacttgtagacgatgaggaggaggaagacagcgacggtgccgaatcctcaccgttttccggctcagatgaagaacatttaatcggaatcgcaggaaatctccgatcagagacctaattcagaacatctgacttcaaatgaccgatcacacactactgtcactgaagaaaacacatgacaagaatttacctcgaatcgtctaggataagaagttaccgacggaggagaaacctcacggaagccgaaatgaaactgacaagacgacacagaaacaaacctcgccatcatcgtcgtcgaagaatcgctattccaccattgtt

SEQ ID NO: 16199 - DNA, 1641 bp, Arabidopsis thaliana landsberg
tcgtttactaaaacaatcatgtcatcattttcttctctttcatatatagcattagatcagaacgctacaatttttcgagtaaagttccaacagctttattgtattatattgatactctctagaacactaaacccacactcccatagataaattgataagcaaagaagatagaagtaccgaggattataacttcttgccacatatctcccatgctctgtagtaagactttgactcacggctcattagctatctcacagatatcatcaatcaatcccggaaaacattagagaagactgatgggtgcatgcttaaaacaaatttacgaaatcaaattatgcagttaaaacaaattctatgagttacaaatcaaaaagtaaattatgtccgaaatcaactgcaaattattaagctatcatttcttgtaataaaagaatgttcctgtgaaacacgaacaggaacagagtacccaaatcagtggaggtcaggagagacggaaagagccaaagaggcaaaacaataaagaaagatgtgttctttttctggtattctcataattataaaatatgtcttggaacagagtacccatgaaggatcaaattcaagagaaagaaaacacagaaacagttttagtagtctcaagtaaacaacaatgagacaggattttcaagaacaattaggcaataaatatcaagcaaataaaacccttcaaattgaatgaactatgatatattccagaaatagtatcgagttccagttaatatatgtagtgtgtaccaaagttttcgaaagtccattagttaagggaccctgtttctgatgcttagaactccataaatgcaaggaaatctcgttgtctaagtcaggaacacactgcagcaagatatgatttttccattcagagaattctcctagtgaactatccaagtaaggtttagaattacagagcaattaaaaacggagacttgatgaagagagaggagaagaaagatggttaccttgttgccttcaataccaaactggaaaagcctgattccattggatttaaggaactggagattgctctctgggtagggctccgggcacaagtatcttcacaaattcgaaaaaacctaaaatcagcaatttcgaaagtttgatatatagtatacaaaatgtcatgaatgtggaaggagcttttacatgattgagcggagaccgagagtctggagaaaggagaagttagctgaatcagggaatccagaccggaatataccgttatcgaccatggagaagttgagcggcggaattaggttaagttcttcgccggagacaactcgaaagggatcagcttcaccgcccggagcctgaaacacgtttctgttaacctcggaaacctcgatgatggtgcggcagaaatcttctccattgtcctgctctgtagtagtcgtcttctccacaagcttcatctctgaattggtaatcaaagaaaaggttgaatctttaggtgaggagagtcgagtaatgtagatggtcgttaagtagcgtcgaccttggggaggtttatatggagagagacttgtgactctgttctgtattaaacaaaagtaaaagaacgcaaaggagatggacccagcaaggactcctttttgatttttattttta

SEQ ID NO: 16200 - DNA, 4209 bp, Arabidopsis thaliana landsberg
  unsure (1)..(4209): unsure at all n locations
tctgtttgtacacattttgaatggtctaatatttggtgtttcttaacttctcacatagtcacatatttcgttgtttcagttgcatttcatactttcgtctattgtttcagttctgaccctttttctgtttatcttattggaaagcatgagtttgcttcaattagataattatatatgtctgtactaacttagctacaatccttctatctatttaattaaaagctggtgttttgttgcatgtagaaaggacttatgaacacaagcgatgaggagactcgccgttttttcaagcactcatcggtgcaagttctcctttgtcctagatatggagggaaaggtcacagcttcataaaaaaatctgtaagatgctcattagttacttcattactgtgtaaactcttgtgtgtatagcttcagcgtctaaaatttgagtgtcattatgatgatcaggaagttgaaacaatttacacgcatcatcagaaaactatgattgtagatgctgaagcagctcagaaccgaagaaagattgtagcatttgttggagggctagacttgtgcaacggacgatttgatactcccaagcattctctcttcaggacattaaagacaatccataaagatgacttccataacccaaattttgtggtaatcatttaagaaaaaaactgtttggttgcaattttggaattagaatccgctattcttgatccatgtaaaatctgtttttcttattagactactgcggatgatggaccaagagaaccatggcatgatctgcacagcaagattgatggtccagctgcatatgatgtgcttgctaattttgaggaacgctggatgaaggcttcaaaacctcgcggaattgggagactaagaacttcttctgatgattctttgcttaggttagacagaattcctgacataatgggactttctgaagcttcttctgctaatgataatgatccagagtcttggcatgttcaggtaatttagcaagactaattatcattgataactcatgaagcattatttttatttgtggtggttacaaaaggaatctaatttttgttgcaatgatattaatctttaggttttccgttccattgattcaagttcagtcaaagggtttccaaaggacccaaaggaagctactggaagagtaagcacaactctgaactgttttagtttgtcatcatgttgctattctctgctgacaaactgtatttgtgaacagaatcttctatgtgggaagaatattctcatagatatgagtatacacgcagcttatgttaaggccatacgatctgctcagcacttcatttacattgagaaccaatattttcttggatcttcattcaactgggattcaaacaaggacttgggtaagaaaattgaaaggttttaaaggcaagctcagtaatcaatgcgtgcagtaataacaaggagttttggcattgcaggtgctaataatctaatcccgatggaaatcgcgctgaagattgctaacaaaattagagcaagggaaaagtttgctgcttatattgtcattccaatgtggccagaaggtgctccaacaagtaatcctattcaaagaattctctactggcaggtaaattattttttgattctttgctaaaaacaacccgatctcaccttctttttaccggaatttttcacaacctctgcagcacaaaaccatgcaaatgatgtatcaaaccatctacaaggcacttgtggaagttggtcttgatagccagtttgagccacaagactttttgaactttttctgtcttggaaccagagaggttggaaccagagaggttcctgatggaacagttagcgtatataatagtcctcggaagccacctcagctaaatgctgcacaggtatacatatattaaatgtcttcttttgaaatcttcgattttaccttaatgggttcgcttactgactaaaacgacaaaccaatctaggtacaagctttgaagagtcggagattcatgatatatgttcattccaaaggtatggtagtggatgatgagtttgtcttaattggttccgcgaatatcaaccagagatccttggaaggaactagagacactgaaatcgctatgggagggtatcagccacaccattcatgggctaagaaaggttctcgtcctcgtggtcaggtaaataagattttcagagacttctacttttcaatatgggctagcatactatgacgaaaaactagaaacccaccaatgtatgtcttctaaaacatttctgaaccctggttcgtctgaatttcttgcagatctttggatatagaatgtcgttatgggcagaacatctagggtttctagagcaaggtttcgaggaaccagagaacatggaatgcgtgagacgagtaaggcaattgagtgagctgaattggagacagtatgcagcagaggaagtcacagagatgccaggtcatcttcttaagtatccagttcaagtcgatagaacaggcaaagtgagttctcttcctggatgggagacattcccagatctcggtggcaagaccataggatcgttccttgcagtagaagaaaacctcacgatctgaaagtgaccttgtaggcttgtagtgataaacatttgttctttatttcttccacttcaagaaatctatctgagtgtgatctgaatgaaagtgtgtgcctttagggtctagttgtgcttttcaaatttatgagctgtaaatctatttattacaattgatctatcaaagtgtgtgttttggagttttactatatgatttaatttagtaatgttgtcatatctttagtactatatgattacaatatcacattggcttgtagaaaatgaaaaatgtcgagttgtgcttggtatctccggaatgttgtcatcctgaaagagcttatgccaaatcattcataagatcatgcattacaaagcttgtcatggtgaatccaatctctgaaaaaaaagatttgagcaaactaaatcaccaaggtaatcatttccaatatcttccaatcttctgctgctccttggttggtataagaggtctattgccatccatagcagcactaattcctccctatcgaaaacatggcccttggggaataatggaatagggaagcagaaaaaggatttgttgacttgctgttgtttatgcagtttgtcagctggcctggagattttcttcttccatttgatcatgagattcctaaaactgttattaacatccccattttctgaaagtgtaattacattttctagcagtggccatggagcattcaacgagtcacattcaagaaaaagtagacaaactaaaggggaagtaaggtgaatctgacctgatttttttcttttcttttttgcaatgttttaagtttactctatctcacttgcgttgtcttcttcctttcccctgtttccacacttgtgttttacttcccccattttttctttcctcttcgtcttcttcttccttgtccctatttacaagttttgttcctttataagaagagtgtgtaccagttatttggtatgttaagaggcgatgacgtgtcgatacaccattagtgggattataatgacaaaacccaaaaacaaatatatatattcacgtgacaatttttgtttgtttccccatttcatcgtctctctctttttgtcgaccttcaacgcgaaatcactcgatccgatgaattatgaggagatatgcgtcggatccgatctgtcgttatattcatttcaacgtcggtggagacccttgacgatttcaaatcggagagtatgctccaatctatttcccatggtacgtatctctctgctttcatttttttcagttccttctagccganattgatgattggaattgaaaccatcaaatntcgaaattgggttttcttagatcttgtcaattggcattaatttgagtgactgagtgagtctggtagttaacgatagatttggcatttactcctacatagtaattgcgaacgggtaaaactctctgtgcttcatgtttatatatgtgatatgtccaaaatatttcagggcacaaagttcccaaagctaaatccactttgttcatcttgtgccaggtagagttacaccagagagtgtatttagttttcagttttggaaccgctccgctcgatctcatcagtggataacactttccaccgcgccccgttagctcctcttacc

SEQ ID NO: 16201 - DNA, 1791 bp, Arabidopsis thaliana landsberg
tcgaagaattgtatttttcccgtcaaaaccgtaaatcaaaattttgcgtattccaaaaaattgtggaatactatttttccttcaaaaccgtaaataatttaaaaagaaataatttattaaaatttaaaaatttcattaaaatagaaacttataatgtaaaatatataatttgaaaattatttaattgtaattgtaattaaaattataaaaatatgattaaaatgaagacatgtatattgactcaatttatgcccatgggcagcccattgtccatacggtcaagcccatattgtccgtggacaaaactggtcatatgcccaattagaccatttgttttttgtctagaatatagtccgcccatatgcatttggactggacaagcccatgggcgtcccgcccaattgacaactctaattagatagtctccaatatctattgtcgactctctacttctagattggaaacttttgttgaatttagtatttcgtttaaaacatatagatgcctctttgtctgggtattatcatatctttgccataatctttgtattatgttttacaaccttattgctaaataggatcaaggttcttgttgattttcaatttcgtttttaaatcttctccattgctcgatttctcgatttgattgttacttttgttttgactcctcttattagatgggttcatcgtcatttcctgatgaagatgtagatgggttcagactctgagtgacgctcccgtgtaacgaacgtaagctaaacatgaatttgaaggggcgggaaccaattaaaaccgggttattttataagcagacccgaattacggtttgatccttgccttggttgaaacgaaacggcgtcgtttgtttgagaccaggggtcgtggcaaatactccgcctgaagaaagaccttctctgtcaattagaggctttagtttcgtcctcgtcgtccttttttcttttggttccattaaaggtatctaacgtcggcggcagagagaaacacaatttctgcctcaacgatgaacaggttcaatactcacctttcttaatcctccattttcccttaattctatcttcggttggtttttatgcgtttttctaatttgaatcactgtctttgtaatcagtttttttttaaatttgagttgttttctttatctttagctaatcaattgatggtgggttgcttattagttctgttgttcctagttttgagaaactactgttgttaaagtttcaatcttttgtcggtgatctcatgtttgttgtgtctgtcaagttctgcaatctcttaactttataggaaattggatcccttgtttgttttgtgcaatttagattagagtccatcttggaatgttgaatttgtatctatttattactatccagcttacttggatattagagaagattattatataatgatgctatgtctaaggacagggtgctcgcaaggaatcttaggacaagtgtctgtggaacaaggattttgcagaggacttgttcgactgttgtgacacatgatgtttctacttcttgttccaatgtaagatccctctccttgtgagttcgcatatcttgtcttggaagaatcaggaaagatacttgtgatcttttgcatgttgttgttgtagcaatatatcaaaaaaattctgtgcagctgttctaaagtcttctttggtcattgtgatgatgtagagtagtttttcatgtttgggacatcaataatatttagtgtgatatcctttgcttaatattaaagcaatgtcatgttcgtaaaagtgatagtc

SEQ ID NO: 16202 - DNA, 437 bp, Arabidopsis thaliana landsberg
  unsure (1)..(437): unsure at all n locations
gggaacaacaaacgttagtttttgtttgtagacaaagttttgcttcgccaataaggcccccaacntttgtacatttatggccattttggcctcgtccctttcattgagaccgagtgtacgtccccggctccacccacgtttgtgaccaacaccaagttaaagtatgagtggccgttgatcgtgaaccttatcccaccacttctcttgcaccgaaccctatataacacaaaattatttaaataaaaactatatgttatgaaagttttcaatatttatgaaataggggtaatgagaaagcaccactagcaagtttggtatgtcactattattcagttttgggcctattaaataatttaataccttatttctaccacatgtatcaactggtccaaaagtattaaatgcgtatttataggaccaaaagctgattataaatg

SEQ ID NO: 16203 - DNA, 662 bp, Arabidopsis thaliana landsberg
ctcactgttatcatgaggcagtttaagacaaagactgggaaaagtggaatgctgctatgggagaagaaatgagttctttactcaagaatggcacatggaatctagttgataagcctggagataaaagatcattggttgcagatggttgtttaagctgaaaccatgtattccaagtgtagaagctcagagatataaagccaggcttgttgctaaaggttttactcagaaagagggcattggttatcaggaaatctttgcacctgtggtgaaacatgtttctataagatttcttatgactgtagttgttaatcttgaccttgaattggaacatatggatgtaaagagagcgtttcttcatggagacttagaggaagagctttacatggaacagccagaaggttttgaatcaccagagagtaaaggcaaggtatgttttctaaagaaatctccactacaagaatattgagcatttatagcattttattgtagcagttaaccgtgttctgctataatttactaaccagctaaaatgttatagcgtttgataatttcaaaacgctatactatcttaccccgggaaataaaatgatgcgggtcaatatttttagattaggggttattattcgatagcactaatctacaaaaaacgctacctaatagag

SEQ ID NO: 16204 - DNA, 976 bp, Arabidopsis thaliana landsberg
agaatgcacacacaatattggtttttttttttaagttagtttactgatctcttcacaacagagactttggatatatctccaccaagttcttcaaaaagtactaacaagttcccttttggcttcaaccacgaacgcggaacatgatacctacatacaaaaaagactcattttaatactagaagagagcttaagtagctcgaaaatgtatagttaagaacaaagcattattgttaccatctttgtgtcggctcgccacaaccagactggcatttgttctgcctgtatgttccagcgtagttacaacttccgcagtctcctttggcaaatgccatccagtatctccctatgctttgcccgtttatccaagcttgccctttccccatactctttagatccaaagccagcggctcgttccctctaggcgcgtcaaaataggcctgcatatgtgataagcaaatacacattgggtcaacgtgaacatgtttcagcttgtcatgtctataggtctactataactagactcaagacttaatattacagattattggttaaaaagggcttggacaagtcagagtttcttatttaccttgtaccatgtcaaaggttgtttgttttgcttagccaatgagcctttgatccaatcaacagaggagtcctcagtaggagagaccaagttcattgattcccctcgcagaccagcctgttgaagtacccgaaaaggcggaaatgttatttagtttcggttgttaactatccatgagagtttcatcttgtaagcattattgaatctcacctgataagtccatttctgccaactcaagtctttgttaccctcgtcaaggccatgaagcgccacagacccgacgattcctgtggcccacgtctcaaaatgtggtccaacattcttcacaacacacaaaaaggaaacaatatttatcagtctgcaacagaaactaaaacaaacatgcagtttatt

SEQ ID NO: 16205 - DNA, 1048 bp, Arabidopsis thaliana landsberg
tttatctactctataatgctatcagttatctacatattaatggaggctcattgaacacggaattgaagagttgtgcaagacatgggatctccattttaattgagcttttaaattggtcaactgtaagtcacaggaggtgcttgtttctggattaatttgaggagataatactgaaagggtaaactttggtcgctagtggtaacaatatgtatttggtgcttacgtcaaaataactaagcatgtactggttttatacacatgggaaaagccaaaactgttgctaattcattgtttccgttttaggaggattggatttttatgctggggagacgattgggtagccaagagaaaacgaaagttaaggtagagtgtctctctctctctctctctctctctctctctctctctcacacacacacacacacacacacaacctaaacaaaacacaaaacactcaaacacaacagaaaacagagcaccaaacacgcttacataaagttaaacacaaccaaaaaccagaaaacaaaacacgaatgcacaaaataatcaaacacaaccaagaaaaaaaacaaaacatagtctctttataaggaatttgttttcaggctttttcttgtttatattaaatccactatgactctaacgtcaacccctggtcaactaagttataaagttagcgactcgagatttcatttaaaaagctgacaatttatagcttgtaagcaagatggttgagactgggaaaccaagtggaggcaaataaagatggatttgtatggaatgagagttgaatcacctaaaggtgtcaaggtacacttataatcgtttatgtaatttgactatgtccttctttcatacctttgtggtattaatatcttattcatcttttcatttttagaatgcagaaatgggtcataaagagattgaaaacagtaggttctcatgtaaaaccagaaacttgagctctccgcatccaaataaagacttgaaagattgctctcttaaacaaaggttcttacctctttctaagttttttcacatttttcgt

SEQ ID NO: 16206 - DNA, 951 bp, Arabidopsis thaliana landsberg
gagccatgctgtaagtaccaactcatagtacttcctgagtttacaagttccctgagatatctttcataacttagatgcattgtgtcatacacgtagttagctcggcacagagtatgggtgcttgtacgtattcatatctgcatatgccactagaaaaactaatggtcattgatcaatacaagaagatcagtttcttcaaggtaagatcaccattgatgcagatgttttgtcaaaatatcttatgaaaactctgttttcttgcgtttgcgattagatgataaagatacaataaatggtatgatggatgagtaacagaaagatccagaaatgaattgatttctagttcgagatatttccttagctttattttggttgtttaaaattgaattctctttgtttataattgttatacatcgttgtcgttttgactcatgtatctttactttaacgtcatgtaacaagaaagcaattacgcgtggggtcttccttttaggcataatcttgtcattttggtatatgctttgtatcaatccatgtcatgatctatcctaaaacgtcgtcgtttatgccatggacggtgtagactggtagacactcatatctcactttaaccgaatgtttccgaagaatttcagacaaaaaaaactgatgaaaaaaatgagtttgcatcagataatgctttttgataaaggggtttcaaaagtggaattcttattattttttcgccaatagtggattaatttagtcgttgagatttttgcttcaccgctggtttattggttctaatagaagttgtatttgattcttcacccaaaagtgggaccgggttatgacccaataattaagctcgggatgtggaggttgcactaactaaatttcaaactttcttgagaattaatttcattattaaaaataattttcttcttttaaagcctaatttcaataatggga

SEQ ID NO: 16207 - DNA, 876 bp, Arabidopsis thaliana landsberg
ctttagaaaatggcgaaaacaaagattccacgacggataagcctaaaatttgactaattaagtatggtaaaccatcttgttgtgtaagtgtaaccaggggcggacccacgttggtcttgggtggggcatgtgcccgatactcaattctataaatcttatataagtttgcattatgtaattaaaaatgtatgtagtgtagtggttttttacttaatggtgccccacattaacccaagtttaagccttgctgatgtctatttattgattttttataactgtgccccatataagattatttcctggatccgccactgagtgtaacctatatgcttattaatacggttgtaatcatatgttttagaagcggcggggtagagtttttttgtttttaaatttaaaatcggggtttgtaatgatgaagagttagtttaaaaggtttggagaacttgtcttttgaatgaataatgtatcaaagctagttggttttgtgatctgactgataaagtttttagtctcgcaaaccggtattactgcctaaaacaacgtttttgctttgcggttgctgcgttaaacataaaccgcaaactctcctatgttttgacttttaagccatatgatgagtccatagacttaataagttggaaagagatatggtctattcccatagatattgacatcatcaggtataagatatagtgaggtaagcatcattggttgtaacctttggtccgacaaagaaggtccacacaacacactgctccattgctgcagctcaatgaactatagtgtcttcaccactaaatcttaatatatgagattttgtaatcggaacatcatcattgactttgaaaagaaaaatactatattccgtatggt

SEQ ID NO: 16208 - DNA, 2754 bp, Arabidopsis thaliana landsberg
  unsure (1)..(2754): unsure at all n locations
atgctaattaccaacactagagttgggcgaaacacaaaagctctggtctctggtgtgtcacagagagcggtaagacatcctgatgcgatgaagtcagtgttcaacgccgtggattctataagcaaagagctcgctgcgatcattcagtctaaagacgagacctcagttacagaaaaagaagagagaataaaagaactcatggagatgaaccaaggtctgctcctgtcaatgggggttagccacagctcaatcgaggctgtgattctaaccacggtcaagcacaagcttgtctccaaacttacaggagctggtggcggcggctgcgtcctcactctattaccaaccggtaaactttgtcaggaactttcaatcatcctttttgtcaatttcggttcttgattcttaaattaacccctctctgcaaaacaaactcgtttcagggacggtggtggacaaagtggtggaggagctcgagtccagcggttttcagtgtttcacggcattgattggtggtaacggagctcagatttgctattgatcaggtcggaaaaatcatatttggcctctcaccattcttaaacttgctgacgtgtacgtcaagaaggctgcaattagaaattcaaagagtcgattttttcttataaatgatgtgttgaatgtaaaattgctttattattataccatgtgacaaataattgaaaaaagcaaagattgtttagtttttttttttgtattttgaaattgttatgtttcatgatgggaaatataaaatgacaaagtttttacttagattgtcacattgatcacattatttcctcgtatattcatagtttgtccaacttcatcatttcatagatatcaaaagctggtcttttggcatgttcatgcattctaagtaacaatctgtataatggtaagcttgcaagaccaagacgatgcaaatctctaacatatgcagttgcttcttcaattttctcctctttctcaaagtactcggcaatcgccatgacgatgttatgggatggcctccaatgacaccgcctcattagtacaaacacttggtgcatagcatcaatggctttctccatattctcacatttcacccatccctccattaagatttcccaggtcttgtagtttggagtacctcctctctccaacacacaaccatgcaatgactcggctttccggatttctccattacgcacataagcacccaaaagaacattggagaccctaacatcatagttaaaacattgagcctcccactcactaaacaccctttcagcctcttcaagatcaccagttttcaccaaagacgacaatacacatatgtagttcacacaactaatcctaccacaaaccgatttagaaacttcccacaaacgaacaactccttccttattccctaaagacgcataaagcgtgataagaaagaaatatccaagcctattacttctattcaacatcttttccgcatcctcaagcaccaacctagccttctcatcaaaaccactcttaatataaacattagctaaagtacacaacgaactccacccaacttcaacactcttatcaccaaccatttccttataaaccgtttccacagccgcaactccagacacttcacaacatgcattcatccaaagattatacgaaagaacgtttctcggtatcttattccctttcatcatcgaaacaaccataactactttctcatactgaccactagcttcataaagcttcatcatttcgttaaacgggtgtggagtaacaagaaaccctaatccattcaacttctccattagagcttccgcttctttaaccattttattcttcacataagcacgaagaagcggaagataagccgatttcgctactctcatagacacagaactatgtaacagcttctcaaaatactcctctccttgtttcaagccatgagttttgatgatcaaatccaatctaagagcaatgtcataaacactaaattcaatatctttttgattctccatccactccatcatctgtatatacacacattactggcaaaatcaaaatcaaaagcttagttctcagttttaattaagggaaaaatttcaaacctggagagcgagatcgtaacgatttgatctaatgagacgcttggaaatcaatcggagctccgataaagagacggcatgacccgaatcgatccgttcctgaagcagagaggtaacgctgcgtcgtggaccgttctttctcagtatctccttcaagctattccgatttgcgactgatgacgtgtccgaaccatctgcaagtgaagacacgagccttgatactacgccggtggtgttgaacctcgtcttcgcaaccgcaacgcaacgaatcagcatttggattttggagccgccgcgaaactggttcggtctttctcgagaatctcagagaagagacggtgagagtggatttgggccgtattaaattaagttgggcttacccggcccatatcaatagttataagcccgtttaaagaaccgacgtcgtatggtcaaaannnnnnnnnnnnnnnnnnnnnnnnnnnnnnnnnnnnnnnncgccgacttcgttttcttcgaatccaaatttctgcgtctgcttttgattcacagagaatgagcaggaaagatgatggatatcaatctatttcgtgaagagaaaggtaacaatccggagattatccgagaatcgcaacgccggagatttgccagcgtgagatcgtcgatgagatca

SEQ ID NO: 16209 - DNA, 819 bp, Arabidopsis thaliana landsberg
ctccaacatcaacttagcatctcttgaggtagtcagaatgaattattgctcgcgattgcttatctgttttccagatatctcaagtaacatcaagactcttagtgtcggaaatacaaagatagaaaatttccctccatcggttgctggatcttggtctcgtcttgcgcgccttgagattggcagcagaagcctcaagatattaacacatgccccacaaagtataatttcgctaaatcttagcaacagtgatataaggaggattccagattgcgtcataagtctcccgtatctagtagaacttatcgtcgaaaactgcagaaaactcgtgacaattccggctcttcccccttggctcgagtccctaaatgcaaacaaatgtgcatcactcaagagagtatgttgctctttcggcaacccaaccatactcacattctacaactgtttgaaactggatgaagaagcaagaagaggaattatcatgcaacaaccagttgacgagtatatatgcttaccaggtaaagaaatcccagcagagttcagtcacaaagctgtagggaattccataactatccctctggctcccggtactttcctggcttcctcaagatacaaggcttgctttgtgattttgccagttacgggctaccgatgtcatagtataagttgcatcgtaagtagcaaagcggggtttgcaatgcgcatctgcgacttagcacggctttcagattggtctcctgggacggaacatctgtttatatttcacggtcgcttggtttatcaacgaaacatgattttgagcgagaatatatttaagttcac

SEQ ID NO: 16210 - DNA, 897 bp, Arabidopsis thaliana landsberg
actggatgagttttagtacatttatggcgtctggttctgttttacatactaatcatttctcttgagttattcatttatcatctaatgtgcttatgattttgttattccgattttacagctaacaagaatagaatatgtacattccaaaggatatctgcatagagatataaaaccagataactatctcatgggcctaggtcgcaaagcgaatcaggtttatctaattgactgtggacttgccaaaagatatcgtgatgccaacaccaaccgccacatcccttataggtatttatggccatggttcattatgttgtgtctaccttgtagatcatctgcaggtcgtaaattatcttatctgttataagtttttaaggtcacattatacaacttattaccttttatttggttgtattcagggaaaacaagaatttaacaggaactgcacgatatgcaagttgcaatacacatcttggtattggtaaggaatgctgccacttttttctcccctttgtgaagtaaagtctttgctcacatatttcgatttctctttcgcagaacaaggtcgacgggatgacctagagtctcttggatatgtgcttctgtacttcttaagaggaaggtgtgttgactttttgacttgaaagaacctagttaacattgtatttttggcaggattttgtttttccttgtttgagatttacttaaccgttttcttgctctacactgtgttcctaatttaatgtacctccttttctagccttccatggcagggtcttaaggctgttgacaagaagcaaaagtatgacaacatttgtgagaagaagatatcaactccgattgaggtctatttccctctactgtgatgagagaattgtttttatgttaatcctcattcaa

SEQ ID NO: 16211 - DNA, 3034 bp, Arabidopsis thaliana landsberg
tatagctcatttcaaattttctcattcccgctagcctagtagtgtgtcagacggcaacataatcttccgagagattttttttggagaagcgtgatccaattaaaaaaagtattgggaagaactctatctgaaattatctaacagtcgcgtcttcatgtcctctttatttatctgttctcatctctctagaaaaaactgaagagacaccgtaacccgaagaaagtcgaagagaataacgcttacaaagtagaaactcatctggatcgatttataagcaccgtcccgtaagcaccgtcccatttggagccggtggatttctcattaaaaggtattgattggatttcaattcggcttgggtagggtttttgtcgctgctgtcgaccgcgcttacaccattgttttgtttccagatggacgacgttgaattaccgaaccggttggttgcgtttggagaagagccgcttggcaaaagggttaatgtgtaccacaaaatcaaaacactgtcggggattataaacgcgcttgatgaacaagagcgatctttcattctcaacagttctttggggggcttttagatttcccgaataaaccggcgttttcggcgagttttgggctctttttactgagtaggcaattggaagttgccaacccccatgagatatgggttgttttcgccagtactccggtccaattttcgttaagggagtttaagattgttaccggtcttccttgtggcaaatatccaaaagttcaaaagaagaagaagagaagaaccggtggtaagcagatgccctactacagtactttgttcggtcttgaagaagatgttacagttgagagggttattacaatgcttatgaaaagggtggtaacggatcgcgatattaggttgcggtatgcttgtttggctcttgttgatggcttcttattgcctacatcacactacccaaaaataatcaaaaaccacgccgagatgtctgaggatctccaaggttttctgtcatacccttgggggcggctatcattcgagatgatgatgacttccattaaagagagggaagttgagcagcttgcgactacgtgtgtggcggttcaaggtcttttattcgccttgcagctcgttgtccttgaagcaccccccgcaattgaggaagggcctccaattgatgaggtgtttcgttctgactcagatgaagaagcagccgctggagtaggttcgcgtcagggagttgccctcaagctcgggaacgctaaagatgttgatgctaaatgcgaggtaatgatttcggacgatcaatcgataacaaatttgttatcacattaactgtttctttattttagggtcacagcttatgttatcccggtaagatttcatattattatccggtaaataaattaatcattggtaaatggttatcattacaattatagtataactggttatcgtcggaaagttaacattacaagttatagtatatgttacacgctaataccccaatgattactgcaggttcatgtagatcctataattttcccggattcccggatgaatcctgccgaagacttaacatggtcggacgacgaagatgatgttagagtcgagaacatcgtgaggatggccgaggaaggcaagcctttttctaatgatatgtttggtggcggttgtattccatttgaagttgttgttgcgtcaaaaaaaataaaagagagatggtatagctaaggtagtccgtggtcgaaaaacacaacccaatgccagaccagctgctggtctgagaaggaaaaacaaaagtcccatcgaagaggaaggtgagcggtctggtggtattgatatcaatgctttgacccgaatgattgatgaaaaactgaagtctcaagctgagaagattatcaaaggggtgattcgttggttttcggaaaatttgagcgttgatgccgggaattcaaaaggttcggtgtctgaggaacagggtactcaggctgaacaggcggctgccgatgctgatgaaaattccaaccctgccaatgttgaccaaacggttgcggatgctgagaaaaataccaatcatgtatcttctccggacctacccaacgaaaatgctgaagcggatgttaacactattccccagccgcgtcatcccgttcctatggagactgatttcacccttccatcgtttcagggtgaccaagcggtagcagccgtagatgacgtagtttctttctataactccgttgatgtaccgacctgctctccacgcggcggtaccaatgtaaatggaaagaacgatgttcaggatagcggataactttaatatatgctaatattggttgtagccgatatttttacaatttggatttattttggatattctctaattctcgccgatctgtagggcgaagcgttaatggatgatgattcaactaccgtcgaggatgagctggtattatgttagtgggtaccactgttataccttaactgttagattatctgttagattatctgatactctgtatattacctactaactaattgccttcacacgttagtctatggaggtcaatgctgatgttcacgatcatattggcgaagacgcggatcgccaggttaggttttaccatgtgtgtaggaataatatttgtataatacctactaactacttcctcttcacgttaggctatggatgtcgatgctgaggtgcacgtgcattctagcaaagacgcggatcgccaggttaggttcaaccatttgtgtaggattaatttatgttcggttttttacatataacgctagttaagatcatgatcacccaccttgcataattgacacaaatattggaaagtaaattaaaatttatcaagtaaacaaaccgttaactgttacaatttttggtgctggtatatacctggctatattttttacatatagactgacgaatgatttcatgttttagggcgacgctgtcatgggagttgacctaacgacgataattaacgatcaggttagttggtaacgtagatcaataaatagttatag

SEQ ID NO: 16212 - DNA, 810 bp, Arabidopsis thaliana landsberg
acgtgggtctcaaggcatctcttaacttcaggattcagaaccacaaaatgaagcttgtcgagatggaaggctcacatgttctacaaaacgactatgactcgcttgatgtccatgtcggtcagtgttttggtgtaatcgtcacggcagaccaagaacctaaagattactacatgattgcttccacaaggttcttgaagaaacctctgacaaccacaggattgctccgctacgagggaggcaaaggtcctgcgtcttctcagctacctgcggcccccgttggttgggcttggtctttgaatcagtaccgatctttcaggtggaacttgacagccagcgccgctagacctaacccacaaggctcgtaccactacggaaaaattaatatcactcgcaccatcaagctcgtgaacactcagggaaaggtcgatggcaagcttaggtacgcgttgagcggggtctcccacaccgaccctgagacacctctcaagcttgctgagtacttcggcgttgctgataaggttttcaagtacgacaccatctcggacaacccaaatcccgatcagatcaagaacatcaagatcgaacccaatgttcttaacatcactcaccgcaccttcattgaagtcgtgttcgagaaccacgaaggagtgtccagtctggcatttggacgctattcctttgctgtactagtaacaataatatttgcttgtacaaagtaaccatctctaacctaattttaatatcttatgacaaaaggtaccaggactgacaccagaaagagaaaactacaaccttttaatgcatgagccg

SEQ ID NO: 16213 - DNA, 1913 bp, Arabidopsis thaliana landsberg
agctgataaaactgcaggaattctagtagttcaggcggatgcttctgtggttgtatgtgcataattttgaagaaccttctcagtttcgtgctttcttttggtttagaatctaaaggtgattgttttgatttcactctaaaggtccctggaagtaagccggagctgaatgctgttgagatagctgctgcttactcgtcactttctttcggcgtgggatactatgggaactctatagagaagccaaaggtatggccttcctcttagatacacacagaaaaacttgtcgtcgttaatggtggagcttaagtttaggatcattgggtctcttgtttatccttggacagatttcgattctcaggacgaggagacagatgagtgaggctggggtagaccattttgaagcccggattgatctccgcccaacctgttgctgattaatttctgaagttttggtattttgtggagaaaagtttcagaatctgtaacataggagtcatgggacacaccaaaatgacttccaacatcaatcgtaatgacttcatccttaagctatcttccaagacttacattacgttaaaagatacatttgataaagcaaaaatgcttttgccaatcaccacagttgcttcatggtagttctactcccaaaatgaacaaaagctcacacacaaacttataaagatccaaataattatctagcaaagccgcaagataatcagggaactcacaatctggataaggtaacttctaaaatcaaagaacaagaaccgaaataatattatttctgacttaacgctcagcaaaaatcattggcttcaaaaaaccaaagtaagatttgtttatttaaaaaaaggcgagcaatcatctttgaagtcactggaagttgtgaattctcttggctgatgttaaagtgttggatataagcatggctatggtcattggtcctacaccgccaggaacaggtgtgatggctgatgcaattttgctagcctccacatagcaaatgtctccaaccaatcgatatccaccggcagcacttggatcctgcaattcatattactttcacatactgtatttgatttgatcattcattatattaccatatgtcaaaaaattccactcacctcaacaggtttaataccaacatcgatgaggactgcgcccggttttatccagcttcctctgaccatgtttggctgtccaacagctgagattataatatcagcttctcttgtgatttcttcagggttcttggttcttgaatggataatgctaacggttgcatcctccctctacaaatacaaaacacaacaataaagaccaaacatgtaactaactttcgaatgtcacaaccagaaaaaacggcatcttaaagaaggtatcatcatcattacctgcagtaaaagagcagctggcataccgacaatgttactccttccgataacaaccgctctctttcctttgatttcaatgttgtatctatgcaacaactcaatgcatccttttggagtacaaggaacgaataagggttctcttccacgcatggcaagccgtccaatatttagcggatgaaatccgtcaacatctttctctatactaaccgcattcagtatgttctgttcatccatatgctgcaacaacatcccaaaacactattgtaattcactgtttatttaagttccgaagaaagttattagactttgtttaccgatggcagaggcaactgaacaaggattccatggacagaaggatcatcattgaatcctgatacagatttcaacacctcttcttctgatgaatcttcagctagacgaacttcgaacgatttgattccaacggagtcacaagctttcttcttgttcctcacataagttgcagaatcttttctgtcaccaacaaggattactgctaaa

SEQ ID NO: 16214 - DNA, 1484 bp, Arabidopsis thaliana landsberg
acaatcccctcgagattttcctactcattggaattcaacatattatatgattgttgattctattggttctaaacattgattgtgtagttttattcaacaaaatcgcagttcttgagctttatggcccactcaacatttttattatccggtgtttattatcctactagtcattttttttatattaagaatcccaaatgggcttatggaagatgggccaaacgacaaatacacggttacaaaatgaatgaagcccaaaacgaacccaacgaaaacaagatcagaaccgtgcggtacaccggaaacacgaacatcgctttctagaaccgacgctagcaaggacgactcctttgtggctacgacctcgacatcaaacttttggcttgagctagcgaaccccgccgcaaatcaacgccaagaacaagcctaaactggaacaatcctttcggaaaagggagaaccaccacaaccgagacccaatccctcctctccccaatctagcaagacgaaggattcaaaacttacccccatctccactgatgctcacccaaggacctctcccaaagcaaacctcacttcagatccggctaagggaaaactagctacggcagagaagacggtcgctggctcaggcaagccatcatccaccaagatccagctaaggaacacccgcagatcgccatctaggatccgaccaaagatccactgttaatctcgtcgcaaagaggtgaaacccaccgatctacagtccgacttctgccgctcaccggagctacagctcacaagctgtcgagcctaaagaatccattccaatccgctagcgtccatgaccagcagacgaggaacatcatctcatggctgctgtgaggagagccatcaattcgcatcgaaaccatagatccaccacaccacacaccaccggagaagaaaggcgcccactcccgtgtcagccgctaacctaaccttcgtcgatgaagctccttacagaggcggccatggaaaaaccctagatccgaaaaataggttaagaagagagagaagagagaggaacgattgtccttttttccaaccacggtatctcctactagtcatttacttttgtatgaatttgttaatattgctcatgtgatgcatgaacatgaaaataatactgttttgtcatcatgcataactagtatgagagataaattgttaaaatactatagaaaagttccacctcttaatttgcttgcatctgtttttgatcctcgaactaaatttgatggtttatatgattatctcgtcgctattatgattttttgcatttgtttgatagtattagttttccaagcattatttcaactcaagaaaagatatagaaaatttgtatgatgcatattatagattatatgagcatttggtaccactacaaataatatcaacatttgatagccactgtaaagatagctcatttttctgttccctgctattggtaggggttttttttt

SEQ ID NO: 16215 - DNA, 480 bp, Arabidopsis thaliana landsberg
gaccggtttatcggaattgtatgcctactggtgttaaccacatgacgtcctatactttgtatatgtggtcattcaatacatttacttcgtgtagtttgaatttactttgacattgatttgcgttatgaacattgaaaatgttcgaaactggtagatattaatgatcccatgttgcgatagaatatcgataatggtagatattaacaaatatataatctggatgaaatggctagatattgtgttaaatgcctatatagacgcgggttcgaatcctgcatgttgcaaattttgtaacattctatacgctcataacgcaatacaacgtctttttagacacatcataattcacgtggctgttgactcaacatttttcacggagttgactaacacccgatagtttgactatgaattttgcactttttgttaagttgaggtaggaaattcatatcaatttctggtttaggtcttaagattcctaac

SEQ ID NO: 16216 - DNA, 1006 bp, Arabidopsis thaliana landsberg
aggccggcgggtggcatcaactgcattgttcctctcggatagaagaagaagacgccgccttgtagtttctgttgctacatccattcaagctaacgaaacaaacttgcattgattgaattcagcagttttccactccaattctcttagtaaggttttgtttcatctttttattcccaggaccatattctgatacgcacaaattccaccaattatatatgctttattcctttgaagtccttttaaaaatattatgttacctcttctaataaatctatattttagaagagaggtaagtcatgaatgtgttggccctaaaattgaaggcatcatattcacgtacaacagaattatattaccaacctagttatagatatatacaaaaatgttacataaatttcatgaaaccttagatgttgatgtacccatttgtaacaaacattatagtctctctagattttaaaacataaactgaaaacccatctataaggaagactaaagaattttattttaaagcaggtcgattaatcaagtcaagatttgtctactacttttactccgtggaaaaaatgcggagcaaattataggttaataactttccaaggtgtccgtttcctctaacttctttatgtttagatgtgaaagcttcaaaactttctctgtgtcagtaagccaacttaagagtgttgtcacttgcctattgatagtaagctattggggaatcatctggctcttcaatggcaatttcttggttattgagtgtctcagggtgtgctaaggcaacaaagaaagctttattttctaaatcttgacgaaaattggggtcttgttccattcttctccttgtttttttagagcatcagcaaatttaatcgactcatcccggttatacaaaccattaattttaccccagtttgtgggggcggataaatataacctacagaggtaattatatgtgtattattaccacttcataatgttttcttttaaatgtcgatcttatggacct

SEQ ID NO: 16217 - DNA, 1673 bp, Arabidopsis thaliana landsberg
ctagctgactttatcgttgaactacctactaaagaagctcgagagaatctgcttgatacaaattgcctcctgcacgaggacggctcatcatctaaacaaggctcgggtgtaggcatctgtcgcacctcacccacatgcgaggttctcgagcaatccttcagactaaacttcgaggccaccaacaacgtggcgtaatacgaagcgttaagttagcttgggggctgaagatctcaaaaatccgggctttttacgattttcagctcgtcgcgaatcagttcaacggtgagtacatagctcgggatgaacaaatagaagcttatatagctcatgtacaaaatcaagcgaagcaattcgacgagtttgagttaaccagaattcccagaggagaaaacacggcggccgacgccctagctgctctggcctccacatccgacctgaacctgaggagggtgatcccagtcgaattaatcgaaaagcctagcatcgagctcgacaaagaggaacatgcttttcccgtgcagagtgccgcgaattgcgaagatgcttcgaagtcgaatgacgtctcagacttggattggattcaaaatggatagaacccatcaaaagctatatatccgaaggaaaattgccctcggacaaatggaaagctcggaaactcaaagctcaggctgcacgtttcgttctagtagatgaaaaactctacaaatggcgattatccggacccttaatgacatgcgttgaaggagaagcagtttgcaagatcatgaaagaaattcacggtggctcgtgcggaaatcattccgggggaagagccttagccatcaaaataaaacgccacggattcttctggccgataatgatcaaagactgcgaaaagatttcaaaacgatgcgaaaaatgttaaaggcacgcgccaacaatccatcaaccagccgagctcttgtcatcaatcgcctcgccgtatccattcatgcggtggtcaatggatataattggacctatgcatccctcgaagcagaaaaaattagttctcgtcttgaccgattatttctctaagtggatagaggccgaatcttacgccagcataaaggacgctcaagtcgagaacttcgtgtggaaacatatcctatgtcgccacaggataccttatgagatcgttacggataacggctcgcagtttatatcaacccgcttccaaggcttctgtgataaatggggaattcgacttagcaagtcaacaccacgatatccccaaggaaacgaccaagccgaggccgctaacaaaacaatcctcgacagattgaaaaaccggctcgatgctaaaaagggctcgtggtccgacgaactcgaaggtgttctatggtcgcatcggacaactcctcgccgagccacaggagaaacccctttcgctttagtctacgggatggaatgcataattccggccgagatgatagtgccaagcctacgacggagtctatcccccgagaacacccctgataacactcaaaggctccttgacgaactcgatctgattgatgaacgaagggattcggccctggttcgtatacaaaattatcagaatgaaacggctcgtcattacaattcaaatgttcggcaacgaagattccacgaaggagatcgggtcctccagaaagttttccagaacattgccg

SEQ ID NO: 16218 - DNA, 1971 bp, Arabidopsis thaliana landsberg
cccgttgatcttgctgaagctgaatgttctgatattttcatccattacaggatccggggaaccttggttagcccatggacccgctctccaataagtctttgagcctctcatagtcacgcctgggatggaacttgcggtgtaatctgaaccgtaaaatcgccaggcgatggatcagtgtgacttttccaagaagtcaacacccgcttctcacctgtggcaagattatacatcaggtttgagaaaggtagcatagtgtcaccaaaatgctcaaagctttcccatagagttcttcccgaattattgtctatgacaactaaatttccgttgtctgtaagctccgcacgagacccgttagatgcaaaagtttctccaatggaccacacaacgctatgattttcattaaacaacagaagactaccattgctgctgataccgcgatttgccgcagagtctgtaacaggcttttctctattagccacccacacaaccacctggggaatgatactcttgaaccaaattccgagatactgattttgggagttattaagactgaagaatcccaattcataaacaccattagaggagctgagagtttgtccaattgaaaagggactctctttggttatccctgcaaagctaaaactcataaagatggtaaaaaagggcaaataagcaaagaacactatcctcttcttccccatctggtttttttcctctccaaaaactatcttcttcagattattttaagaagcaaacagagtaagaaagccaaaacaaaaacacagagggacttagtgagaactattttcaagcacctataaacaatgttgaccagatcaaccacacttatctttatacaggatcaagttaaaccctatttaatgaatacaaacaaaattttatcaaaatagttacataacttcaacaaacaaagtccaactattttacccattcaaatacgcaacattgtcatttccatgtccgtttagcttcttgcgctgagaaccagtgaaagatagccaccgatactctgcaaccatatcgaaagacgagaactttcacaagtctgaatccattgattgaccgcagattaaaaatcccgtgatgttcccatgttcttgtcgccagctcttagtttccagaatctgcaaatgataaacatcaacactcgtctttaaatgttacttgattcattggaacagctgtcttgaattggagactacattaattctcgttcaggcattttaccgaacatttgaaatgcataatcaaaactttcagagctccactagtgcccaattccatctccaagactccaaccatctgggcgactgggcgtgactgttttctccaaaatagccgaagaattctacagtcaatattggtgtgccagtttcgccggagagaagaagacgacttcaacagtcaattctacaacactagaatttcgaacacaagcttttctccaaatccaaactcgaaatctgaaccggaccacaaaaaaatacaaaccgaaccaaacacattccgaatcgggtcgtattttcgaatattaaaaggtccaaaatacgaatggccaatataagcccataaggcccagtaaaatattattcccccccccccccccacccaactcaactcttaacgattatgtttttgaatttgaaaacaagcgtaagcacgagagttgagagagagatagagagatttggagatcgagaattcaggtgcgattctatgtcaaatctctattttcaaggacatgcttgatcaggttctactcttctccttcttcttcttcactggtatggtttctaggacatgcttgatcaggttctactcttctccttcttcttcttcactggtatggtttctcgtctttagcttaatttgagctgtgatcgaatgacactgatcaatcgggaaatcgaagtaaaacacaagagatgcttacgaaacaggaactggata

SEQ ID NO: 16219 - DNA, 815 bp, Arabidopsis thaliana landsberg
ctcagtggtagagcaattgactgcagatcaataggtcaccggttcgaacccggttgggccctatatttttcagtttaccaatattttttataagagctttattaatatatttgattaacatttagcgtctactagttgactaattttatattataaggttttttctcgcaatttttcatcttgaataaaaacattttgacaagttttttaatataattcattagcaactgaaaatgttttttttttcatttcatggtttaatttgtttgtgaaaattgtttttgataatttatatgattactaaataagtaaataactgacttggatatattagatttcttagcaaaaaataaaataattaatagataaataatttatgattttgaacttattaaagtaataagggttcataactcagtggtagagcaattgactgcagatcaataggtcaccggtttgaacccggttaggccctatattttttagtttaccaaaaaaatttaataagagcttgagttatatatttgattagcatttagcgtcaagtagttgactaatcttatatttcaaggttttagttagtaatttttcatcttgaataaaataaattttgacaagtttttgtatataattcttgagcaactgaaaatatttttttaaaatttcatggtttagtttgtttgttatttgttttatgaaataattatgtgatttctaaataagtaaataattgactatattagattttttagcaaaaaaacaattgacgaaataaataatttacaatttgaacttattaaagcaataagggtcca

SEQ ID NO: 16220 - DNA, 915 bp, Arabidopsis thaliana landsberg
gggatctactgaataaggcaactaaggaattggaagtggctagtctcaacattactttgtttgaggaaaaggctcagaggatttcagaggtagcgatagcacttaaggatgaagcagccagtgcgtggaacgatgtaaaccaaacacttaatgtggttcaagaggctgttgatgaagagtctgttgctaaagaagctgttcagaaggctactatggcattatctctggctgaagcaaggctgcaagttgcactggaatcactagaagcagaagggtacaatacttctgaagagagtgaggttagagatggtgttaaagataaagaggaagcccttttatctgctaaggctgacataaaagaatgccaagaaaatttagcaagctgtgaggaacaactcatgcgtttgcaagttaagaaggacgcgctgcagaaggaagtagatagattgaatgaggctgccgagagagcgcagatcagcgcattgaaagccgaggaggatgttgcaaatatcatggttttggccgaacaagctgtggcatttgagcttgaggctactcaacgtgtgaatgatgcagagattgctttgcaaagagcagagaagactctttttggttcccaaacccaagaaacaacccagggaaaggtattggatggaaagaatactattgttggtgaggatgaagtcttgagtgaaattgttgatgtaagccatcaggctgaaagagacttagtagtagttggagtttcatcagatgttgggactcagtcttacgagtcagataatgagaacggaaagccaactgcagattttgctaaagaggctgaaggagaagcagagaagtcaaagaatgttgttctgacaaaaaaacaggaagtgcagaaagatctgccaagggagagttcatctcataatg

SEQ ID NO: 16221 - DNA, 2134 bp, Arabidopsis thaliana landsberg
caacatctctatctcctctcttcttatctgatgatctctcgggcgaattgttttcccaagcttcttctcgcagaggttatatcggaagatgagtcatctaggctatttgcgcatcattggaaaatcagaacttctaggctctagatctggaccatcaccaatggcacaaacagtttgtactcaccgaatttcgttgatggcaagagtatctcttggaccgtcagttgcgcctattccggtgagttcgtcgacggcgcacgacgtctctcaaagctgtctagttgctccccttgctttcctcaggtctgtgtcgttcatcaacttgccaaattcaattctaaagatgtcctgctcaattatgactggtagtggacgccatgttagggtagtagtgatatctttaggctggatttgtcactatcaatcacgaaacctgttgaatcttgaagttttcttgctatccgatgaaaaattatctttgaagcttcttggattaatgctacactcgacccatagcttgcgtgattctggtcaccattttgcccagttgggagttcatagttcgagtaacaactttttcaagttcaagcttaatcattccgcctcatacttattgggcgatgcatatcaacactctcgaaccattttggagaaaccgcctcggtatgttcaatctaaccttatctcaagtcctcttaaatcggatattcattgccttggattgaatggacgtggactacactctagcctcgctttactatccttcttttggccttgtgattacttttggcgactcctacaaaccatagagaaaccatccttgcaaaaccatccttgcaaacccttagtctcctttatggagcaccttaacaaaagctctttggcgttattcgcgcgagctctttatgaccacttgttggtcggggatttttcgaagctcgtcttcataattggatccttcaagacatcaaaagatctttcaaacattgcaagcctttcaaagttgtgcatctctttggaaaactctttgagtctctatctttacttatgtattttgtcactttcaagttgtatgaaaaaaataataaaaaaaaaataaaaaaatatcaatcaaaagatcatatgactacttattataagcatgtttatatatgtatgtatatattggaacatatacgacaatgattttttcttgtctatgtaacgcacgtaattaaaagaaaatataggatcagattttgggataaattgatcattttgaaactgtctgatttcaggaagatttcttagaaactcgaaagtctggacaagatctgtaaacaaagaaaaatcagaggactaaagtgcaaaaacatgaaaaaggagagaaattcgagtttatcttttccgaaactgaagggaagtttttggcaattcgaaaattgaattatcttttaagaccagtatcaacatgcgactctgatttagctagctctattgagcaatctgtggcggccggcatcgccaacagatgtattctgtattctgttagtctgttagtggtattgaggtcggttaatgccgtggattgtacttccttatcaccttgatagaggccagcatccctatagagtatattatgtaaatattttgttagtatatggtttgggcaaccattgctggggttgaccattccgacacatattgctggatatctggtctttctgttctgatgttaatattctgtgttgttgatataattctgttatgctgatttgataatatagttttgatagtataagctctgatgtgtttactttatttcaaattaattaaattaaaatttatgtctattagtaccaacacgtgaatattattctgtacaggatcagaccgtgttggtacttgttcatcgggtttgtagtctcactgggcaaagttttgctcatataagttctgattccgtgcagaggacattgaggaggtggagcgagcaactgaggtttaaagtttttcgttcaatcgtaaagcgagacttggtagatttttcttgatttaaattattttgttttcgatatttggagtttttatgatttaaaaaaacattatacaatattgaattttagtatttttattatattatttttagtaatac

SEQ ID NO: 16222 - DNA, 1681 bp, Arabidopsis thaliana landsberg
atacttttaaaaagcactaactgaatcgtaaacacttacaagaaactccctgcagctctggcatggttaaaccaaaggggaaccaacccttagttgtgactccattaacagggtaagacttttgacgattggggtaaacaagatcaatagttgaagcattggccagatttaaatcagggaagcaaatcccaagcccatcttttgttagctgcacatcacaccatagaagaacatcggctacacttgtcagggttgcaagttgataagcagcgatactcgaatctggaaacaatccagagaacccaccacgagcaatcaccagtggagcatcacctagtaaataaataaattaagtaattggaagttgttttaatacttaaaagacaaaagtatacagtatatgcttacataatcaaagtaattattggactttaataattgttctcctgaaatcaaagtgaagttaattatcccaacttctactacacacatggataaagaaagaaagtactatactaatacgtaagttctcttgttttcttggaaacaatgtgcaaaagaaagagagaaagtgagagcaactctcaccattgagcgtctgccatcgacttgtagatctttgagcatcaatttgaacagcaaacagctgaatcagaacaacaccacagaataaaagcgttgcagatcttactatgagctttgtcggattacttggccgggaattcatcggtcacttacataaatggaaaaaacaaaaataatcgatttgtcgtttaaagctatatatgtgttatgtttaagttttaatgcataagcattgaactcatagaggagaagtacagagagtctcaagcgcttctttttatcaattggctttattagttgactcatagactcatagtgaacaaatggagagagagtcaagagcaataatcaaatggatttagttgcttttccttttaaaaggatttattagagtcttcattaagttatttgatatctagtgtttttggttgttttgaaactttttttctcttagttttcgttgctttgcattcatattttagtaaatagtattgcatttgcatttgcatttgttttttttaggtacatgagtggagtttaaagttttggaagtaaaatggagcaaatggagcaaacaaaggagctaaaagattgcaaagtggccaaagaagagaagctagtaggaatctaccaaactggtcgattgcgtggtcgattggtcaggaccagagctacggaggaatatgaatctaccaaagtggtcgagttcgtggtctactggtcaaggattaatgttgcggacaatattgaatctaccaagtgatctattgcttggtcgatttccttccttaaccggatcaaaacccggtttgttccgggttgatccggtttattttctcattactataaatactcttaacctagttttagagagagagagcttttgtttagggataaaaacttctcttgaagattctttatcttaggtttttgtatgaatgttgagttcttaagtttctatatcaagtatttcttttaaatttctcatctattctgtaatgattatggctttacaaagatcaaaccaattcctttgcatgatcatgatcatgagtgagtagtctactagagttctctggttagggtagattaggat

SEQ ID NO: 16223 - DNA, 553 bp, Arabidopsis thaliana landsberg
tagaaagctcagtaatttgaaaattatgagataaatcatggaaaaaaaatggcatatgcaacatgttctcttagaatattgatcataaggccatcgacaaccacaatcaatagaaaatcaccaaagttccttgaacgaattcaaggagatattttgtggaccgatacatcaaccatgtggaccattccactattgtatggtaatgattaacacatctagcagatgatcacatgtttgtctattgtcatctcaaaatttggcttttgcgagatttatgactcataatatcaaataaacagctcaattctgtgattattttattagcagagttagattacacaatgcttgtgaattcacatcccaagcattcaatgattattgtatggtaacgggaattgaaattgaacatcatgtagctcatgttcatacacaaaaatggtttgtcagaatcataaactaaaacgtttgcaattgattgcacgaccattgatcataagatcaaaacttccaacctctatatgcggacatgctatgttacatgcatacgcactca

SEQ ID NO: 16224 - DNA, 597 bp, Arabidopsis thaliana landsberg
caacttacttaatgcaggcaggttgaatgaagttgagcctctagaattggtctcccttctgaccgcgatctccttgctcatcgatattataaacctaacagagaaaatcttggaatccctacatgaactagcaaccgctgcaaaatttaagaacaagattgaacatcctttgttttccgagaaaccaaaagccaaaagctttgttagtgtccgatcgatcaaatgtcatgatgatcatgtggtcataattattgaagatgatggtaataatgatgacacatcaaaaaatgataatggctcgaaggaggtttcgatccatgagaaacatgaagacgatgatacgcatgtagacgcaagatgtgtttcatgtggtcacaaagcgtttgtgtgaaataatgtatgtttattcactcataaaaaatgtatgtttatttattttttaattatgaatttgttgtttgaaaatattggattattgagacttacatgttaaataaatatcagattttttttataaatgattgaaagacttatggtaatagatcattgtagtaaatatattaacatgagtttataaaaattgtacaggaaaaatca

SEQ ID NO: 16225 - DNA, 2022 bp, Arabidopsis thaliana landsberg
  unsure (1)..(2022): unsure at all n locations
cactgaatactaaagtcctatacttagagggacattctgcatcttcttcagctccaaaacagacaagccaactaccaggcaaagtagttgagaatccaaaagaatatgctcatgctatcacactgcgtagtggaaaagtacttccaactagggaggaaccaaagacagtcactgaggacagtgaagatcaagatggggaggatttaagtctcgagcaaccactcgagcaaccactcgaccgtgctactcgacctatcttcccagcagaatcaccaactcctccaaaaccagttgctgtcaaaaacaaagaaaaggtctttgtccctcctccctacaaaccgcagcttccatttcctacccgtcacaagaaagcgttgacagataaatatagagctatgtttgccaagaatattaaggaggttgagttgcggatacctcttgttgacgctctagcgctaatcccagactctcacaagtttttgaaagacttgatcgtggagagaattcaagaagtgcaagggatagtagtattgagtcatgaatgcaatgctatcatacagaagaagatcattcctaagaagcttagtgatcctggttcattcactctaccatgctctttaggtccattggctttcaacaaatgcctatgtgattaaggagcatcagtcagtctcatgccactctttgttgccaaaagattggggctcactcaatacaaatcctgcaacatatcccttatcatagctgacaggtcagtaaggatcctgcatggtttactcgaaaacctacctgtcaggattggagctgtagagataccaagtgactttatagtcctggagannnnnnnnnnnnnnnnnnnnnnnttgattctggggagacctttcttagcaactgtaggagctatgattgatgtcaagaaagggatgattaatctaaaccttggcaaagactttaggatgacctttgacgtcaaagacgcaatgaagaagcctacattagaagggcaactcttttggattgaagaaattgatcagttagctgatgagttactggaagagcttgtagaagaagatcatcttaacggtgctttaaccagaagtggtgaagatgggtttatgcatttggaaactttgggataccagaagctgttagactgccataaagcgatggaagaattcgaaccctttgaggaatggaatggaccagcaacggaggtaatggtaataagcgaacaagggtcagcacgagttcaacctgcatactcgagaacatgctcgaccaatgactcgacctcgactgccagcgactggagagctgatcattccaacttcagatgactggtctgaactcaaggcaccgaaggtgtgatctcaaaccacttcctaaaggtctaaggtacgcattccttggtccaaactctacttaccctgtgatcattatgctgagttaaatgatgatgaagtgaacctgctattatctgaacttagaaagtacaggaaagcaattggttattcattatccaacattaagggaatttcacctagtttatgcaaccataggatccaccttgaaaacgaattctactctagcgttgaaccacataggaggttaaatcccaacttgaaagaagttctgaaaaaagaaattttgataactgcttgatgctggtgtcatcaaccctatctctgatagtacttggggttctatagttcattgcgtctctaaaaagggcggtatgactgtttttaaaaatgaaaaggatgaattgatccctactagaactataactggtcatagaatgtgtatcgattataaaaagttaaatgctgcatctagaaaagatcattttcctttaccattcattgatcaaatgcttgaacgcttagctaatcacccatactattgctttcttgatggatatagtgttttttttcaaataccaattcaccctaatgatcaggagaaaaccactttcacatgtccttatggaacttttgcttaaagagaatgccattggtttag

SEQ ID NO: 16226 - DNA, 1605 bp, Arabidopsis thaliana landsberg
cacatgtaaagtggttgtgctactagtaagcatcatgatgttcgctgtttacaatggacgatctgcaggatcttcttgaacagataatagtgcgatatggatgcatctagtagcctcattactcagataactttctcctatggttggatccactagttctaacggtgacccatttctccaaagcctccaagcctaacacaagttgctaattaaattaataattctttggctttatcatatacactcactgtaacttaaatgattatactcacgtgtgttaccaaattgctaccagaatcatcaatgttgtagaaactgctattctttttgccacttataatctctagtaccaatactccaaagctgtagacatcagacttcatggagaaatggccacgcattgcatattctggagacatataaccactgcaaataaagattcacattttagtctacaaacaaccaccaaacggagttttttttaattgaaagcttacaatgttccaactactcttcctgtggtagcttcagtttggtccactctaaaattcctagccacaccaaaatccgcgattttcgggttcatatcgacatctaagagaatgttacccgctttgaggtcacggtgtatgattgtaagccgtgaatcttgatggagatataaaatccctcgagtcactcccctgattatgttgtatcgtgttctccaatccagctgacccctccttctatggtctgcacatccaacgtatagagccattagactatgggtaagagatcaaaaacaaatgtttcagagaatctaatcctatatatcatatgtttcttaccaaagagaaaatagtcaagacttttatttggcatatactcgtagacaagtatcttttcttctccttcaacagagaaccccagaagtctaacgagatttctatgttggagctttgctacaagaagcacctcgttcttaaactcttcttcaccttgacctgaaattttagacagcctcttcacagcaacttctgttccattcggaaaagttccctgtcaattcatatgatcttcactcactatcagaatttcttatcttttttttttggcaactaagtttataacacaaactagtagttgagaaagtttaagaacattttgccttaaaaacttcaccaaatccaccatgaccaagcttgttactcttctgaaaattatttgttgcagcttcaattgctttaaaatcgaattgaagtgaacctgaagttgtaatatcatctgcagcagaaagcatatatacatagtgttatggtggaaacgtatccaaagggacattaacagttttaatgcaaatagctgtatagtctcttaccatcatctggcggtgcagtaccataagtggtcattgacctccctgcaagagaaatataaccatcgttgaagaacagagaaagagacaactgaattgacatatttaaaaacgtttatgccctgaactcataattgttaaaacaaaaaaaaaaaactcactttcagttgcaaactcttggtaggcttttctcctcctagaaagagcataccctagaacaagcagtaccgtgataaaaaaggcgagag

SEQ ID NO: 16227 - DNA, 632 bp, Arabidopsis thaliana landsberg
  unsure (1)..(632): unsure at all n locations
gaccatgcctgcacccttgtcgatatcaagaagctgcttaaggagctttccgacataacagagcggcaacagtccaccgaaacgtctttgttcgaaaagaagaatgtagtggccagctcgcagcgttcaccaccagtcattccgaaatcaaggaagctcacaacgcgtatgtagatcgagttgacactctctctacaggaacgctgcgtaccgcaggagtctaagcacagctcgactttcagggaaccgttagtacgagtgtccaaaactcacaggcggaagcagatcaacaaactccgtcacatcaactgccatgtggctctccgatggaagttggagctacctcgcattaggacactgtgagagtcgaaactcacataaccgaaatttcttcattcggctataccctcgaagattcttcattatcatatctggattcttcggaaatggnnnnnnnnnnnnnnnnnnnnnnnnnnnnnnnnnnnnnnnnnnngctactatgaaacgctaggaatcggctcggtgcatattctacgcgaccagaagtcctcctagccgaccctaaatgatcctctagacgtgcattctctgtcgggtgtgtatactggaataataaccaagccgcatgatag

SEQ ID NO: 16228 - DNA, 2465 bp, Arabidopsis thaliana landsberg
cttcaggctgtctcgctttgatgatgttccacaatacaccaccacttgtccgtttcctagtgccatcagcagtcacctgacctccacaggtctcaattgctaccacctaagacaaaaatatttcttgccatcatcaatcatatctttggcaagaattttgcaaagtggaatagaaatattcttaaccaacttaaaagcaaacagtgggagtaacagaaggatcaatccacaaagcagtagtgaatatatggacagtcatttctcgatcatgaaaatatggttgacactgttggtctcacccaaaccacttatggtctcgatcatgaaaatatggttgacactgttgatcatgaaaacttcatctatccacttatggtttcatacaaattgtctagatcaataaaaacagagaaaagacagatatgcacaagagaagggaaaaaaaaaatcaacctaaaatatgaagttttaccatctacatctcagcaaaaggcacaagcagcaaaaaaggctccaactagaaatatcttgaactgcaggtgaaacaatacagctaaacaagattgccactgctggtcacacacagatcaaacaaggttttaactggaataacacagaaaacatcttgaagtagtgtatacctcattgacaagatcacttaaggcagcaattccgagacacccaacagctgtgtatatcatgtaagacttcttctccttgaggcgtctacaagtttccctaacaaacctgcaataacaaaacttcaaacaatgagtaacgtttcaaccatagccaggatcaggcagctacaccaaggatttacataacaacattagcatatagaaaaagaacacttaccagtctacactcatgggtttgtccatcacagggccttttctctttttcttcttcttcttcctcttgttcttgtttgtctgctgcagtcccttcttctcacccaaaatcgcctctttatctttgactccatcaccatcatcattttgtctctctccagaatctaagtcatgatccacaacaatctccccttcttcaacatcaaccatttcaacatcctccaagttttcaaatccgtcttcttcattaatagcatccaacaaactctcttctccctccatgagatcaaaaacctaaaattccaaccaaaaaccaaacacaacttcaaaatgtaacacatatcaaaacaatactcacaccaaaatcctaatccattcaaacaaaaacttcgaacccatttacatttacaacgagaatctctccacaacatccaaaaacacgatttcaatacatgaatctctcaaaaaattactcaatacaaaaccaattgcgtacaggaattagaatcactaaataaacaaaatacgaagctaaccttggaacttcctttgctcttcgatcacccacactcgagattatcaacaaaacacacacttcatcgtcatcgacccaatactgagcaagaaaaatctcagctttagggtttaggcaatttttgccctttaagaaaaaagcttaatccatttcctctatataaagtttttaattatatattgccccaaatataattaatttatatatatatatatatatatatactttccttatttgtcctgaggactagagtcaatgaaaaagtcaaaagtaatagaattgggaaaacaaaaagtattaaaaggaaagttaaaacagagaagacttggcgtctctttagattctctctaccatggatcactctatctcaccggtgtacaatttcccggccatcactcgctgtagtttatccaattcaattcctcaacatccatcatcatcgacgccgtcttcagccgacatccaccgcttctacaattctctttccccatcagcaccaagcgttccggtttcgccggagatggagtctatggaagcagtggagaagattctcaactacaaattcagtaacaagagtattctcaaggaagcgattacacacacctcgtgtacagactttccttcttacgagcggctagagttcataggggatagtgctattggtttagcaatctcaaattacctgtacctaacgtaccctagccttgagccacacgagttgtctctgttgcgagcagctaatgttagtactgagaaacttgctcgtgtcactctaaatcatggtctctattcatttcttcgacgcaatgctccttctttagatgaaaaggtaatccataaaacttgtctttgcattgaagaaccctagaaacagagtgattcttgtgatatcttcaccaccaagttgtgtgttttgatgtcgtttgataggttaaagagttctcagaggcggtggggaaagaagatgattttttagttgcttacggtggattagtcaaagcccctaaagttctagctgatctttttgagtctttagctggagctgtgtatgttgatgtcaactttgatctacaaaa

SEQ ID NO: 16229 - DNA, 1496 bp, Arabidopsis thaliana landsberg
aaaagcacttccaactagggaggaaccaaagacagtcactatagacagtgaagatcaagatggggaggatttacgtctcggaaaggatcaagctgacaaaccactcgacctgtcactcgaccagtcactcgagcaaccactcgacctgtcactcgagcaaccactcgatctgccactagacaacgttactcgaccaacaactcgacctatcttcccagcagcatgaccaactgctccaaaaccagttgctgtcaaaaacaaagaaaaggtctttgtccctcctccctacaaaccacaacttacatttcctggccgtcacaaaaaagcgttggcagataaatatagagctatgtttgacaagaatattaaggagtttgagttgcggatacctcttgttgacgctctagcgctaatcccagactctcacaagtttttgaaagacttgatcgtggagagaattcaagaagtgcaagggatggtggtattgagtcatgaatgcagcgctatcatacagaagaagatcattcctaagaagcttagtgatcctggtccattcactttaccatgctctttaggtccattggctttcaatagatgcctatgcgatttaggagcatcagtcagtctcatgccgctctctgtcgccaaaagattggggttcactcaatacaagtcctgtaatatatccctcatcctagctgacagatcagtaaggatccctcatggtttgctcgaaaacctcccaattaggatcggtgttatggagataccaactgactttgtagtcctggagatggatgaagagcccaaggaccctttgattctgggagacctttcttagacactgcaggagctatgattgatgtcaagaaagggaagattgatctaaaccttggcaaagactttaggatgacctttgatgtcaaagacgcgatgaagaagcctaccatagaagggcaactcttttggatcgaagaaatggatcagttagcagatgagttactggaagagcttgtagaagaagatcatctcaacagtgctttaaccaaaagtggtgaagatgggtttctgcatttggaaactttgggataccagaagctgttagactgccataaagcgatggaagaattcgaaccctttgaggaatggaatggaccagcaacggaggtaatggtaataagcgaacaagggtcagcacgagttcaacctgcatactcgagaacatgctcgaccaatgactcgacctcgactgccagcgactggagagctgatcattccaacttcagatgactggtctgaactcaaggcaccgaaggttgatctcaaaccacttcctaaaggtctaaggtacgcattccttggtccaaactctacttaccctgtgatcattatgctgagttaaatgatgatgaagtgaacctgctattatctgaacttagaaagtataggagagcaattggttattcattatccgacattaagggaatttcacctag

SEQ ID NO: 16230 - DNA, 1183 bp, Arabidopsis thaliana landsberg
  unsure (1)..(1183): unsure at all n locations
tgaagtacttaaggttattacaacatcatcagagttttgcaaaagtagtaatcattgttcgggatgcagtggaaatcaactaatgggaaataaaagggaggatggggaagcctggcccgtcactccttgtgctcctctccagcttaggtggggtcccactcgactgtccaacccggtggcaaggtagatggccaagtcactccagcaaccatatcctccaaagaacctgtaaaaaattatgccacaatcaaggctgagtatactaatactcaactagacttacccggtgtgaggagtctactcctctacctctagacatgcagctgtttggctgaagggtttggtttgccaaaagcactagctaagtctacaatcaagttttagctattcaagtttttgtgggatcccttaagactaggtgagtcctagtactgatagatggtatcaaacattattgcaatcaaaatcttctgaatgtcacctcattccacttctcactcgatgcagcagcatggatcaagcagtctcattagctgcgagaagcagacgattcgaatcgagtttttaaccttgcaaggtaaacctaaacacatgatgtagcgaggcactccgtccccacacacatcaatcatccccatcgattccctggcaacagaaaggggctcaccgccttggcgntacaatgcctcactgaccccgactgcagtcgtgcagtgaccgcacttgtacccaccataaccggaatgggagaccacgtcttaggtcgcgtgaggagggcaatctgtgggcaggttcactcaggtactaggcttaccgatttaccatatttctcggtatgtgtttagtacgttcaaacgcttgacacacggtaccacacattaatccttattccaatttccgtctcgtagacaatgcatccccatggaccgttgtccacagaccaccattattatgatatcaaaatggatacaaccaattcctgacctcgcgcgagtgctagaaaaattactcgacttctaccgagatccctaattagcaaagcagctactcgacctagcctactagtatccatctcaataggaatcctgagttaatgcaactagggttttaggcaactccatacacttaagtgcacaattcaagcctacaatcattaagtgcagtaaaataatatatagaacgg

SEQ ID NO: 16231 - DNA, 2723 bp, Arabidopsis thaliana landsberg
gattcttgaataattaaatgtttgcaagaaatcaaaataactaaaaagtttctaaaatctttaaacatttcttgaatcctagattctgagtttttagattcatttaaaagtccaaaaaaaacttcaatattctttgaaattctacaaattaataatttatattttcagatttaaatatatgtaatattatgggaattggacatgtttaggcacttgtacaaacttttattccttttgagacacttctcacgtacaaggcacttttccttgtttttgaaaaataaatggacaattatatccccacccatctaaaccaaaaatttacttaaccggttagaaaggttttgttttgatttggttcccttctaatatatcgacagttgatatttacagatgagaaaaggaagttaccttcgccgacttaaattatctcacaatatcaatgtcgatggttgttaatttttccgaccaagcaattactatggaaagtctcggaatctccgggtcactgtttcttgaattggttaatattactgtgcaacgatctctctcccttcaaacaaaacctctggaacaatttaaattgagttgcctccgccttaaccaaggcattgtgacgatgttttttgcagcgaattaaccgccactgtgattggagagatgacgtagaagtcgattaggaatctccccctgattcgggttatcgtttggatctgactctgtttctgcatcgtctcctccggaagaagttttaaaaaggaaacgacctacaaggcttgatataccgattggtgttgatggatttgtagctccgattttttcatcgcccgatgtaactgtgacgtcgagggaggaatgtagagaggttgaaagagaaggtgatgattattctgtttattgtaagagaggaagaagagaagctagagaggttgtatcaagttgggctccaatgataatgttagatgagcaaacaaaaaagtgctaattttatcgatctataaacacattcgcagcaaatcaaagacatacttgtccattaatgattgttcaagtagtccagtccatatggtcatcaaatgactcacatggttgtttcatactaatacataagtttatacataaataataaacgccaatccaaagtatattatccatgtctatttgaccatttatccacatgtgtatagacatgttgagacaattttatcgagttataaacacattcacagcaaatcaaagacagacttgtccattaatgattgtccaagcagtctagtacatatggtcatctaataagtcatatggtagtttcatactaatacataagtttatacatgaacaataaacatcaatccaaagtacattatccatgtttctttaaccatttatccacatgtatatagacatgttgatacaattttatcgagctataaacacattcacagcaaatcaaagacatacttgtccattaatgattgtccaagcagtccagtccatgatcatctaaagactcacatgatagtttcatactaatacataagtttatacatgaacaataaacgtcaatccaaagtatattattcatgtttctttgaccatttatccacatgtgtatagacagtcagttacgtaaacctcagtcagttaaggaacttctccaaatctgccaacatctctacatattttaatgtagacgtaataggttggtttgaggatatgaggacaccgtcaacaatgaggagataagcaagccgaagtctatggtaagaagataagttcttgtgattaacatttttgaaatatcacctaacgtagcattcatgtcttcacctattagctcttcacaatgttggatattataaataaaattagcacacgattgaataattggagcaaataaaatgattggagaagattaataccttacatttgaggaccgagtagaagttactagcacacgccggatacgacgaatcgattgagagacaagaaaatgaagacgatgacgggagaacaactgttgacgacgacgacgggagaggacgaattaatgtcagccgattgaaagctttgttgacgataacgacgggagagggacgaggaaatgactttgccggtagaaaactcgtcgggatgatcgccggagtcgagatgatgttatcggcgttgtgatgattttaactgcccagataaatgaaactgtaaaatcgtcgtgaaggattgggtgagaaagagaagtttctcacaaattggttttagtttagagattgagattaaaaaattaaaccgaaaaccggctaaatttgttaggttttgttaaaccaacgatttcagggtaaaagggtaattctactgagttaaagtgactaatgcttttaaagtgcctatttgtggccaaagtttcgaaatagtgcctttacgtgtaatattctcaatattttattgtttcttataagaactaaagatcgaacaattattttcactccgaaaaaattcttctctcgtaaagtacttgtttttcatcgtcagtttgaagattagattaattacatcataagagtttctgatataattacgagataaaatctcaattttcaaaagtgaccagacatatttagtttggtcgttgtgtcttgtgtggaactggccatagtaccaaaaacaatgacaaattacttaatcatgtctttaaatccctattttggtgttaatctagattctga

SEQ ID NO: 16232 - DNA, 1132 bp, Arabidopsis thaliana landsberg
cttgccagttcttgggaagatctctggtgtcttaggcttcaaagaaacaaaattttgtagctctttctaccgccgaagctgagtacattgccgcaccatgtgttgcgcgcaattgctttggatgaggcaaacccttagggactatggttacaaattaaccaaagttcctctcctatgtgataatgagagtgcaatctgcatggcggataatcccgttgagcacagccacactaagcacatagccattgggtatcactttttgagggatcaccaacaaaggggggatatcgaagtgtaccatgttagcaccgacaaccagctagccgatatcttcaccaagccgttggatgagaaaaccttttgcaggttgcgtagtgagctaaatgtcttagattcgcgtaacttggattgatctatagcatacatgtgttctatacctttgatcatgttacctcatgcatttatgtgatttgttgcttatttatggtgctcaagttgtgcaagggatccccgaacctcacaagtccatgtgtgaatgatgcacatatttagggggagatgtgctacaacttgaccctttgagactaacctctttgtttgagtacacttgatgtagtctcaaaggtgcattgaaagggagaatggacttggacgatgcaaagacttccactgcactccggtcttagtgtactcacttccaagttcatatttatgttctcattgcctttttgctcttaattgacatttttggtgaggcaatggggttaaaaagggccaagaatgatcatgttttggtgcttgatgccaaagggggagaaattaaggaccaaagcaacaaatggatcagctaccacttgagaattttgaaaatagtagagttaggacttttgatttgtcaaaattctaaatgtctttttttgtcaaaagttggtctcttgtggggagaatgtttgattatgggaaatagggggagtttttgaatcagcaatcaatttctcttggaatatctttctctatgcctcaacaagtgaatttgacttagggataggaaattgagtttgatttgcaaaaacaaacctagtggtggcaaagaatgatccaaatatgccaaatttgaatcaaaacaattttg

SEQ ID NO: 16233 - DNA, 2244 bp, Arabidopsis thaliana landsberg
ccactgggcggtagtcctgtgtctgtgtggcttatgcgcaggagcccctggccttttatgaatttgaggcccagtctagtgccgtgttaaatgaataaatgagttagaaaattgttttttaatacaaaaatatatgctagaactttaataattcatagagaattcatacgagctccaaattaatccattccactttctaaatttttgtaattttattctccatcacttagagcctctgttttatcatgacaacagtaagaaatttaattcctcacttaatctattttaaacacataaaacctttgaaaatccataacttaaaatctataactccaaaaattatgattcctgttcctagaattttattttaatatgtagaatattgctgtgtattttgttcatatgcttggtgtgatgttaattttccctatatcctgtgcttgtttgtattgtggcgagtagaagagcccgttgctgaggatcctggtgagcagcaggttgaagtagctgagcaggagctcattgaaggcaagttgtgcccttgaccactttttacctaataatgctctttaatatcacttatccatgcataggttaattttgatgggacccaataggtcaccctagaattgtttatctcattaccttgtttacccctgaatcacttgggtagttctgctactgctttatatggttttgggttaatatttcattatatctatgttccaattatgttgttattttatttatgttcatgacaagatcattaaatgttaattggaacatagagcttaacttgagaaacacgtgccaccacaagggtttatggacgcccttggctgattaattaggaaagctagtggaggactaccttacccgaaaggggcaagggcagtaggggagtggtcagtgtagggaggtccttggttgattttgctacgatggcggtcaggcaagaaccctgcattggagcttcctataaactgtagcgggttttctgaagctagtggaactttgtaaaggcctcgtagtgttaccctgcctcgcctcctcggtagaggtgtatgggattggccatcttttggcagatgggtaacatgacttgtgggtaaagatacgcaacctctgcagagtgtaaaagtggtatactagccgtgctcacggtcatgagcggctcggaccctcacatgattaattatggaacttaaatttaatttgacatttgcatcgcatttgggattattttactattactgttctttattattattaaggtttggtatttacttacacttagtagttgctaataaaattttgaccaacttataaaagcaatgctcagcttcagcctctatctcattgatcagccttacacttcatgaactcccacctttggtgagttcatgccacattattccccacgacttgttgagctatgaacgtatgtgagctcactcttgctatctcaccccccccccacaggagaagaacaggtggtcgaagaggagccgcctaacaccgaggcattcgatctgatctaggtggcgtttctcagttgacattggcgccgtcgatccttagttcattttatatttattcttttactttgtaataagtcttccgctatgtaataaatactctgatgatttatgacatttatctctatacactctgttattatatatgttgtcttcttggcgcatgtatgagatgcacccggctttgtcctttaaaaccgggtgttacactccacttccatctatttgtctgtttatgatatttctattcatattttatgcaaacgatttattgattttatgcattatctcgtttacttaatccagtgtgtattgggtcctaccatttatgccatatgtataagatatatttatcgcagtccaccgtaggcataaataacttcaccgtgttgtataactagtattagtatatatcataaactggttctaacgagtttagctgcatggctggttgagcgatcctatatttatggagaaaataaagcattaaatacattttttgtttccatgcatatcaatctatttcctttcatcgtatgtttttgacatcctaatcttgtgcgcatacagtaggtaacaaatttttacgcagtgtaccgaattacataaatatctacaccatgtagcataattattataaatatatatcataaactggtcctggcgagcttagctacatggctattgcagcgatcttatatttatg

SEQ ID NO: 16234 - DNA, 750 bp, Arabidopsis thaliana landsberg
cactctcactttcattgatggttaagtattaattagcggttttgattagttttttttgtttgtaattcgtgcaacaattagaaaaaaatgctggagagtaagaccttcaagtacatgccgttttggctgtcgttagttagtttcatcaacgcaggactttggacggcttattctttgatctacataattgatatctacctccttgtaagtttttttttttctttttttttttggcttgaaaacttaatgtatttactccctctgttttatatgataagatattttagaaaaacatttagatttctatgacaaaaattaaattcattcaaatttgtgactatgtatattctacattaaatttcaccattggctagattatctataattaaatattaagttatgtttttaatgtaaaaaatataacaaaaaaattagttagattcttgaactttgtgcttttatctaagacatataataatattttgaaacagatagagtgattaattttcattgattgaatttcatttataacatctattttgtttgttttgcgctaaggaacagataagcagcggttgttctgtgcttttcaattaatagtccacgcttgctctctctgtaagagccaaaaaaattactccatcgggagccataatttgtttttactgaaattctaatttaaaagctctacgatctaaaataaaaagaatacccgaaaaagaagaagccaaaccgtttttacctttttta

SEQ ID NO: 16235 - DNA, 897 bp, Arabidopsis thaliana landsberg
gaaacatcattcacagatcttcaatcatttttttcttaaaaagaaaagatgtaacaaagaaagtatatgaccagtatcttagccgttcaataatcattttcaaaattctcatctatttttaaaccagtccggttcagataatgtttcgcgtgaaatgactcagatgataagtttataacattaggataacgattaagctctgttacttaattccccaatttgcataatattttggaacgagaaacaactcatcaaagcaatgtttacaagaacttctcgtgctatttgtagaacgtaaaattcataaacgcgaacaacaaaacaaaataacatttagtatttttgtttaccatcatgttcatgttactgaaaggtgtttgcaattgcaagccacgcgcgtgatgtaagagtggggttagaatagaagacatggttaagtttaaagcaaagattaacaacatgttgtgtaagagaagccgatgagaataactgtgatctgttttgttgttgcagactcatggtcttgctgagtacatagctcaagtgagaaacttttccctgaaaacttccccattttgtttgtttaatgataacaaattgattgtacgttttcaatgtctctagtactcttttgattgattgtacattttcaatgttttgtacccagtaaaagcaaacatatattgtaaacaaaaacatatatgtattgttttacaaaatttatttttttctcaagagaaccccaccattggaggagacaaaacttaattcaagttcttaagtttgataaaagcaacattaaaacttaaaaatggtgagagcctctcatgtagttctcaccgttggagatggtctaatactttaaactttcgagttttcaacttccaacgactagca

SEQ ID NO: 16236 - DNA, 1117 bp, Arabidopsis thaliana landsberg
atagagaagctagcttagacggttgaggaacttaagagtaaactggatcagatacgagagaaagctcaaccaaaatgcgggattgataccatcccgagaaaaaagtttacttcaagatgaggagatagattatccaccagaagagaaagaggcatatttcaaggaaagaagaattgagtattctgctacgcatctctcaacctgatgagatcagagaggactatgcagatcctctctatcacccattttcttcttaatgagtgtgaggggtcaaactagtgactttaaacaagctcactttggaggaattcccaagactgttcatgtaaataaaacttttgttttcttgttatttttgatttgtttttggttatgtttgtgattctcaggaacacagaaacaacgtggaggtagagtaaaaattcaaaaattttactctacagagcaacatagaatcgagtatgttagtatagagaaattcaagaatttgaaaaagttctgttgcactcagagaaccatgagatcgagtaggttggtcgagtattagtgatgattttaaaacccaaaattttgaaaatatctttatactcgacctagaaaagctacaaagacttacagggagtttacagaggattacagaaggttctagtcaaaagagaacaacgcttcaggacaaacagacagagcgtggcccaccacctctccattttgttcccccacgcatttctaaggataagaaaatcccttcccttcttcccaaccactcgatccagccctatctcccttcccaccgacaccatctctcttcctctccaatcactcgacctcaccgactaactcgacctcaccggctcactcgacctcaccgttccggtttcaccatctctcaccgcttcgtcttccttctcactcgaccacaattcagctctcgccgctcacgtcaccaccttctctctctctttcactcgacgacgtgaccaatttcgccatctctcatcactctcgtctggccatttactcgaccaccggaccttcaccgtctctccatcggttctgttttattcgaccaagctataaatcagacggagaagctcttcactcaatttctcacaaaccg

SEQ ID NO: 16237 - DNA, 4920 bp, Arabidopsis thaliana landsberg
ttcaatcactagaaccccccaaagtttacaaggagtaccgagatttcattatcaataagtttagagaggacacttgtcggagactcaccttcaccagtgtccgcaagtttcttgttggcgatgtcaatttgctccagaaagtttttctcttcctcgaaaaatggggattgatcaattttagctcttccctgaagaaaaatgaccatctgttgtccgtggataatgctaaaatagaacaagggactcctgctggaattcgagttactgcaacccctaattctcttaggcctataaccgcaccgccccttgttgaggaaagagttgagactggcatcaaagtaccaccgcttacctcttattcagatgttttcagtgatttgaagaagccggatcatgtattggtttgtgcgcattgtggagaacgttgcgattctcctttctatcaacataacaaggtagtttttttttgctttttttcgattagcatatttcatactctctagtctgttttgtttatgcttcttttttttttgacatatgatgttggcagggtatagtcaacatatgcgaaaagtgtttcaagaatggaaactatggggagaacaacgctgcagatgattttaagttgattgggaattcagctgcagctgtgtggacagaggaagagatcctcctcttgctagaatctgtgctgaaacatggagatgattgggaactcatttcacaaagtgtttctaccaagagtagactagattgcatttctaaactcattgagctcccgtttggagagtttctgatgggttctgcttctggaagactcaatccctctatcctcaccgaggatgaaaacacggaacaggtgcaaactgatgggcaggaacatgaggaaacagagacaagggaagaaaaagaagatcgcgtgaatgaagatgagcttccagcaaaaaggaaacgtgttgcactgatatcagacggtgatagttcacttatgaaacaggtgaatgtttggttaaactatatgccttgtgttcattattttccatatgagtgtaacattcgggttcttctctgacctttaaccgtcgcaaagaatgccctttttaactccactggaaaagaatgttcaagagataacatgtttacatattgcacaacaggtcgctgccatggcaagtaaagttggtccatctgtcgcaactgctgctgcaaaagctgcacttgcagctctttgtgatgaagcctcatgtccaaaagagatttttgacactgatgactacagcaatttcacagttgataggttcgattctctaagccctcaatttgcttgtggtttggcttctcatgtcctacactaatctcaagatacaaaactttgctcacagagccgatggagagaaagatacagatatggaggaacaacaagaagacaaaggtaaattgtgttgtgattcaatttgcattcctaggtttataatgaaagctcaagacttaagatttggaatggttatatatatatttgcagacgggcctcagggtctacctgtaaagttaaggatgagagcgtctgtggcaacagctctaggagctgcggctgcacaagcgaaaatactggctgatcaagaagaaagagaaatggaacagttagctgcgccattaatagaccaacagtttggttgtaacttgtaacaacattaaaacatttgtgtctgttccactgtgtttgtctcttgaaccggacgggttttgcttctctttgttgtactcagctgaagaaactgcagagcaagttgaagtttctagacgacttggaatcgataatggatgaagaagagaaagtgatagagggtgtaaaggaaacaatcatccaagagagggttagcgttttgcaatgcgcgtttagaagcggtattaccaaacgttgggatcatacgtacgtgaaatgatcttcttctttcattcgtactttttttttctcttggggtagagttgttttctcattccttatggatttgttatgttgacttttgaggattatatgtatttagtattaatgtgttttattgacttaatgaggagagtaggtttaggttacatacctcttttgtcgatatgtctgaccaatggatgggtctctctactaattcacacgcgcccagtgtgacgtcaataaataaaattccgaaaacattttctgagctttccataatttggaaaaaagtgaattgaaaaaaagaacagtgacactcttgtttctataaattggtgagaccgtcctcaaaaccccttcgtcaccttcagtgtctctctctcaagatctagctccggtcatgaagtcgtcggaattccaataccacgaggttctctctctctccctctctctgcttagagattttagatgtagtagtaatagtttaacaggagagtgaagatgtcaagaggtgttgagatgattgattagatctttgaataaacaaatatgtgtatgaattggtgacaggaatacgtgagaaattcaagaggtgtagagttgttcgcatgtagatggatcccatcttcttcgtcttctcccaaagctctggttttcctctgccatggttgcagttatttccttacttattatttctaaaagccgctttcttcattacacataataaagctgaacaagttggtggtgattttgtgcaggttatggaatggagtgtagcgactccatgaaaggtttttcattattcttcttccctccaatttatgattcacatgcacaatagtaatgcattagatctaacaaatctccaaaaatatggattttttgtttctcttgccttgatttggcggtgggattttagatttaattagcaagttttttttttttgttgcttctatcagttctctgaatcagattacgcatgatactgagaaaaaagtcatttctttcactgcttatcattttttttaacttttatattttagatttgatgcattatactagttaggatttgtgtagtgatagtagcagatcatggatcttaaattcactgtggaccttagaacatttatgtgtgtagtaatacttcttaaatgcctctagaaagcaagtcatggagggtgttaggaccggtaggtcaacaagtcttactttatgtggttggttttggttggagaacgaccctcagactaaatttattttatttcatttttttggtctttcctcgtttagagtgttgtatttgatcccttgcaaattaaattacctttctttctatggctagcttggtggttgagaaaatttattcggaagttgatacatgtttgaaactaaacaaactgatacatgttttgattttagaatgcggaatcaggctggcttcagctggatacgcggtttttggtatggactatgaaggtcatggaaggtccatgggatctcgttgctacatcaagaagtttgcgaatgttgtgaatgattgctatgactactacacatctatttgtggtatttcatttgacatatataacaataacattcctctctctcttcttctccgtttatcagtaagaagagattttctcaaccccttaagttaatccggttaattttatgtgacaccagcgcaagaggagtacatggacaaaggcagattcttgtatggagaatccatgggaggcgcagtcactttattgcttcacaaaaaagatcctttgttttggaacggcgccattctagttgctccaatgtgtaaggtaaaaaacctgcaactataattttagattgcagagtcgtaggtgataataatattgaaatgcaaagtatattgttatgtttaaatatgcagatatctgagaaggtgaagccacaccctatagtgattaatctgttaactagagtcgaagaaatcatacctaaatggaaaatagttccaacaaaagacgtgattgacgctgctttcaaggacctcgtcaagcgagaagaggtctgtatagtgtataccaaccctctgatcaccatcgaaattggttatatgtaaataatttggtgtgtgtaaatgcaggtaaggaacaacaagctgatatatcaagacaagcctaggctcaaaaccgcacttgagatgcttaggacaagcatgaacctagaagacactctccacgaggttcatgtctcttattgattgttcttgatcccgtgttatgacattatttctgaccaagacaacatgatattgcagataacaatgccattctttgtattacacggagaagcagatacagtgacggatccagaggtaagcaaagctctgtacgagaaagctagcacaagggacaagacgctcaagttgtatccagggatgtggcacgctctgacgtcaggtgagcctgactgtaacgtggaccttgtttttgctgacatcatcaattggcttgaccttcgaaccgctgaccctgcctctctcactgtcactcctatacgagttggtaacactacgagcgtccagagggtaactactgttaacggcgttagtaacggtcataggaggcctaaacgtcccttcttcaatctcctttgtggtttgaaccgtggccgtttggttccacgatccactgtgtaataaaattttatcaaggcaaacaaaaaacaatttatgaaaaagagagttatgattttgtgtgaattattaaagattggtggtctcatggtttgaagtttgaaaatgtatggcccaaagaatttataagttatggctacctaaaatatttatattcgtttggaaaacgttaaagcccccaaaaaaaacattaaagcccatataaattgacacggcccaaaatttgaaaggcctaacttaactatgttgtagcgccggtccgccaagtactttcgagtatcgagtcgtcgttcttcttcttcctctgagagagagatct

SEQ ID NO: 16238 - DNA, 4448 bp, Arabidopsis thaliana landsberg
tattcattctgtatatgactttgatattaaggtcttcgtatgcttcatgatttgtattttatgtttaacgatagcttaatggatactttaacttggagatagtttcaacttctaacccctttaacattcgtgaattgtgacaacaaagtatttataagatttcttgtcacaactatcgtctactggtcactaaatcactatattaagataggtgattattctgatttggttgttcacgtcatccaaactaaatttggctacattcgagtcataatctccatttactagtgaataacttataagaaattaatgatttttgtttatgaatccatgctcacacaaataaacccccaaaatccaaatgttcgtttacaaagaaatcgcttatttacaaaaacaaacttgtattatattcccccaaaaaataatttataagtccttcctattatcaaaactcttacaaatagtctatagattaagcaaggttcatgtgccgacgccttttttcaatctatgtaacaacgagtcttgtaccaactaccaactcttactatcttcttatacggttcatatcatatgcttcaccaaacaatcacacaatcactcatttctaattgtctcgggtcgattctagaggctcgcgctggagggtagtaaaatgacatgcaatgttccgttgttaggaggaagttgcaaacgaagaggaaacagcttgccgtttaaaggactacgagtacacaccacagcgtcttccatgcacgtttcttctcgcaatgtctgagtcagctccgccacgctatttcctttaaacgtgaaagcatatccaacggttgtttcatcttccacgtgtccttcctcgtcagcgacatggtaatatatggttcgtccatcagatttaggcggagactcaaccgactggtcaaaatcaaaatcaaaattttcaataaccggaaaacggtacaactgtaattttaaacaaaaccaaaggtgttttaggaatttaggaaaagtactcacatctgaatcggatctgtctgaaagagaagacgaagtccttggagactcatccgacaacggcgaactcgtcggtctccgatgcggcggcggagacttcgccttcagaggcggcgctttcgcagactccggcttgaattcggaatcagtcaagatctcaacaacatcaacatcccaagaaatcgaatcctgagtagcagacaaatgaggaacgtcgtgtgtgaccgagtttctccaaggaggaagaccaccattacctcgtaaatagttaccagatctagtcctaagcttaatcttagacccttctctaagcggttcccactcaacagacgaatcaacccgactcagtttcaactgaatcactttcttccccgtagccccgagcaagaaccgctcgttagaagcggttaagtacttaccgtaacagcttttaagacgaataacatggaaagaatcacgaaccggttcgacggtccatcgagcgtttttggtagatccgtttcggttttgtgttacggtttcttcgtcgtcgtctgctgttagatacttgttgtgactgttacgcattcgaatagcttttgctttctggaaaaactccattgctgagacagatactggtgtttctttttggttgaagctactcgccgtcgacttctgtaacaacagagaaggggaaatgagcgaatagtgataagaagaagaagaagaagaagaagtgagagatatggttattttatatgtgtggtggatctgacactggactggtctaaattgggttttttagttttttacggttacgcggactaggtaaggtaagaaatctggaaaagtcgttgctagctggattagagcgcgtatctaatatccacgtcagcagaaatttatgatttggatttctttccttattagtatttgttagagcttgtaacgcgttgttgtttcacgtgttttggattttgttactttctaatgtttgtaaatcttgagattaaagttaattacgaggattccaagacaccaactattgttaatttaaacagattttcaagaaacaacgcaggatttagattgtaactaaagtgtgtattttccaagattatatatataaaaaatcaaagctttgaatttttcttaaaaaattttggtgttaaatcttataggagaagatgaaaaaaatggccttaaattgtgttttatttttctatatatctattaattactacaatgactttgtgaaaacttttatcagttggaacaattttgtcttacatatcttccaatcattcatgatgtttatttcagattcttcaattcatagaagatttaaacataatactaggagtcaatgttgactattgaagattcatttgaaataataataaaaggtatggtacatacatttggtaaacttttatttgctatgtatataataatctatatgaagagaataaattacgatagagataggtaaccaaatttcccaataaagtatcattttacattgttactctatactttttccattatcttttaatttttcagtacgtatttagttctatgataagatcaaaatcggaactaatggacgtaattcttgatgaataatatgtgattttcagttagattataagcaattatgtggtataagcaaatcaatataaaatgtaaaatattgaaaaatataaataaataattaaaaagataaaagtatatgcccttttccccaaaaataatagtgtccctatgccataaaagaatggatcgaaaagataggatttaagcgaatatttagaaaataaatctataaacccttgcccgcaagaaagaccaagagaggaaattcatgagtgtgggactctcctaattgcatccctggaccatatgctccatcgctaaatcataactaccaacttttttaccttactttttgttacacttgtcttatgttaactggcactagatttgtttatcttaagccattaggtacaagtttttattgttaaggaataataatcgtatttttcttctttaatcatccttaggtatagcttttgtaagaaatatacagtcacttattacattttagaggttctactacaagcatttcaaaactatccttcaatcattgaagtaaacttaagttggattgttaagtgtcatattttcaactatagtctattataaaaccagaaattgttctagataaactaatcaaaactatacaattaaaaaatactatacattttggtggtattaggttggtaaaacgatgtgtgtgcttgtggagcattatctatgttagtggagaaaaaaaatgatatagatcatgtaattttctttaaattgtagatactaatacgggtaatcctcatctttttttccatatgttcatgcatgccaactaatttcttatatacagaattgtctaagttcaactcacaataataaatttctatagtagccttaatttaaacacagaaattaagaaaaactaatcaatgcacactgaataaaagacttagtcaaacttaccggttttgaggaccatctcggagacgtagataaaccaagagaagcaaaccggctaatactactcttcgtagacctggcagaaacaggtgacccgggttctgatccgaattcagacccgacaggagaagaaacagagctttcatcaccatcagacatgttttcaagatcagaaccatcaatagttataacatcccaaatcaaccagttctttgtctttgacgtatgaggctcatcgtgagtaacagagtttctccacggcggcgttccaccgttagccctcatccacttaccgcaccaagatttaagcttcacctgaaacccatctcgctccggttcccactgcgtttgccaatccatcagcttgttaaacgatgccgtttgagtcactttctcaccggtcatacctaacaataacggtttgttgctcgccgttaagtacgtgccgtggctgctctttaacctaatcagattaggtttatcgacgacgggctccaccgtccaaacggcacgccgtgcatctcctttacggctttgacggatggtttcttggtcatcgtcggcgactaaaaacttatctaggtggctacgtaacttaacgttgttaccttttgtgaatagctccattttttcttttgcttgagattttgaaagaagaagaaacaaaaacagagaattttaagtttgtgaaatgaaggagaaagatgatgtttgtgtttggttatatagtttaatgacaaaaaaataagacagaaaaagcctggctaaaagggtactttgtaagttaatagtcggagggattatgcagctcgcaattatttagaaatttcgcaaaatcaaatgaagaaaagactaatgaaaaagtattacgaaggttctccacctacgtaacttgttgaacattt

SEQ ID NO: 16239 - DNA, 1780 bp, Arabidopsis thaliana landsberg
tagaacatagttagatatgggaatcaatttacctaacccccaccgtgggtttccttttccaccacattccccgagttccaatcgttggcaattttcatcaaccagccgaaaccaggaagggattccatacgaagacgaagaagcttcgatgcgacgctataaaaacaagaacgattagattccataagaagatctagctgcagtaaaggatttcggagataactggcttaggaggaaccctatgaatgattaatatagtcattactttgcttaaccccctccgaatataatgttttgttcagtagaaaagctagcttaagaccaaattggaaggaacaaaagattaatctcataacattcaaagatggtatcagaagcaaacttctttacaaacaaaatattttcaagttcatcaagacaaatgcagacaatacaagaatacaaaacaaatgccaagctctctttttattaccaaccaaataacatcctacactcaagtaaccaccaaccaaggaaagcaaggtggcaagatctgcttcccaaaccaagaatccacaaaatatcggctcccgatactacataccgcacttataagttgatcgataaggaagtacctggaatttttttacatttgtttgtgctctctcattctgctctggactgaccagctcgagaagataaaatgatgccaacaataaggccgtatagagcgagcgcttccgcaaagataaggataagaatcatcccaacgaatagcttaggctgctgagcatttgccctgagagaatcgcaaaaccaaaaacaagtcaagatacacattacacatgacgttaacgtttttcattcaaacattctctgtgaggaacaaacctaacacccgcatcaccgacaattccaatagccataccagctgagagtccagcaagaccacaagcaagaccagacgaaaggtgagcgtatccgtcaaataggtagtaagacttagccttaggattgataccggtactgatgataacagcaataataagtccataaatacccaaaacaccagccataaccacagggacaatagacttcatcaccaactcaggtctcatcactcccattgaagccacaccaacaccactctttgctgttccataagcagctcccatacctaaaaaccaaaatccagtaacaacatctcaatttacgacccaatcacaatcacaaatcaatacctaaagccagattctgatctaagaacactaatacatcaatcaattaggccaacgattgtcataaaaaatctctagaagcaatcatctggatcagatcaaagggaatgatacgaattggaagagaattgagtcagatgcgaaatgagagagaagcaaaattgcttacaggagaagacaagagcggcggcggcgccaaggaagccgaagaacggagcagtttcatcgccgctgaacgtagacatcttctcggatctcaaaagttttggatcggatcgtttgaatctggagggagagagagagaattggattttggtttcagatgagtggaagagaacgacgtagtctgtttgtataatagagttgttgttgaacacgttgtaagtttgggccgggtcgaaactaaagcccatttatctttttccataaacgggtctacatgggctattttttaacaacagacccatatagttaaatgggctattaaacccatacaaacatcaccaattgggaccaaatagaaatagtatttggcaaatctgtatatggattcaatataattt

SEQ ID NO: 16240 - DNA, 2589 bp, Arabidopsis thaliana landsberg
ttggcttttttgcattgcacctaaccatgccagtgcccccaagaagattattgtagaaaatatagaggaaacattcagctctttatgattagaaagttttattcttatgaaatgcaatttgcaattattaagttgttatgtttgaaaaattgtgtgacgtgaacgtttactgatttatttttgataaatgataacacattattcataaccatttaaatctcatcatgtttcacatattggcccacagttattatgagaggtcgtaaatgagaaccaattatgtaaaatgtgctacttcacttacttggttcttcagatcgattgtctgacattaccattgttcaacaaagaaccaagtaagtgatctgaaaaaatggtaatctcacaaaatcgatctgaaaaaatacgaacaagggattagtttatctaggccataagagcatccccattagtgagatactccatgaatacctcataatatattattaatatttttatgtttaatttaagtagagaaacttatactaaaattgtgcttccattggtgagatactcttatgagtatctcattaacattaacatattattatatgttttttatattaaatttaaaatctctacaatattttcaaacatatcaattattatttttacaaattatattattaaatagttttcttgtttttaaaaccataattaaacataattaaacattactctacatataaaatcataataaaaaatatataaattaaacataaaattccatataaaaccatgataacataaattaaatagaaaaaatatataaattacacagaaattacatataaaaccatgataacataaatcaaagctaactatattatctattatggttttactcttcatttgatgatgcaccaaacttttgtcatatatgctcaactaggtcatcttttagttgttggtgcatatctctatcacgaagtcgaattcgattgccaagaatgttgtaaaataaaaatagaaaattttaaatgtttgttttctaattaaaaaaaactattgtatttataagttattattatgtttaatgcttaactaacaccaattaaataatattcgtatataatttaaacatatacataatagagcttgttatatagataatttaattttatgaattttaaaagtaaaaaataaaaaaataacaaacatataaagtatttaattgatattataaagtataaatgattttatttataacaaagaaaagaaattaataacaaggtgacatgtggaagagagagaaagtttctccgagtttctcattttagaaacgattatgagaaaaactgattaaaaaaattattattttcatatttttgatttatttttatttggagtttctcaatgagaaaccaccaatggagatagtctaaattggagaaaagagtatatgattctaaaatgtgtatgatttctgtatttaagtatatagtttaattgatcccaaaaaaatgtatatagcttaaaatttctttgagttatttcattggaggaacatttttagatacattttaacattagtattacgtgggacacaacatttaactttgttttatttttgttgacataacatttgcttactcatacatttgagggctcaaatttatgttgaacctagtgcccaattatttttcctgaaaacttaatgctttatttgcacttttaaaactttaggactttatttacaaaaatataaaaatttagaaccttaaaacctatagaaaaaatgaaaaaaacatgtggacctagtgctctagcactgtcagcactccctctaaaccgggggtggagagattagaaccttattatagcctaaactatgcacataagattatttacattggtttaaaattataacaccctacacatcattattcaacattcaatttactttcatatactacaatagtttttataataactactacggtaagaaaatatgaaaatttttctatatccaaatcaaatgaaacaagtgtctatttatagaataagaaaaatgttgaattttggtgtaaattatttatgtatataaaaaactttattataacttaactgagttcaaaaattattgtgatgaaaaaaaaagtcaaaaattttagtgaccgaaaacacaacacaagacaaagacaatctcacccaaccaaattcacggtgttgataaattacaacaccaaatttgccacatcctttacaacatttattaaaacaaccattgcaccatgttcaattattgaatatttttttaacatgtccattataagtagtctaagtagaatcatattctggaaacaacctaaatgcgtttctcgttctgtagtctcactaagtcaatgcagctaaaatggatttggtaaacttgaaaaaagttgttggccacaaataaggaaaacaatcttgttgtaaaaagatataatttttgttcgggtcacacaaaactaaagatgcatttttatttatgaaaaaccaaacaatattatatggggtacatattttcattttcttgttacccatgtttttttctttttttttttttaa

SEQ ID NO: 16241 - DNA, 1221 bp, Arabidopsis thaliana landsberg
aactaagtcacaaatacattcatgtgagcgcagaagcataataatttttttcattgttcacacattggctgtgcaatagaaaacaaaaaggtaagagaagagctcagagacaatgctacattgatggtatatgatggaatggggcaggttgctcatagttatggacttggacgtagaaagcaatgtctactttgtacttctgccacagtttttgtagtctttctctttcccataggctcttcaaaggttccttctttgccataccaatcatcggtggaataaccaatgacaggatgagctataaaaatgaatcaagactgagtctttctatcaacagtggcaagacaattttcaatgaatttgtattgctctgtgccttctctccaatggtcttcagtgtctgctacacaaaaacagaacattccgttatatgttctgtacatgcccattcaaccgaaattcgttagatattgttctggaacttgcaagaaaatgtcaatagttaacaacttcaccaaaatttagctcggttctcagcaggaaagtagaacatgatctttacaggaacaccacactctcctccaaagtctggaccggcatagaaagatctagtgtctggtcaatccgctcgtggttgctactgtagtgaaaaggaataacataaagcattgcaggagtataagggaaaaacaatgatgaatcttttcttgttgactaaccttgcgatcatgtaggggacagtagaagcaatgggctggacttgagctgtgaactgatcccacggggagagatacccattggaataagtgatatctccaatgtggaaaacaatgtcaatgttcttcaagtccttgatgagttgatcagtggtgttgagagaaccaggctgataatcattgtactcgtttgaaccatcccgctctcccttcaaatacatattacagaaacatataagtcccgagaggaaacactaacaaggcaatgtttttatatagaaaacaacaagcaagtaccttccccatgtccccgaagattatgacccgttgtaacgagtcttgtccaggataaggagaggacttgaaagtgaaattcttgctccaaactattgatccattcatcaactcatgacccatcctgtatgtgtaccttgaggtagttgatgatccagaaagttacaaaaccgttttccaaacgatgtgtttaaacaagaaaggaaattga

SEQ ID NO: 16242 - DNA, 1033 bp, Arabidopsis thaliana landsberg
gtaaaaatcaaccatactttgtaaaacatcaatgcttcataaataataaatccctttttctgcatcagaactgatgaagctgtgattctcaacttactttgtgccttgcatcttttcattttttgtaaagcactgcccgaagatcggcctcgttttcaattgatgtcattgatgtgacatgatgtatgatgtgatgctatgcgatatgatgcgatgatatgatgcaaagaatgatgctaatgtatcgtgccaataaatgcccaaacacacacatccgaagcttcatccacaactttcattccctaaggaatgactaaaatctctttgctgtttatttttcggctgcacagtttatttttgggtgtaagttgtgcattccctaaggaacgtcttttgaacttcttcgccttctatttcggcagtattctcgttgacttttcgcgcttcgccttatatttcggcggtatttggctctgcattccctttggaacgacttttgagcagaaaacttacactgcgctcccttaggaacgacttttttgtagcttcgtcacaacttacactgcgctcccttaggaacgtctttttgtagcttcggtagttttctagctcagcattccctttggaatgactttttgagcttcggcaatttttaagcttcataagtctgtgaagaagatatatttcattttaatagaagtgaaactattacaaggaaataaaactaaattgacattacttgttccttattggaaaacaaaacgacatagaacgtataaatacttcaaaggtaggatatgtcaataaatgtgcttcgactctggcacagtgctgttgactgtgcgagcttcggactgttctctgaagtccctctgctgtggagcgtattgactcccttctggctgttgaccttgctgcaatggaggtggaggcggaagctgctgccaggaagcttgaggttgacttgccgaagctacagaagccgcagggtggttgtctatgtattgtgggacataaggcggatgaaacgaag

SEQ ID NO: 16243 - DNA, 1486 bp, Arabidopsis thaliana landsberg
ttttatttttataattaagaagtaattatgagaggagtggaatgtgtcggaagtacatgatgccaaatgtcatcgtattatgggaagttagaaaaaactttgtcatgttttgtgactttgttagttctagaactttatgagttatgacattactcttaatctcttcagatctcgataagtctctatccgagttgggtttgtttgatagacaagcacttgtagtggttccgcgaaaaagagcaaccgtctatcaaagaggaccatcttactctgagtctaactacaacacagaccctaacagtggcggttactttgcttatgttagaagagtactgtcttatgcaaacctgttttcatactttggtggtggtactgccaacgcatcaagctctgttccagaccgtcaaacaaatatgcgggagtatggtgagttcataaaatccattctaatgcagaaagttatgtaattgctaatctgattctctcctttttttatgtctataggaccaaatacggagctgagaaacaatctggggcaagtaggttcctcctttcaagatccatcagaaggtaggagcaacgttaggaataggagaccaaccacttctcggattggaagtaacatccatacgctgatcaacattaagtcatatatatcaatcatcaaaattatctcatgtacataaccctctcaatcataggcactacaagaaaacagtcaatttgcgaggaagcgttgcgagggaaggcattactcgcagtttttgcgaaggtattgcgagtaacatgctacataccagacgtgcgtagcaactccgtcgcaaaacttgcgagggatcgcaaaacttgcgaggcaaggcttcctcgcaaatttgcgagggaagtacgatggtttcgcaagaaagatattatccatcgcaaatcccaagcagatacatcgcaaatctttaccctaaaccctaaaatacataaaagtgttttgcgatctttgattatcatttataaatgtgaatctaagtgaccatataatcatacaagttgattatatggtttgcacaaaaaaatattgtattggtttcaatattaacatttcattttgaaaatgttaaacattcatgattcatacttaagaaaaaaccataagatcatcattgatgtatttggggaaaatacacattcgaagtatatgatgataaaataggttcaaatgtagataattaacgttctaatgattcaaaaaaatgaatccgaatgattttgagtaatgattgttgtattttcgaaattgattctactttgcgaggactttgcgaggtgtttgctattgtgcgtagcactttccacgcaatatttaccctaaaccctaaaatatttagaattttagtcatgtccttattttgctgagggcttactagacataggagaaactgaatcaatatgattattgaatagatatgatttaatggttcaacactgcagggattgc

SEQ ID NO: 16244 - DNA, 540 bp, Arabidopsis thaliana landsberg
attgcttagtccttctcttgaatcgttatccagaagaatttctaatcgtccaccttgtttcacgagcaacccgtgcttctcagcgagatctgcagggatgtaactctggtgacggtttctggtacagtggtacggtaatgatttaagcagcaagacaagaccactggctttaccaatgtgtgaagctgcatgatcagctgttgttgaactaattccgcctgcttggagtgtattgtacagaagagtggaaactgtgtcttctgcgtatttctctagctccgcaatgctctctggtatatcgtctacttctctttgggcatctcggattctagcgtcaactgagcgttttagccaaggtttactgatgttatgttctgatattgcccaagacagagcttgtgcagctggatggtttatgggccttttggtgtagagcttgtcaattgcttcttgccaccaaagtaaccgcatcaagccgattttgggatcagatgcaacattcatggctcttgcggcttctacattaaaagcccggagagc

SEQ ID NO: 16245 - DNA, 665 bp, Arabidopsis thaliana landsberg
  unsure (1)..(665): unsure at all n locations
accctaatccatacaccccataaccagtaccctaaaccctgaaccctgaaccctgaaccctgaaccctgaaccgtgaaccctgaaccctgaaccctgaaccctgaaccctgaaccctgaaccctaaaccctgaaccctgaacccttaacccttaaccctaaaccctgaaccctaaacccttaacccttaacccttaaccctaaacccctaaaaccctaaacccctaaatccctaatcccctaaaacctatatccctaaaacctaaatccctaaaaccctaaacccctatatcctataaccctaaacccctataccctaaaaccctataccatgtaccctcaaccttaaatccctaaaacctatactataaatctttaaaacctatactctaaaccatagggtttgtgagtttgcataaagtgtcacgtataagtgtttctaacatgtgagtttgcataagagtctcgactatgtgtttgttcaaaagtgacgtaagtgtttagactagagccggccgtgagcacaagcgggccaagcccatgcttgcggcagattatcctataattatgttttgcggcttcacaattttgaaattgttttgttgtttagtggtcgagtcagggatgagtttgttccccaacttaaaaattccctnatcttcctag

SEQ ID NO: 16246 - DNA, 511 bp, Arabidopsis thaliana landsberg
ccactggtgggatttgtctattcctgacccaactttcaaatcggacgacgacttggtgaaaaaatgggttaacgtatcgaccaaagaagcgttatcgagccgacagaggaacccgatctcgataatgacgacaagagccacgcagattggcaaaaaggtcgagactttacgcttgaaagaggaaggagacgaagaagaagaagtagagccattggctactacaggcaattcttcatgggtcaatccaattttaggacctcgaagattggagaaaacacccattatcaaagcgacgattttgtatcaataatgaatggattttaagaattgtgatttgggtctttatcgttagatactttgattgatgagaaagaagaaaaattggcagattctctacctttagatcttatttatttcatttcattaggaaactcactgaaacatgaactaaaaaaaacattaacatatatgtctttttcatcattagggctcgaataaaaacattaaacac

SEQ ID NO: 16247 - DNA, 1657 bp, Arabidopsis thaliana landsberg
tgcaaaacaattctaaaataaggtcgtttagattttcaaagaaaattctttcttaaagtactaaagttaacaccaaggcttagtaaataaaagtaactaataccaaattcaatgtattttgaaagagagagaataacatatttttagacttatgaaaaatattcatgttaatcattagcccaattttaacgaggtctaacactcgtgatcgatgcatcatctaccgaacaagtaaaagacatgctagtagacggaccaggcagtaatctctcggctaatgggttcggctcggatctttccctgaagaaaaatccaggtggttgaggcacaggcagagtaattgaaacattagttagcattcgaaatattgtggacatgcttggacgatcgtcaggattttcttgaacgcataataacccaatgtgaatgcatctaatgacttcatctttatcataattctccccaatggctggatctacaagttccaacaacgatccattattcctaagcctccaaacctatttattcatttgtcaagaaactaatgttcaaagtcatgatcacagttaaaaggagtaaaaaatatttgtgattgcattggcgttttaaaacttacatgtgtgaccaagttgcttactgaaccatctatctgatggaagctactattcttcttgccaccaataatctccagaattaatactccaaagctatacacatcacatttcgttgagaactgtccatttgccacatactcaggtggcatgtaaccgctgcaaaatacaccgcatatcaattttagttttatcacctactctcaaagggccatcaagtttcatattatatctaaatgccaattacttacaatgtgccaactactcttcctgtatttgcttcggtttgattaactctgaaattcctagccagaccaaaatcagctatttttggattcatctcggcatctaagagaatgttgctggctttgaggtcacggtgtatgattgtgagtcgtgaatcttgatgaagatagagaattcctcgagtgattccctcgataatgttgtatcgttttgtccagtctaacagcccttgctttgtaggatctgcacgtacacaagtagtcatgagccacttagattttataatcatataagtctactcagaatctcaggttaatatgtatatggtaatgccacataccaaaaaggaagtagtctaggctcttgttggggacaaactcgtaaacaagtattttctcttctccttccagacaatacccaagaagcttaacaagattcctatgctgaagtttggcgacaagaacaacctcgttcttgaactcttgtgcaccttgttcggatgttttcgatagcctcttcactgcaacttctgttccattaactaacgtgccctaaacacggatgatgatatgatcagtttaccctaactctgtaatgaaccaggtagctagagaactaaagactatatctataccttgtaaacttctccaaatccaccttgacctagcttgttcgtctttgcaaaattttcagttgcaacttcaattgtcttaaaatcgagttgttggaagtgtagagtcgtaataccagctgcaaaatcaaaggatacactcttatattactaagaactttgaatcatc

SEQ ID NO: 16248 - DNA, 1888 bp, Arabidopsis thaliana landsberg
cagtaatcgagatggagttctatttagcagaaaaaactgcagttttagaagacttcaaaaaaaaaaaaaaacttcgtagagttatgaacaaatttgtggggttcaaatgatgtgaattccgctaaattgttggagacatgattcttccatcagatctccacacattttgttattcaattaccaaaaaaaaagatagaaatagaagctgaaataaaaaccaaatatactaattatattgtttcaaagacgaataagatcaacaaacaaagatgtgatatgatccttaaatcttccttcgggatgtgtgtattcttcgccagacctataagtgaactctatcatttttccaaaatcaatggcccgctttagaatttgccgcggcacactctttgttgtctttaatatctcctcgttcacagttgtatccaagtccctagccatcttttgaagccttgtgaaagtttcctcctcggtaactttgtattgcttcatatagtacatgatggcattaacatcaaaccctctgctcatgtcaccctgttagatattactagtcatgtttaacgtataatgtcttgatcactaaccaaacaagaagaaacgcttgatcatacaatttttggtacctcaaagccggctatgtcattcattagacgagcccttttagcctgagcctcaacaaattttggtctggattttagccatttataagcttgttccctagaactttgtcccaacccaagaaaactgcatgctatacttacatacattgttacttcgactcctccaatctccaagtactcgtcaaatgtaggcaccacgtctccttgttcccacttggtaaagcaaaagttggatcgtaagtataccttgaactgcttattaggagcatatagaagcacgttaaacaacatctaactatttaattttttgatatttggatgttacttatatatatacactacctcttcaagtgcaccttgcacgtcataagacaagccctcttccattatgcctgcgttttcacactcttcgaaagtattccaagcgaacttgaagacggttttcatataatctggtaaactgtccatgcaatctggatcccatctgtacatgcatactgagatatttgtacgggatatatattcaccaaaaaaatttaccctatgatctattatatatgaaaccatatttctagaaaaatttgatttcttaatgttttgtgttcatatattttatgattttacatagatattaaagaaatagacagaataaatatatttagtcacgtaaagtattggaataattaatgtatttgatttcacttaggatctctaatctatttcactaggattttctttcatggttgggttggcactggcctttgagataagatacgcattcgtgacaagaaagtttggatgatgttacctttccacgcattgaacaagagctgcaacttcagaaacattaccgtatctatcacacgtgtcatcaacaagggtgaagactgtgttgatcttagctagtgaaactttcccaagtgaaaattgtggctcgaaatatatcattattgcaaataaatagcattcgatcaatctatccctgaagtaaggtgggagtttagatgcaaggtcttgctgcttccaccatctgcaaaacatgtcaatgactattgtcaacttgtatcgcaaaaaacatatagctagaagcacgaaaaatctagagtatagtacttggtcagagttttcaattcttgaatccaatttagctgcaagaacttgaaattgatcttggcaaatctaagtagcatcttgttgtgatcttcttcttgttcatagaaagaaatgtattccctcgcgaaggtcatgtcggcatagtaaagttg

SEQ ID NO: 16249 - DNA, 2258 bp, Arabidopsis thaliana landsberg
  unsure (1)..(2258): unsure at all n locations
atgatttagtggattcgtagaattatgacagagaatctacgagctgtgtttgtttcctcccttcgtttttctggttatttctttttttaacttcctagtgaaaaaaatttctatacagcgtatattattattagtcaaattttgaatttgactgaaaaaaaaaagaatggtacaatcccacaatgagaaaaaccacaaaccctacaaaagttgaagaaataatccattagaggtaaaaagcgacgtaaataaaaaatagtagatatctgtttagagaaattacccgctttttcattgtgtgaatgctttgttaattttgaagaccaaaatagttgcacaaaatagtcaaagaacaatttttcaaacttttttttgaagtagacaattattcattacgatttacgacatttctttaaagaaaacgtagattatcttacattaattgaagacaaaatgtgtatgacaaaagacaattcaaaatgaaattgacactggaaaacaaaaaaacagatggacattagcaaaagtaagctgaacccatacatatgcgctctttgatatttcctctgtgaacttgttgtcaacaagggtaacataaattaaaggatacatagtttagttaattcatatttttttatatagtttaaaaaccatatagttctcctttttgaaaatcttcatctagtccgattaatttccgcttaaccgctagaccaaccctatttgtttcgaataatttttttttggtaaggtgagggggcaatgccccctacaaatttatgaaaagaacaaaaaaatattacaaaagaactctacgcgggtacgcagaccctcgagcatcgtcagataaacaagacgacaaaccgtcaggacatacatcataaaaatgcaaacctaaagggagcgaaaatgcatagttagctaacccatcagcaagatgattaacttctctatacacatgtgtaattcatactctctactccttcgaaagaaagccataacacaaacgtactaggaaagacaagggatgtgtgttgcttatcccggtcttgagaaaacccaccactatctccgaatccacctctaactccaactgaggtatccgtctcgcccacgcaaaatataggccatagtacaccccccaaagatttgtttcgattaatgactaatcctataaaaaaatctgttattttatttaatttaagaaaagaaattaaatataaagtaacacgaaacaatctctatcaacagtaacattgtcataaatagttaagtaaaataattaattaattaaaaaataataagtaaagtatattgctatgattgaatgggaaaataagtaaagaacaaacatttatataaacgttgtaaactattttattattttatcactaaaagttgattagtgagataaatttcagtccaacactcatatctttgtggaagactatctaactaacccaccaaacaatcattttctaatctcagctctcagattcagataccttgtatctgtattcattagtagaaattaatagtaacttcctgtttgaccaaaaaaaaaaatagtaacttccctagggttagtttcatttttatcttcggttatcaattatccggtttgatggtccgctccggttattgactgcaaaggccaaagagtgacgtatataaataaatttaaaattaaataaaaaaaactcggtcacgccgtttgtgagctatcacgcttatcgccaccgatgctttagaaattccccaaactcacgcaatctcttcttcttcttctgggttatcatcaccatcaatggactccgagtccgagtccgagtcaaaccctagcaccacggacgaattcgatcgattcctcgacgcacctgacgaattttactacgattgcttaccgattcgttccaattcccatcaaccttcgtctctcttacggcggcgaaagtcggcannnnnnnnnnnnnnnnnnnnnnnnnnnnnnnnnnnnnnnncatcttcttcttccgatggatttgatgtcggtgagaaatccagctatgtggaaaagaacgctgagcttagaggggatattgatacaagcgacgtaattgaatcaactaaggactcaattgatctatcttcagaaaaggagaacgatttggatgtaattagttcgtctgggaatgatatggatgtaattgatcgggtcggaaccgggttgacccgtttcaggagaatcacggtgacaccgtgagcagcgatgataagga

SEQ ID NO: 16250 - DNA, 3083 bp, Arabidopsis thaliana landsberg
  unsure (1)..(3083): unsure at all n locations
caaaacacagtcatgacctttagcctttttccccaatccgaaaaacataaaccctaatttcgattggattaaaatcgaaagattctatgtgtttggacgcttatttgactacggtttggtcggaatttgaaattgaggagtccgattagtagcgtcgcgatgaggtatatgttaatttagggttcgtttaattctgggtttcggattgggatttcgcgttcttggttttcctctcttttaatttcttttgttcgtttgtagtggattcgactgtctaaaactgaatataaagtacggaggagaggtctcctttgtcgatgagtcgttcacttaccttggaggattcgagaagagggacatgtcgatggatcccgatctgatgacgtggtcgatcttccccgtgctcggggacgtcctcctggagttaagaatggtcaagccaagaacgttggcaagggacgtagaaaaggatctgaggaagcagctccaagacctccggtcttctttatgtccccttggactgataaggtcttcgatgtttggagacctgagaggaagtagtattgattgaagtcttcttttgtgtctttattgacttagtaggatgatatctatgtacgatgttgttatttggttggtaggatcctgattagtttttgggtgggatctttactttctgaaacttaacggctcttttggatcaatgacaataggattaagatatttaaaagttctgattcaactaaacaacaaagcaacaacaaagcaataacaaagcaacaatgaaacatagagttcagaccccctaacacatccaacttcttacttcttccccattccaaggcacatcccaattacaacaatgaaacatccccaagacaacaggatcaactgcctaagcatttgttccttgtcattagcacccaacacttcattttcaagcttcttcttctcatcctcaagtttcttcttctcttcttcaatcttattcttctcatcctcaagcttcttcttctcttcttcaagcttcttatctatctcttcctcgtgcttcttcagatgctgattaccaacagaccctgacagtgtcaccaattgttctttcattacctttaaagactctttcagctgacgaatctcatctctagcctccaataagctctgcttttgccaaccacatggcttctcttcatcagcccaattgatgaaaccatgaacaccacatctgaagaatctcctacccggattttcatttgtccatgcctttgtaatcgtcgttcccttaccacaattgcaaagaggaccccaactacggctcactgaatttgcatcagatcctgaactttggctcatcatgttggtaaagagaaattagggtttatgttgctttggaatgattcacgatttggtcacgactgtgttttgtttactcgatttaaccacgtgtggttatgttttaaccccagttaaagcctccgttagcaaagttaatcaccgttaacgcgggagtacaatttcaccactttaaattagatgaatgttttaatagggcgcggaaactaaacgaggtattattattccaaatttaaaaacacgggtattaaacggccaaaaattaaatagatggcgattttttcgggttttttccctaaaaaaaagggtttggttctattttttcttttttgggattttgaagttttcaagtttgtccatcactttgttttcacgtttgtcctgtacactgtggacctatttttttattaaatacaatattgattatgttacgtagacttttcttttatatatatgctattgttttgtttgatttaaatatatatatgtttatattatacaatgtaagattagtatgttttatgtttcatttttgaagataaagaaacaaaacaaaaagttcattacacaatgatttctagggtaattaaagatgaatttattttcttatttacataatataagtgaagaatatataatttagtgcaaataaaatgggtttgaaatttttgaatgagcaaatatatatttaaacattgcaaatatatatatatatatttatttttttgtcatccgattataattagggctcaaacgagccaaaactgaggaatattgtttacataagttatatgaaacggttcagtgcgaacttttcgcgtcaagttatccgcttttacatttgcatttacatttacatttggattttaacttattttgtatatttttgaatactttacctacttttagctatattaggatataaatactcaagtttttcaaaaaaattgtgtattttcaagtaatttgaatatatttttatacaaaatttttgagttttggatattccgggtaagcctaaattcgaacccgaaccaaacccaaaatcttaaaataccgaatcttagatttccaaatccaaaataaccaaacccaaaaaaaactaaaaaaaaaactaatccaaacccgatccgatccaaatccgaaccgaacgtccaggcctacttgagcctatacagggataaatataattagcgaccattctatttttcctatgatacacttccaaactgaacaaaacgcaatttttatcattattgtaaacaaaacgcaaacgcaaacgcaaacgcaaacgtgaataaaacttgaatccactcataggagaaacttccaccactgattcttgcataatccgaaaaatctctgcgaatactcgcagtaatggcctcttctcattctcttctcttttcttcttccttcctctctaaaccctcttctttcacttcttctctgagacggtttgtttaccttcccactcgccaattttggccaaggcagcgacatggtttctctaccgtcttcgccgtcgccaccgagccagctatctccagcagcggtcctaagaaagcagagccatcgacggtcgtgcttcctagtaatgaatcatctgataagcttctcaaaattcgacacacggtacacttcttttggctctgtttttgttttgtgattttaagagaattatgaaaaatttattcaagttgggtactttaatngctgtagtgaagttg

SEQ ID NO: 16251 - DNA, 1998 bp, Arabidopsis thaliana landsberg
cgtgggagagccagaacatctttggagacaggtgttcgagggagagcttgacgatcttggagataggcgctcgtgtgagagcttgacaatttcggagataggcgctcgtgtgagagcttgaaaatcttagagataggcgcttgtgtgagagcttgaggatctcggagataggcgctcgtgggtgagctagaacatctctgagatatgcgctcgttggagaggttgatgatctttggagatagacgctcgtgtgcgagcttgacgatcataggagacatgcgctcgtgggagagcttgactatcttggagatatgcgctcgttggagaggtagaagatctttcgagatgtgcgctcgtgggggagctaaaagatcttttgagataggagctcgcgggaaagcttgatgatttttggagataggtgctcgtggtagagctttaagatctttggatgtatgtgctcgcatgagacggaagagctcgacgattttggagattgtgggagagcttgacgattttggagatgtgcgcttttgcgagagttagtgattttgaagagttaggcgtttgtgcaagagcaaagttgttttaacgaggaaagtctcggtgaagatactaaaatcgatgcaaggcgtgctggtcttgtataaaagagctcgatgaggtcaaatttttaggtgtacttggtgagattagtgtgaggagcatgagagataaaggaggtcggtcgtagagatgtgttaggcgagatcgatgtgaagtgcgtaaatgtgagcacgaggtatttgagctcggctacaattttccgttgaggccggcacgagttgcgtcaaggtcgcatgatatgcgtcgaggtcggtgcatgttggatcgtgcgcaatgtgagtcgaggtcggcacaacgcgtgtatgctcggcaagaatcttgcgtcgaggtaggcaggtgatctagttcttacatgggctatgagtttgaatcgctaagggagttcggcgggaaaggagtcggtgaatgaggtcggcaatgagttcagggagaatcgttgcgagatttactctgatatgttgcaagtttgcgagacagcctagctttgttcttctacaggtttgcgggaatgcttgactctgatttggtgggagtttgccgagctgtcaacctttgttcttctaggagtttgacgagctatgtagctctgatattctacgaatttgttgagatgcctagcttcatgcttctaggagtttgtcgagctgtgtagctctgattctctacgagtttgctaagatgcctagcaccgaaatgctgtgagtttgccgagctgtgtagctctgatccactgcgagtctgcaaagatgcatagcaacgatatgctggaagtttgccgagctgtgtatctctgatccactacgagtttgctaagatgcctagcaacgatatgctgggagtttgcgaagttccctagttagatcttttgcacgtttatgggaatgcctagcgttgggtggagaacgatcggggataagttttgtttggtgcgatggatctggtcaacaagatggttttgttccatgtgatggcttcgtctagtgagaaggttcgatggaagcagaacgttttgtaagtgatagatgtagtgtggcatcgccaaaggtgtagctcgatgtgattattgatgcttagcaagattggagattagttcggcgatttgatgaggattactttgtagcttagtgaagaacgctcaatcgtttccttcggggatgggaatgctttgtagttcgctgaggactgaacgctccgtattttagagctagaaacacttgttggttctgcgatgaacgcttggtaagtaacgctcgcctgttaggcaaggattgaacgttggaggtttttgagctaggaacgtttgacagttttgttaagaacgcctggtgagtaatgctctgcaaggaacgcttggctgggaacgcttgcttagtggatatagatttacggaaa

SEQ ID NO: 16252 - DNA, 2392 bp, Arabidopsis thaliana landsberg
attggagagccacacttcacaccctcaattcatctcctattgatcgtattaacatggttcttgccaggctgatcttccaagcaacgatctatcccatttggctagacaaaacgggggcgtctgacatcagcaagctagccacccagtttggtacattgagactcatcgatgaagctattagtgggaaacttgcctcatacacatcgtacgaactgcgaacatctccaactagaagctttaattgcttggttccaccatcttcaacctaaatgttctattttgttacactattatttctttgtcgttctctatttttcgttcttctctcctctgtatataactttttcttcatttctttttaattaaatattatatctcaaaaagaaatatcattccgttgaattagtttgttgtttcgttctttttttagtttgttatttagaatttaatttaaaaagtaacagtatagttttatttatatgaaactgtgaccgtcctatagcacgggacgtaatactatactttataagtatgaaaaatacacaaacacatagatgatgagtgagatgatgagtgagatggttaacacatgtatatatatatatatttttttgaggacttttcatgtgacatgatattaatgacaagctaacgatagttcgtaagcgccaagaaaaattgatctccgtagagtttttagtgtttattgtatttatagtgttagtgatatttttggattaataggtttctagtggtattaaaaaaaatctaggtatgttatttttggaacaaaaacttagttcattagtatcataatttaaaagttaaaacccgttcaacatccaatttgattttaaacactacaaaaactcccactatcataattttgaaatttcaactaaacttgtgaaattccttttttgtatctcttattatgttgaaaacaacctaaacgagaatacctcaaagtctgcgttatcttctgaattctgtaaggtcctccactatcttcaaatccttctattctcatctcttcgttcataaatcattttgtagggttgtttcgaatttgactcgtaaaacataatgatcggagcgttaaaggttggtgcttgcttgcttcttacgcttcccgaagatgtgttttctgttatctctcactttctttctccaagcgacatttgcaatataatcttgtgctgcaaaagtctttgtgcccttgtcgattcggagaagacatggcttgttcaatatgaagtcgttaaggttcttcctttcttggaaatagtccaatggcgaatcgggatctcttcttacaaggccctttgtaggtttcttgtagaggtggtgaagccgcttcttgggatttgggtgcaacaaaaccctgaacttgggaatgttgtttatgtgatgcctggtttcttgtctgttgttgggtgccggataattccacaaaaggttgctccgttgtggattcaagagggtcgagtcaagtggtcaccggtgtttgagataatttgcggctttgatggctctaaggggtttttcctccatggaagagacaaagaaggcagttgcttataccctggtttcgttatggacatcgagaagagttgcaatgtgcttcagcttgaaattgagccgagggaagagaagagttcgtgcaatgagattgagagaggagcctcaagaaaggagggagagattccattttggatgctcgcttttagcgatagaaaacacttgctcaatattgtcacaaaccatgtaggtctacatgtggtggaaccattaaatgatatgttatttcccacattgaaagatgatgaagtaaagctgaatgaacgcagaaccattctccttaaaatgcacaagtttggtggaaattggaagaacatgaatttggaggaggaaagtcagttgagttacaatcccatgcaggtaaaaataaacgagatgttagaaaatctcgatgatgactttttttttgaattgcatgaggatctgatagaggtcacaccaacggagagcacaaatgttttacggaagtctagttcttcaaagaacacaacaccttcgcagagtgaaattagacattcgaatcgcaaaagctttcttagctctggtgatacattcggtcttggactcaaagcttcctacactgagatgtcttattataaagggtggccagacatgtacgtacaccactttttactctataaactaccagttaagaaagccgtcgatcacgaaacgtatgctggtttgtggggaggaacgtttggctggccagctggaaaatgtcctaaaggtaagacggaaaagtctctttacttactgatgctcacttatgaaaaagaatatagtgagagagttccattgggacaaaaat

SEQ ID NO: 16253 - DNA, 1088 bp, Arabidopsis thaliana landsberg
actcgcctgagggaacggcgaaagtgcacttcgagggattcaatttcataacgaacttgttcaaaatatcgaaacactgctgaagatgatcgagatgcgaagtggagaaagccgatttcaccaacatgtcgtcgatataaacctccattgttttgccgaggagatctttgaacagtatgttcctcgttccgttataaaggaagttttctcctggtcatccgggttcatcaggatctgattgtatgcggagaatgcgtccataaaagataacatttcgtgtcccgtagttgattccacgtgtcggtcaatatggggaagtggaaaacagtccttcgggcatgccttgttgaggtcggtgaaatctacacagacacgccactttccattctttttcttgaccaccacggggtttgcaagccattccggatacttgacttcgcggattaatccttcttcgaggagtctgacgacttcggcatttactgcttccgcgcggtccggaccaagcttccgatatttttgttttaccggtttgaaagttgggtcgacatttagctcgtgcgagatcacctccatactaattccagtcatttccccaactgtccaagcgaacgttgctttattcgttttgagaaaacggactaatttacttcggaaatcttcgcccaaattagctccaatgccaacaagctgatctgggtgatcgtcgtttataactacccgctctacgaggtcgtcgcctacttttttgaatggatttggggacgcttcgagctgtggtcgctatttgatcttgagtttatgctcggtcatgtagcacattctagacgtacgttgacttcccaggacttgtccaattccacctggggttggaaacttgacacactgatggtaagtcgacggtacaggtttcatctcgtataaccaaagagttccgagaattacgttgtatgcggcaggtcggtcgaaaactgtgaactcgaccatcttcacaactcctagcgcagttagaggaagaaccaccgtgccaagagacattgaagtttcgctggtgaaagatacgagtagactcggagctgccctttata

SEQ ID NO: 16254 - DNA, 1206 bp, Arabidopsis thaliana landsberg
tgttggtaagtttttaaaattacttattgtgttttatggatcgtttttgaatttggacggttttctttcatgttaccgttttcagtaaaatttagtattgataaaaaactttaaaaaaacaagacagcatgaaagatatgaagtcaactttctttctactcctcttcttgataagtttaaatttgattaaaaagcttctcttgaatcatcaacatgcataaagtgttataatacaaaaccgaccttagctcagttggtagagcggaggactgtagttgacacagataatccttaggtcactggttcgaatccggtaggtcggatcattaaagttgaaagctttttttttttccatttcgtttcaaagtgcttagacaagagtataactacaaactcgtttttctatgagaaattggtgtaagagaattgcatagctattgacagtattatcataaacgagtaggaaatctcgaagaaattttcactgtattttaaaccgtttaagggtaaatcctcattttcgtatattcacgagattgaggcaagatattaagtgtttttctaatataatgtttttataaattcaaactttgtttacaaatttgtaatagagactcactatgagtatgctaacttaatacaaatcattgtgttcatagaatatttagatcagtacacatgcatgaaatagattacaatccaaccttagctcagttgatagagcggaggactgtagtagacgcagattatccttaggtcactggttcgaatccggtaggtcggaatttgctcccacatgagagctttttattttcttctgttgtgacattaaggtttttgaattttataataaacggttatatggtggtcgataattaaacataccaaaaagttttgctcgaattcttaaacgatccgtacgtttagcttttttcaatactgatactatgagaaatgatttaaaagtgactaaaaattatgagttttctaattttctttggccaaacaaacatttagttttagattttttaaaagaacaaaaaatgtatgcataattatattcaaatgcttgtgggttgtgcctataagttgtcaacgttcataccagggtagtgaaataccctttcccacttttgtgcacgatttgtttggctctattttcaagatataaacaatcatagcacactctcacatattcatgcataa

SEQ ID NO: 16255 - DNA, 538 bp, Arabidopsis thaliana landsberg
ttggatctgggacccaagctggttcttctgaagacttcaccaactcagtctcaagagccctgacaatatgcataaatgtatattgtggcctctcactggacttttgggtcgcttcagtggtgaacaagatcatcgtacctacgaacccatcagcagtcaaagttaactctaatggtgaagttcttcaaaccattcctctcaaagataaatttggagacactttgctcagcgaagtcaacgaattcgagggcaatttatatataggaactctcaccggaccatttgctggaattcttaagatcgaaaagggttcttgtcctgccacttagatctcttatttgaatgcagccgatgtgttacaatcatatatatatatttgagctttttatttatttctgaataaaataaccacttatcttttacttgaaatagcaatttaaagcatggttatcttgtatatagtgtttttttttatattaaaaatatcttggttttatttttccattaaaatttattttgccaaattcaacgagaaaaa

SEQ ID NO: 16256 - DNA, 1133 bp, Arabidopsis thaliana landsberg
gaaaagtagtgtccgttaccgcccttgttctgtgaggcatatttgttccaagtcaagaatcttcagctctgtaattatttagtccatatatctcaattactactaccattaactatactgattcagttgaatcctattatcttctcaaaacataatcaaattcaaagtaaaagcctttcctagtaaacgtttccattcaacattattattgcagtttgcttcaagtgacttaccagagattttgaaatcaattctgaagaaacttccatcaacaaatgtacattcctgtagtagagaaaattgaaaaacatcattaagtagaaaataatcgaatgatataaacaaaagtaatctttggaatcataaagaacaataaagtacagaatcgagttaataaacttgtttctcatacacaagataatagaggtattaagaatcagttaaaaaacactactagagttcataaaaacaatgaatcaagaataatctaatgtggctccaagcagcatacatatccaaaaataaacaaagcacaagtgattacaagctctaccaaaaaaaaaacaaccactgattctgtgaggcatttcatcaaacacttggttggcaacaacaataagaacagagcaagtgaaatttggacaaacctacaagctgaaatcaaaggaagcatatgcggaatcaacaataacaacgaatagcgaagaacaaagcgatgaagttgcatcaagacaaaaatcgacgagagtcacatgaacgaatatttgacagagaactaaccaggagtagcagtcgagagagagatcgaagcgagggagagatcgaagctaaagagagagagcttcgtccgcagagagagaacaaaatcgacgtatgcggtttctgttttattccaataacgacgtcgtttgcattagtgaactattcaacggtggataattgcgctacgtggctacttgcttagccaataatgagtttcagacgtccgatttttgccaccttgtcttcaacaacaacaaaaaattctggaaaaaaataaaacgcaaaactgaagaaatctcgtttcatccgccattaacgacctctcaaggaatcttattactatatatgctcttgggtattaatttcaatct

SEQ ID NO: 16257 - DNA, 1436 bp, Arabidopsis thaliana landsberg
attcttgtctgaattatgggaaatgtattatccatatctttgtttgtttctgacatattaagtctaaagcgtgagattgctaatccattgtagtgaagtcaaataatactcatgatataaagtctttatgtaatttggttagttccaatcttacgaggattatatatcttgtgaaacaaaggtaagtgggaaataaaacttgccaaaaacaaacatcatccgttcaaacagaaaggaacgatatagggaatgaaaatcagcacactctaaaacaacagcactcagactgtctacactaagaccattaactaaaaaccagtactcagaaaattgagtttaaaagaccaaaaaataaaataacacctagataaaaagaacaaaaatcctaaaaaaccatcttcgagagtctgaaaaaaactacttgcaaggcataaaaaaaaccaaaaaaccaagagaaactaatcacataacatagctgtttttgccaggaagtgacaaccggagctcgagatccagctctgtgtcggagacgagtgagctcatcgtatctgcgtcttgtgaagcctcgagacaagccgtctccacggtcaatttagccaataaatttaggcactcccaatctttagtcggagctagatctggatctgaaagaacgagggcgaaaaagagcatgtctggggagtggaaggaccagagccgaagcctcgtgcctgtctctagaatgttttcggtgacgaccttgttccatcctgaacctaagacgtagttggaagtggaagtcatatcccatctcttgagcttaagcttcctctgtagaccctcggaattcaccaagatcacatccgctcctttgtcactgtcacttatctttttgtaatgtctatctattttttctaactcttcctcgtttaagaagtccatatctagtatctgttccagggcatcaagagacgtgtctgaagttcgtcgacatcactatcgggaagaaccttcacaaatatcagctttgcatccacaccgttcacttctctcatcacgttaatcagtcattccgtcggtgtcctatcttcatctgtcactataaccggctttctgtttcttaccggatcgtttgaaaccactttttgaggccttttggactctagatggcgcaaacttggagaacaagcaacacgattaggggtttgttgcggctctagattcttgcactcatgaatatttagttgtttgctcaacctgtactacatcactgcgctcacactgtggttaactaatctacacactcttgtaacagaagacgtcctttcatcattataagcggcggcatctcatgttcgcaactatggaaatagacaacctgaactgcacatgtctacctatcgaaaagtgcacaatatttttgctaatcacgccccgactacttgaccatcttctcc

SEQ ID NO: 16258 - DNA, 3850 bp, Arabidopsis thaliana landsberg
cgaacaatattggctacacttgagcaacaagtaagagcaagttactaaatctctaaatctttttcttcaatcctgggactaccggctaaaaggacaattacaaatttccagtcactagaaagtttagcagaagtagaaggatttgaatctcagaagtgccttttggaaatctgacttctgattataatataaaactgagttcggttcgcacagagatttgagtagacttacttgcatcatgatatattatattttcttttggacgtcttcagctaatgatttctacactagaaacaaaattgttgactctgtcttacttaaaatcacatagatggagttgaaagtatttacttggacaacattcatattatcttgctctaaatcttctcagggtactgttgtcaagagggaggaagcagatgagccagatgctaagcgtgttaaactagacacagcctctgattcgggagctgcaattgcatcaccaaaaacagagtcatcgacagataagaaagtgcctatcctgaaaccactttccaccgccaaactaagcacagaaacgccatcacccgattcaaaaaactttaagcaaagaccatattcgtttaccacaagtttgaacgctcctatggtaaataggtataagttggataaccgcaccacgaccatcaaagtggttcctcctttgccaactgggttagctgatgtatgtcctctttccctttgtttaaataccacgctttatgaatgtgccaaactttctcactttctagattaaagactactaaattataggtttattttagtcactgactcacttactgagttttgaattattttttacctccaggttgctgtcgtaaaggaacatttttcatcttacggcgaagtctcaaaagtggaactggaagacaatgcatcgattgatagtggcaaggatcatgaaacacagaacgaaagccgtgcagcttgtgtcacatttgtgaaacgcagcgcagcagagaaagcgtttgctaatgcaaagtgttggcaagaacacacgttgcagctcgtgtgggtaacacgtcaaagcaacagagagagcaacaataacaataacaatagtaatagtctctctgtttctcgtgacaaccttagcagcaaaaacaagtgcgcttctgtctctaatgacccaaaaccagcagttgaagtcaagacctcctctacggaagaaccagagaatacaaatgtttctggagacaacgacagtactttggataaacaagagaccaaagaaagcgacaatgataacaataaaagtaaccacgagtccatcgaaggagcttctgaggtgattgcaactgcaggaactgatgaagaacaatctgaacaaattcatcagtgaggtaatatttttgtctcagaaacatatcttttgagcttggatctggtattttagtgatctttttctccgacttaggcttttaagccaattcgtgagacgttaatatttgttggtagcaaaagatatatacatatctaagtattttgttttccttttttcgatagtagaatgtgaaaaagaaaagagaagccaaaaaaaaaaaaaaaagaagtgtattgttacatttggccttccaagaacatttggttgggtctttgtaccagcagatctttgttcctttttttcagtcattagctgctataattatttcaatttctgttgtaaatagtctggacattttgattccttgtcatttagaaaaaaaattgtggaatccagaatcggaagccattttgaaagtttatgcagtgttttggtagacttgtattattttttccctagatttagaatcttgcaactacattgttttttcattcagttttagcatagggacagttgtagataaacaaacatttgtaattcaatgtctctcaactattgaatttggaaacttaagcacgtttataactgccttgtaattcagtgtcttatgtttcgaatgtcttagccttttaaacgtactgccaagttgctagcaaacgagaattctaaccaaagcaaaaaaaaaaaaaatggaaccgatgtatcaaatatagggataactttaatgcattgataaatgtttaaaagatataatttacataaattatccgatcaaactctattttccggggacgaagttggtggcgtaagcccaagcattgttagccacagggtctgcaatgtgatcgaacagattttcgatcggacctttaccggtaactatggcttggacaaagaatccaaacattgagaacatagcaagacgaccgtttttaagctccttcactttcaactctgaaaacgcttctggatcctccgctaagttcaacgggtcgaaggccccgcccgggtaaagcgggtcaagcccttccccaagaggaccacctccgattctgtacccttcaatgaatcccattagcacaacttgacacgcccatatagctaatatgctttgcgcgtggatcaagttagggtttccgaggtagtcaagccctccttctgagaagatttgagatcctgccttgaaccacacggcttcaccgaatttgactccgttttttgagagaatttcagggaaggtgcagcctaaagctcccaacattgcccatctactgtggatcacttcgagctcacgattctttgcgaatgtttctggatcggctgagagaccagcggtgtcccaaccgtagtctccagggtattctccggttaggtatgatggtgtgttttcggaaaatggtcctaggtatttgggacggtctggtccgtacctgtcacaaatgttttgttgggtactaaattagatggttggcatttgtaataaatggaaaaactctttcaagaataacaaagattaggtcatttaatagagagagtgtgaggttggaaccagatgctctgaggagtagacttgacggtacgacgcatgatgatgcggccaccgccattggaggctccgattttgcggaggagatcgttggatggctttagggtcgtttggccagcgaaagaagagtgttggattgctgaagtggccattgcttcttctaaacaagaacacaaaaaaagaaaagaagtaagtgagaatgagatgttgttgaattggagacgccgtttatatagtaaagtgttcattactccattttgtgggaagattaacatatagacacgtcagcgagtgtagattggttggttttagatttccacaaactagattcacgtgtagaagatatgtagagattgtggttatgcagcgtgggagtggaagatctcgtggcagtgaaaaatgtccacgtaagcgaacaagtggatagtgttgttcccaacatgctcatgatcactctcttattggtttagtggcaatgcttgctattgcgttgataaataattataaacagagttatattacgtacacaaagagtatatcataagatttttttctatctttctttggctaagtgattttcattgaatttcatataaagtaagccaacgtaatgtttatctttttttcttcaaaattcaattccgatagatttatgtatacctagtactctagtacgtttattataagatatctttatatgtaagatatcatatttgttataacttagaactaataaagaaagatatatcgtgcaaataatagtaatacagatatgtgtttgtatatatagtaccagagaaacacaaaaatcaaggtatcagaacagatcatctaaacatctaccgtaagcaaaaaaggaatgaatgaaaatccaaacagtttttctatttgtttttagtatttacatttttggtcatgtgtccggctccggaataaga

SEQ ID NO: 16259 - DNA, 629 bp, Arabidopsis thaliana landsberg
ccaagggagccaatgaagtttctatccagatcatggagtctatctgcttctgaaatctccaaagctttggcgcagaaacagagacaacagcgagatctgttttctgtttcccagaacagtcctagaggcttcttccaagatgttgctgcagatccactcatggtatgattaccttccacttgtgtggacatattcaccagtttttgaattctgattttgatgattccttggtatttgcaggcagagaatatcatgaactcagctggaacccgtagatcagggagattatcaaagtggtttcaccacaaacaacacaccaacccaagcaccatgaggattccgaggaagaaagataaagcgcgtgtacagaaagcccatgttcactcagctgtgtccattgcagctctggcagctgggttagcatctgtgacttctgaggaaagctgcagcaaagagtcatgctccatgatggcactggctctagcctcagcaacagagctactggcttcacactgcattgacatggctgagcaagcaggcgctgatcacacctgtgttgcttccacggtcaggtcttccgttgatatccacagccctggcgatctcatgactctcacagatgcgactgc

SEQ ID NO: 16260 - DNA, 2557 bp, Arabidopsis thaliana landsberg
cgtccttatcagattagggaatcggaattgagcatggtttaggttggtttaacaaaatgttagatccggttaagcatagggaaaggttatcagaaaatttaatcatctttcgactcttcttgggtcatctctcatgctcgattccttcctcgcaataagtccgtattcgatttgggattcatctcggtttgtctttcaactgctttaacggacacatctattttctttagacttcttggtaagaattaacatataagtaacctctttgtctagaattttttgttgtttaataaaatatcacattacaacaaaaacaaaatggtacatcatgaaagtttaaacaatttctgtttgactgtttcatcaactaaaattagaaggagaaaaaaaatgtggaaattgatacatacttattgctgaagatgtacactaataatctgattttcaggaattgcatattaaagtataagaaatgagaattgagatacttttgagttttgacagaaaataaacataacaaaaattgatactgaaaatgagataaatagcattaagaaagcatattgagaaagcttttgtccaatctcccatcatgcaacatatttgtcaccaagctaatgattgaagcatctccaacaaacccagaactcctcatttctttgatgagttctgctgatgcggctctgtcacaatctctaaggtttgctctgataagcgtattatatgtaccactatttggaagagtaccatcttctttcatttttctgaacaggtcatctgcttcctgtagtaggcgtttactacacaatcctgagatcattgtattgtatgttacaacatcaggcttaatgctgaggctacaaaataaatcccacgcttctcccaccttgacagccttgcacatcccttcaatcatagtattatatataacaatattaagttccatttcactcttttgcagatacttgaatatgaccaatgctgtatctagcttcccataactacaaagtccatgcaacaaaatgctgtatgtcataatatctgtaggcacacgattagaaaccatctgtttgaataccatttgggcagaatcacagtcgccagcttgaaaaaacccttggataatagtggtgtaagtgactgtgttgccaactaatcccctttgagacatctcgcggaagagttccacaccatcctcaaaaaattttagccttacaaaatccatttataagcgtattataagtgactacgtttggtagacaatccttcctaatcatcaactcaagcatctgcttagcctcaccaaggcgatcgagcatacaaaacccattgatcaatgaattgtaagtgaaaatattaggatctatggaccttttgatcatctcctcgtacaatttctcagcctttacaagcttccccttcttcacaaatgcatcaatcaatgcgctgaaagtgactacatttggattgattttcctctcaatcatatcactgagtagtcgagaagcatcactccatcttccgtaattacaaaggcaacttatgagggagctgtaggtgataacatttggtctaactcctttgttttccatttcagtgaacaagttgagtgcatcatcctcatgtctatatttgcagagactatctatgactgtgctgtagatcacaacattggcctctattttcgcagcttccatcttgttgagcagattaaaagccaaatcaatatcacctctcttacataatccatttactaccactccataagtaaccagatttggttgacagcctctttgaaccattcgatcaactaacgccacagcttcagaagctttgttgtggagaaaaagcccatgaatcaaagttgtaaatgtgattgtgtcaggtctataccccatttccaccatttgatcaaccaaagctacagcatctgaaatcctcttaccgtgacagtatccattgagcagagaagaaagcgtgacaatatcgggctcatagccgagtttcatcatcttgccaagaagagctaaagcaagagagagctgagagcgtcggcaaaagcagttgatgaaaatactgtatgtgtaaagatcatgtgaaattcccaaagtttgcatctgctcgccgagagagatgacaagttcaaacttcttcatcttagcaacggcactcagcagtttattgaattcaacaatggaaggtaaaggacgagactgtaccatatcaccgaacagattaaccgcatcatctaccttaataatcattcagcctatttctcaatatctctctgtaatcaccactagcaccagagaaagatcgttcccataaactgctatggctaaaggaaggaggagcagttcctcatttacctttttcgagaagacttcgatgaacaaatttgtttttcgtcgtggaatcgcaaacaattctctcattttcagctgattggggttttttttaaatcactgattcagaatcgtaactttttgtaaacttgtttaacccttgatgaagaaccttttgcagaccagagaaaggtaaggtttgaactttggtt

SEQ ID NO: 16261 - DNA, 1059 bp, Arabidopsis thaliana landsberg
ctaagtggcacaactgacctctttatttgagagagtagtttagggtaatttgacccacatcaaagttctctaaagtgatgactctaagttttttagcttcacttgagaaactgactttaagtttaaagtcataaatcaatatgggccataattctttaatgggccttatattttgtctgaacccatttactttgtcgaattttagttatgtttttgtctgaacccatttatatttttgtctgaatttcagttacattttgtctttaaatttttgtcttaactaaaactgtaaatatacactacaagaaaacacgccaattgcgagggaagaaaccgtcgctagtccctcgcaaaaagtatttagcgagggaattgcgatgaacttcagttcctcgcaaaacgcgcgtcgcaaaatcaaatccgtagcaagttcctcgcaaatgttgcgaggaacaaattacctcgcaaaacacacacaatttgcgagggaagcaatccgtagcaaattcacagcaaatttcgggtctcgcaaatttctcgctagttgcgacggacgaccagactcgcgaagcacacgcaatttgcgagggacatactcggtagcatattagctgcaacagtagcctcgctctttcctcgcaagttgcgagggaatacttcagtagcaaagtagtcgcaaattctttgtcccgctaatgcctcgtaaaatttacgatggatttgcgtggcttttatctgtagtcgtaaatccgtagcaaagtttgcgatggatttgcggtaaataagcgactctttcatgttttgttttaagcgtgatcattgttgaatttagggattacggttctacttaacaatattaaatgattttcttaactggatctttatactaaacttttaatttgcatactaattaagaaaccttaaactcatatttaaaagctaaaattttaggtttcaagtacagaaaacaagccaccaaataattttaaataacaagccaaaaaaagattcaagttttgatgagtgaaaaaagaaactgaatacagaaatcgttatacc

SEQ ID NO: 16262 - DNA, 944 bp, Arabidopsis thaliana landsberg
tcgattgtttagatgagagtgctgatgctgttctgttttcatcctcgtcatcatcagtactcgaaatataattagccggtggtgcatcttcttcatcttctgaatcccacattgtgttatcaagatcactcaatacatcgtcatcactcctcacttgagctcgaggtcgaggtctaggatcggggcttcttctcttaaaatcctctcttggccttctggtgtttgtgtttgatgatcttgctctatcaaatctctttggaatttcatcatcctcagaatccaattcaccgtcatcgtcatcatcatcactatcgttgggtctcctctggctatgtgtatccctatcatttcttctaaagccatgacttgcatctccataactacgcaattcaggagttctgcttcttcctgcaaactcttctcggttccaataccttatcctaccagattcttcttgctctgcagcttcctcttcctcccactccttgtctgctgcttcttctatctcagctatgaatctgtctagctcctcctggtcactatcttcatcgcccggttcagattcttctctattgtcaacactagtgcctcgtactgattgtttatctccatggaagacatacggtgttccttcctttttgtcgattgcattgaaaaatgttgaggccactctgtggatgctagccattgcaaccggatcttcagggttaacacccattctccgtagctgctgttctgttttctttatgttcagcttctgggattcaagcgctgcgccgaatcttgctttgaataaagcctgcaaaacataaatacttattcatacaatgccactacaaagcaactgttgaagcaagccacacttcaatgcttcacaaatcctaaatcagatcaaccaaagtctaattcataacactgatatcaactaagtatcattctttaac

SEQ ID NO: 16263 - DNA, 502 bp, Arabidopsis thaliana landsberg
gacactatgagaagaatctcgcttattattggtagatgtggcaaatgggtcaagaagaggatgcctcatagtgaccataccaagaatgataaggaccatcatgtggctgattaaagtgtttagcagttggattttgccctcgaactaaagcatcccaatcccacataatggaagcagcactgcacaatacaccaagcgtcgtttcttcgtagcacgcgagcaaaatgttgtaattcctcatcctcaatctatgtagcacattagcgaaatcgctatcactagagataaggaagagatgagcaggagggggattctgtgaaacccaacacattatttctgttatcaaagatctatccgtactgttcttcccacctagtgcaaatcgcataaaaatgtaaactttttcaaacagatccttaagtaaaagtaagcttcgtctagaaatgaaagccgagaagagacctttgaaaaagaattgacctcgagggacatgagtgagatt

SEQ ID NO: 16264 - DNA, 1278 bp, Arabidopsis thaliana landsberg
ggttcacacggtatggctttcgttttctctactacaagagtttctttttggagcttcccccgatcaatacctgggaatctggaacgagacaaacaacggtaaagcctcgaataacgttatagctatcgagttagatatacgaaaagacgaagagtttggagatattgatgataatcatgttgggattaacattaatggttcgacatctgttgcctctgcttctgctggttactatgatgatgaagatggaaacttcaaaaagctttctttgatcagcacaaaggtaatgaggctttccatcgtttatagtcacaccgataaacagctcaatgttactttattacctgctgaaatctctgttccgccacaaaaatcgctcttgtctttgaaccgagatctctcgccctattttttggaggagacgtacttgggtttcacggcatcgaccgggtcgatcggagcactccattatgtgatgcaattttcctatgaagaaggagttatatatccagcatgggaccttggcgtaatccggaataggttttgtcttatgatagaacacggaggattttagcggtctgcttaacgttggccgtgttcactgcattagtcgcttccggaataggttttgtcttttatgtgaggcataagaaggttaaggaggttcttgaagaatgggagattcagaatggacctcataggttttcttataaggagcttttcaatgccacaaagggtttcaaagagaaacaacttcttgggaaaggaggctttggtcaagtctacaaaggaatgcttccgggttccgatgcagagatcgctgtaaaacggacttctcatgattcaagacaggggatgagcgagtttctagccgagatatcgaccattggtcgtctcagacatccaaatctagtcaggcttttgggatattgtaagcataaagagaatctctacttagtttatgattttatgcctaatggaagccttgacaagtatttaaaccgtagcaacacgaatgagaatcaagaacggctcacttgggaacaacgtttcaagatcatcaaagacgttgcatctgctctactccacctgcatcaagaatgggttcaagtcatcattcatagagatatcaaaccggctaatgttctaattgaccacgacatgaatgcgaggctcggggatttcggactggcgaagctgtatgatcagggatttgatcctcagacatcgagagtagcgggaacattcggttatatcgcaccagagtttctaagaaca

SEQ ID NO: 16265 - DNA, 1897 bp, Arabidopsis thaliana landsberg
gcaggatgcaggtcgactctagaggatcccaaggcatattatatatttaatttaggaaatgaatgttaaatccttgaaattgttttgatttcacaaaaggataaagaaatattggttacatacatcttaatgtgttgaccaaaacaaataaaatgtgataagaaacaataaaaccattttgaccaaagttcttatagttttaatattctttaattgtcatttgttagtgactaataatattacattaaacctaatgtataaatagaagccccatcttctacgcctttataattagcaacaaccaaaaacattcatttgtcattttgtctcctcttttgttttctctgatcactagtatggctgtattcagagtcttgcttgcttctcttctcatatcgcttcttgtcctcgacttcgtccatgccgatatggtggtacaattttaacaaccaaatatattttcttatttgattttattttttcacaacttttgtctacgttctaatagattttttcaaaatattcatgcagacgtcgaatgacgcccctaaaatcggtaattacatgatatctctatcatatatatacacgtacgttgaaattctatatacgtgtgtttattaaagttttggttggaaattgtatgtatttgtagattgcaacagcaggtgccaagagcggtgcagtctttcgagtaggccaaatctttgtcacagagcgtgcgggacttgctgcgctaggtgcaactgcgtgccaccgggcacatccggaaactacgacaaatgtccgtgctatggtagcctaaccacccacgaaggacgcagaaagtgtccttaaaaactctgtcgctgtttcatttgatttcgtttataatactttacttttatgagagtaattgtggttattttctttggaattaataaaaggcaaaagaaagagaatgttatacgttatttgcaactcgtcgatctttgttttagtgtttatccaatttgtagtacttgttggtttggttcctggtaaacattaggtctgaaaaggtattgtttttcattatacaattcactaaataggcatcgtacttgcatataaaataaagaatgaagagagaagtaaaagagttttctttttttactcatggaagttaggcaatgggtttaaatatggtaacaacagaattggaggggacttaatgaactatgacgtaaaactgagagcaattgaatatgtaacgttaccaacaataccaataaaattatgaaagatagtatatgaaattacgtttaattaatgtttccgggttgaatgtattatatatagaagtaacagtacgatttttattgcatttttgtacaagattcctagaaaggtataacctctataaagttaataacagtcttgagtcttgactcttcgaggcaaataaattcaccgcataattaatcgttcaactattattctatattctatataacatgagcttcaacaaaagaagcatcaatcatatcttcaacagtatactgcagtgtaatgtaacatattcaagatcaaaccggacaaaaaagcaagataccgtcgaaacaatcaaaccccatgtatcataaactcccatcttctctttcctaaattccccgtcgcttgcaaaatccgcaattcaaaagcaacacaacactagtcacgttaagcaaatagtacatcttccagagttcagtgtgggacaatcctgttgatcacaaagagcaataaaaaaggttgtttcaagcaggagggaggatattggaacaaatggaagaagaaaatgtttctgttctttgaaaattaataaattcacgtaataataggagaactatcagtcgaaaggtaagagaaaaataaattaaatattatcatcattttc

SEQ ID NO: 16266 - DNA, 1749 bp, Arabidopsis thaliana landsberg
aattctattagttaatttaaactagttatgttgaaaatcaaaaagattatttagaacctctgagcgtttttattcatttttggaagtctttagagatctactgtatgtatcttattgaacaaatatcaaaataaatgactagtaaattataaggaaatgtagaaaaatatagttaatagattttaaaatataactaattctattacagatagcatattatagatatgtgtagtgtttccatatatagcaagttagcatgatataggaaaagatcttaccaaaatttcaaagctactagataagatcatattagctaaaataaaataagaaatatagcataatttatttaatggaatgatttataaagagtgatgtgtaagtgttttattgatttattacatatcttataattccatctccttagatctcttcccaaagaaacaaaagcatatagagttatgacacttggtctactcagccttgtttttggagaaatctttttgcatattatattatatatacttaagagtttcataagtactacaccaaaaaacaaaagtattcttgatagctatctagatctcatatacaatgtctttacaatttttgacgctcatctttctcctttctgctgctgtgatctatcacatccccgtcgtgacttgcgaaccatggtgctcggcgatgccttcttccacacctgagcagttacaagccaacattcagcttgcttgcagtcgtgtggattgtacaccgatccaacccggtggattttgctattaccctaatactttactagaccatgcttcgtttgtcatgaactcttactacaagagtcaaggtcgcacttatgctgcttgtagcttcggcaatactggttaccttatttattccgacccaagtactggcacatgtgaattttaaatttaatcgaaaaaaacatagaaatcttcagcatacttatacatttttattttgttttaataatgggtttctgtttcggactcttgtatttccaaactaaaataaatgaaatagacgttatttaataatttattctgaagtttcaatgttcttagtgatgacgtcttttactttctagtactattgttgtggttcaagatcaggttgttttttgactcgttatagtattcaaaattggagacttcaaaaacttagatttgttacaaatagtgccttatatatgtaagtcttgtcaccaattataattacttacaaaaagccgttggagttaatcgttactaaggtgtagagtgcttgtgttaatattatcttacacctgacttgttaataatttcaaaataaacttccaactgattcacgaagctatatatggagatgagtttttttttttttcttatgtatctacacaaatcatcatttatctagtaaattcaactcatcatgtaaactcttttagatgtaacgtaggagatgttgcttaatggtttgtacctactttagtggattcgggttacaaacaaattttctgacgaaggaaagtacacgcatgagatgtattcaaagaggggatgaccaaaagatatataagtgatggttgcagaaaaagatggtatagcgcaatgaaccaactgcctagatatgtaaccgcatgcaaaaaaaaaaagagtcatcgattcgtatgttacacatactcaaacatcgaaaatgatcagagttcttaattattcattgaatgctatttgattatctgtctaaatggggata

SEQ ID NO: 16267 - DNA, 2992 bp, Arabidopsis thaliana landsberg
cgacgacggaatattcaacccactcctcagctttggcaacgctgactcgactagctctattaccaagaaaactcaccgtcggcgtgcggccaccgttgacgaataagggaggtagcttcctaaccctaatgttgcttttccttatttggtttgggcctagcccaagaactgtttaccctccctccaatccatttttcaagtcctcgaagcccatgaacagtttttttaggttaagctcacatcttgtttggcccaggttaggtctttatttcactctagcaaacccaaacgttttgatttctttctcgtctttggagagtagctaccttccgagattagttgtgatggtcattgtttggttttggttttctctcccacaaagtttggcaaataggttagctcgttggttttatgttacaaatctgatctcaaaaagctttgggctaactccacttttgaagtgttttagagtcttgatgcccatgatccgtattgttatgtttctgtcaattacaacccctatagcaccctttaactttgttttggctggtcgtggactccacgctaacagagtaacggttcttttaggctgttttgatagatacttttgtcgagatcatttgttaattttgtttcgaaccctatttgagactctcatcccaaaccattggcaattgtccaaaagagtgaagaagaacgacattatgatcccgtctccacgaagcggtggttaccgaagcttcttcaactctctacctccttacccgccaattaccaagctccttcaaggtatcttcaagtatacggataagttgcaaatctgtgaaagcttggcaaagagcggcgttatgatctaccctttagcttctcccgtggagcaccttttcaaaggctcatatgcattgtttgcaatagccgtttatgaccacacgttggtcgaagatttcgcgaagcccgtcttcatggtcgaatccgccaaggcctcaacagatttttcaaaccttgtaaacttttttaaaagtgaacacctctttgcaaaactcatgaagcctctatatttattttcttgtactatcttagttctaatttgtatgaacttccttttttttaggcttaagtgaatagaaattattgtttgacaaaaaaaaaaaataagatgaggacccaaaagctcatagttcgtcatctgtaacatgctgcatttttcaggcaaagcaatccgactaaaatcaaggagatgtggaggggagaagcttccgcctgataccaacggtaagagctccacatgcggtgtagcgatgcagagtagaaaagggagatctacggcgaagaacgagagagacaagtagatagatctgagaccgaaaattgtggcggttccacgagatctttgtcgatgggggaggtatatttgatccggcaaagcgaagccaacgtcgaaggtctctgttttctattccctactattttctctctttcatgactgagcaaggatctcttcaacaaaaacgagatcggctctcttcctcctcaaaacaactctacagtggcggcatggcaacaaattttggatcaccatctcgtttggctcgcgtcgtccagactcaccagatatcttgttctggcgagaatctacagtattggacggcggcttcgttcaagttctttgagtggagatgtggtgtgggtgtaaatgaatattctcccatgacaaacaaaataaatttaaagataagagtaccatttaaaaaaaaaaattagagaaggtaatagtgtttttatttttgattacccacacatatataagtagctacatccattttcgcaaaacgaaacgaaaacaatttatactcaagatctacgtaggcttcaagttatgaaacatagcatcccatcgtgtgtcatcatcccttttattgtactccacatacacacttgggcttggtggtcttcctttcaacggccctgataatctcaatcgttcgtttaagtttccatctaactgtcccgacacaatagggcttctataagctaaaatgagtctttcttggacacttctatccaacggtccagataggttcatgcttcggttgcttactaacgtcattttctcttgtattccatggtttcgatccaacggtccagatttcgcaatccttttcctctttatcacaggtaatctctccacttgtaccacagctttttcagcattgactttattgttattacctgaaagttgttaactaattttgtcaacaaaaacgttttaactaacaccacttcaactacaaaccctaattatccaaacattactttaaaaaaaaaagtacttatggatttacaaaacttagacttcttgcgtcattcataaatgcaattttgttatcgtacaagaacatattagctgtgctgggattaagtatctataaagaaaatctcgttgcaataagtatagtgatttggtgcattatcttgacctaccagtcaaaaaggctccggtacagtaggcaggcggcggcgactgcttctccttgagcggttcaactacggcggttcctccgagagaaagccacttggttaagcgattgccgacacttttggttgccttgatgacgacagatatgagtttggccgagaagggacgatggttataggagctgagtgcttgtgtttctctctttgagagtttgagaatctctacgcggtgtttggtcacagtaacaccaagtcgccggagaaagttgtggttgaaaagggcgatgtcttcactctggagcttcttttgggcgaatatgagtccgtactcgtagcttagggtcggatcaaggtcggtttttgacagccatgagaaccaatccatcgtgtgtgtgtgtgtatctgatgttctgtgagtttggaggacatttgtatatatatgtgtgtttgcgcaatttatgggttatcttttggactaaatgaattcatgggtgcatacatatacatacataaacat

SEQ ID NO: 16268 - DNA, 1077 bp, Arabidopsis thaliana landsberg
aaaatcatttatttctcttgttatatataggcaattttttcaatgaggacaagccattgaccaatcctattgcatgaagaaagataggaaaagcaccatgcaaaccacaaagagataattttgtctgaacatattctcaagaattggtaatgtataccattgaaggctgtcggaagaactgccgcacaacctattaacccaacacctcctctttaaagatttaagaaatttgaagagcatttataaactattttttttctttatcagataaatagtaaatattcatgtgacttcactacaaataattgtgattaccttaattttggttaataactttaaatgtctatgtaatatgcaatattaaatatatttttaactctttattattttatattttatttgtattattcacgttaaccttatttattttttaaagttgtcatacataatatatgagaaatgattttttgaaaaatattttgctcataattaacttctttggaatgaaatgaaagttttattcaaaatccaattaaaatatcaattgtttttacatcatgtgcttcatctatttaaatttttgaaaagaattagaagaaaataatgtttatgtacttcgtgatgcaaactatacttgaaataatccttcatacttgcgtctaagaagaaaacatacttccggattagatatagataaatcaggctattagaggataaaagtaataaggtcggatcggttaggctgggttcaaagaaagttgttacctttgaggagatgtttagtgctattgagggctctattcaataattacaaagtttgttatcattttttgatataaaatcataaacgaaaggaagagagaagttcaacgataacgacaaaaagaagtattattaatcatctaatcaaaactaatgaactcaattttttgacacatatatcatcatttcaagaacattttaggtcatattttatttccaatcagaatccaaaaagaatttccagatttcagttgttcataaaatttatagttctttattgtaacaacccgccccgtgggactcgcacacgtggcc

SEQ ID NO: 16269 - DNA, 4221 bp, Arabidopsis thaliana landsberg
atattttaagatcccattcatattttttcgtatacattggtatttttaacttatttgttttgatcaattggattggctgttgacctttcaagatttcattgttgcgtgcttgtttttctcatggattgaaacattgctgcataaaatgagtaaatagaataattggacaaccacttggttcaatgtttttacattttataggctacaaaaactctttataaactagtatttaatttctgattttggaatttcaacctaccgtaaaacaaaacagcgagactatctaattacaagactataattgaattttaaatcttaatttaatattatatgtgcactatatgtttcattctatttaagatagatatttggtaattttgtaaaatatagaaatatgtcatgttctctgaacattattaatataggagacttgcatgtttttgtgaattgtttaattggcatagtcaaaggatgtataggttgcatatatagaaatcaacagttcccaagagaaaacatgagagctaataaaaaatttatcaaagaagactaatatggagaaggacgatttcttgaggagtggtcatggaagagaagaaagccatgatgagatgagaaaacttgattcatctcacgatgattctcatcaagaacacgaccatattataagatccaaggtatcataaatttccttttgtatagttttcaaatatttagacgtcatttataaatcgcataaatcaatccttggaattacatacatgtatctttcataatcttatcacatagatggtttgttttatccaaaatccatttttattaattgattgattagtcttaatcaatgaatcttaatttgaattctaaaatcatactaaattagatcttcaaatctcttgtcagtttcataattttctgtctttgcggaggtttttacgaagaatttgctcatctatatatcacaagtacaataattatgagaaagaaagaaaaaaatatgtattggatttttgaggcatgcatatataatttgaggaaagatcaaccaaacgatagatatttgtatatttgttaagcatatcgtgattaaccatatcttataaacgtatgatgagatcagctggactcaactaaagtcgaaatggatgaggctaaagaggaaaatcgaagactaaagtcatcattgagtaaaatcaagaaagattttgacatccttcaaacacaatacaaccaattaatggccaaacataacgaaccaaacaagttccaatcaaaagggcatcatcaagacaaaggcgaagatgaagacagagaaaaagttaacgaacgtgaagaacttgtctcgttgagcctaggcagacggttaaattcagaggttccaagtggttcgaataaagaagaaaaaaataaagatgtcgaagaagcggaaggtgacagaaattatgatgataatgaaaaaagcagtattcaagggttgagtatggggattgaatacaaggctttgagtaatcctaatgagaagttagagattgatcataatcaagaaaccatgtcgttggagattagtaacaataataagatcagatcacaaaatagttttgggtttaagaatgatggagatgatcatgaagatgaagatgagattttgcctcaaaaccttgttaagaaaactagggtttcggtgagatcaagatgtgagacaccaacggttagtacattttattcatatctttaatttaattagtatatacatctatgaatgctaacagtataatccttccttttttctcacttctatttttataagagaaaaaaaacttctcaaagagtatattccacaagaacagaatcaaagtttgtgttttaatttcttgggctatatattgtctctgtagatgaacgacggatgtcaatggaggaaatatggccagaaaatagctaaaggcaatccatgtcctcgagcttactatcgttgcaccattgcagcttcttgtccagtaagaaaacaggtaaaattactaaactaataattctaaatagttatatgttattaaataaccatacatatatcatatcaactcttttctttaggtgcaaagatgttcagaagatatgtctatacttatctcaacgtacgaaggaacacataaccatccacttcccatgtcagcaactgccatggcctctgccacttccgctgccgcctccatgcttctctccggcgcctcctcctcctcatccgccgcagctgatcttcatggccttaacttctctctttccggcaacaacatcactccaaaacctaaaactcatttcctccaatccccttcttcttctggccatccgaccgtcactctcgacctcacaacctcctcctcgtcgcagcaaccgttcttatcaatgctcaatagattcagctctcctccaagtaatgtctcacgatctaatagttatccttcaaccaatctcaacttttcaaacaacaccaacacattgatgaattggggtggtggtggtaatcccagtgatcaataccgtgcagcttacggcaacattaacacccatcagcaatcaccttaccacaaaatcattcaaacccgaaccgtcgggtcatctttcgatccgtttggaagatcatcttcatcacattctccacaaacaaatcttgatcatatcggaatcaagaacatcatcagtcaccaagtgccatctttaccggctgaaacaatcaaggcaatcacgacagatccaagtttccaatcggctttggcgacagctctatcttccatcatgggcggcgatttaaagattgatcacaatgtgactagaaatgaagctgagaagagcccttaaagagaagttacatatatatgttcttatatactcagtacattggtaaatgggtttagactttcactagtttcctagttcatctatatattggttgtttaatcacaagtttattttgttgttggagtttatggaactaatgtgtacatatgaaactttagaacgaataaataaaacttggaattcctttttagaatgtacgtgaaagcatcattgggttcaaggattgattaaaaaaaatcacgagtctcgaagttatgtgtaaggtttatactccaacatatatatcaaaacaaaaggtggattcaaaaggttttcaatccttaaaattgaataatctatcgtgaattcgtgatcatatgttgagtcaagctatactatatagtagatcgtttataataagatttttatatcttcttaaacaagtaatttagtggttcaacaacaaaatctgataagagtgtatattaacaacttcgtgtggagcatttttcactgacttttggaacccaactttatagagtttttcttccatgctacgtacatggcccataaacttagagctattaatgggcttattaggcccaatgtataaaacaatttggcgttactatttgaagcgtaatgacgtggaaaactagcgggagatgtcccaatccttcttttcttcttcgatttttttttttttgaatcgatcaattattgttctttttttcgtccaattattgttttttctcttcttctttttttttttttttggacatcattatttttctcatcatatttttttttctgcgtgattagttttatgagtctttaaacttgatcttcatatggttactttaaagctttttggcccaaattaatatgatgattgattataacctatttttctttgtttcttgtaatggaaaccctatatatgtgttgatgaagaggtatagatgaaaaaaaaaaggaaaaaaaaaaagaagagatatagatgatttttttttatggcactgatcggacaaagtgaattttattaagccgtgattatttaaccatttggctttatttgtttaatttatttatttttgtaaaaagactaacaattctagaaaaacagaaaaaactaacaatctctctagtgtcttccaaatattagaatatagtataatcattcacttggtaggtgtctaggtgatcaatgaatccggatcacaatcgtatccacatacaagacaagacaagtgtgtatttcttgattatgtcaccaaaatcaagtccaaaaatatcatgtacaataatacatttgattatcattattctctttccaaacaaaaagcaaatagtcataatctaaaagtggtccatcctctcccagtttgt

SEQ ID NO: 16270 - DNA, 924 bp, Arabidopsis thaliana landsberg
aaaaagcaaaagaggataggcactctattttaatttaaggttttataagaataaccaaataaaagaaatcagaccaaaaggagatgaaaatctagagaagcagaaaagagatgtttctgcaactatacacagaatatttggacaacaccttttgttttctctctctctctctctcttttgttttttctactgatgcttcttctttgatgactaagtaaagtagccttttgaggttctcttctccattgcagtttgcctacatctgaagaaatgcacagagcgctagcttgagcttgtgaaaccaaatctctcaagggaataagctgtattaagtttcaagacttccccattttcggtacctgatcaaaaagagaaaatatagagagaaacatgtgttacattatgacgtgaagtttccaaaagaacaaaacttgtcatgactcatcaagtccaaaaggcttggtcttgttggattcagattttggtatatccgagctaaccaatattattatcaaaagaaggactacttggtcttttgaaagttcttggtggaaacaaaccttcttgagaggattagtgctagaagctggagccggtttcagaatctcaaaggagcaaacgagagattgatccacgctcaataatgcaccggcattgtcaaactctcctccatagtttggagctgagaatattgtgactaacctccgttttgcgaaaaactcatacccatcttccactacctgcaaacacgtccctcacaagtcaatatcttggaaggttctcataaaagtcttttcctttatgcccatattcacaagatacaacaaatgtcaaacatttctacagagttggaccatttggttctagttttgatcactatggaagtctatttacctgatggcctctgcaaatgagatcgagatc

SEQ ID NO: 16271 - DNA, 1512 bp, Arabidopsis thaliana landsberg
cacacaatccaccaacccattaagagagccaaacaaaaaataaatgaatacttttagttatgggtcatggatcaatactcgccctttctttagggcatacattcgtccatactacatatccataaggattttagaatgtgttgcaagaacaataaaagtgaaggaataaccaaaattagcaatgaaataatagaaacatttgaagactgagaatggtaggggctgcgcgaacgcaaaccccctctgccacaaataatgacgcaggctcttccacatgggaagaccttaggctaagcacccttcctttaagtgcaatggaagtcactagcctaggccactcgtcttcttgatcctgagttgactccgtccagtccaggtaagtttttttctcgcgtccggttctctaccatttttactcctcattgtcttccccactcattgctttagggtataagccgtgtgggactttgattttggaggggtcaacaacatcagaaattcattataaacgtaaacaaatcattcaccaatgaaattattgtacaccttattcaattgtttgtcgtttttaggattgagctaagaaacttccgatttaacaagaaatagcgaaaaaatattgacgcgtacgtggataagtcaaccatgtcctaacctatcaaaagagaatacaaaaaaatcaacagatatcgtagtcactgatgctgttctctagctgtaatttaaatatatacatttttggattattctaaaaaaagtagcttatgaagacccttgaattgtctttaattaataaaatgaataaaaaaaaacgtttgaaaatagtttaattttctccactggaatcatttgttttttttttttttagaatcatttggtttggtcgtatgctatgattttgataagataatatatgagtggattcacaaagaatttagaaacagcgaaacaaattgatactgaaaaatcaggtcggacaaaataatagaataagtatgaagaatgcggatcgtacgtgaaattaatagaataagtatgaaaaacaaatgctagatgttaaactgatattaaattaaactaaaaaacaaaacttcattaattgaaatgatatgctatcatgtgtcggtacatgctagtcttatttgaaatgacaaagttgtttgatccattatatacataatacatctacacagtgtagacacattacctgacgattttttttttttttattgttattagttttctctgaaagagactttatattatttatttttgctgtaaacattctatactaaatattaaaaggactcatagtcgattcattttaaattacaaatcttaagagttaagactgaacatgataaacagatcattcctacaaataatatcattttaatttttttggacaaaaatagcacttaataaataatttatttttaattattaaaatttataattaaaaaaattataaatgaatggattaaatgcgttaaaataatttcggcagaaata

SEQ ID NO: 16272 - DNA, 965 bp, Arabidopsis thaliana landsberg
gagttaactgttttgtgtatgtaatgggcccatttataggaatttaagagtaaccggctcacgtttgttcattttgtttttgtctttttgacatcacattcgtccaaattttcaattgatacgttaatatatgtctgtcccataccaatatagtcatgattcgtgtatattcaacgatgtgtggttggaaattccatttgttcagccgatttgcccgcaaatcagcaaagtcctaatcataggttgaaattagtgtagggttcggaggtcgactaagagatacaaagcttatgtattattgatagaatgtttttctcaagttttcttccttgttctatgattatttctattaataattttttcaagaaagagtaaccatgataagtgatttcatgatagaaccattttttggcctttgatatcggtgaattattcatataatctcaaccaagagtttgtaatattgttaaggggtgaaattgggcttcgccaatttcggcccaacccagtgactaaaacccgggcagattcggcaggaaagaattcgcctaactagtttaacacccggcccgcaaagataaacgtttggctgcgcaaaatttatttttggaaaatcacgttgtgtgccttacaatacggacgagtataaataaagaatggaaagttttgggaaggacaactttttggcacttggagaaagaacaaggcaagtcaactcgtcaatcggcaagtcagctcgtcaatcgacaagtcagcccgtcaagacagattaagcgatcgcgctcccagctcgtaattcctcttcgctgaacgcctcagctcgtcaaaatcatccaaatccctcagtcacgtcatctcgtttcgcttctcacttttcagcccgtcgtcattcaacttcaagcccagctcgcggtttagagacggattcttcaccttccctagagattcactcgtacttgtttaat

SEQ ID NO: 16273 - DNA, 971 bp, Arabidopsis thaliana landsberg
  unsure (1)..(971): unsure at all n locations
tccaacgctggatggaaagcttctttcaatgatcgggttgcaaacgccactgtgagtttctgattacctccaccattccttacatatatcctatcaatgcttatcactgttcctgaaaacttgtgtttttgtgaatctatgtgtaggttgcagagcttaagcgccttcttggtgttaaaccaacaccaaagacggaatttttgggtgtgcctattgtaagccatgatatatctttgaagcttccaaaagaatttgatgctcgaaccgcttggtcacagtgcactagtattggaaggatcttaggtcggttttaatcttttagatttccactatctctgtttttttctatccaatgatttactgactcttcttatgttttgtgttaaatcctctccataatcgtctcactaaagatcaggtaacagatcatttacttgagttttatattgcataatgggttctcagacagatataaacattttggttttggtttgtttagggtcactgtggttcttgctgggcctttggtgctgttgaatcactgtctgacagattctgcatcaaatataacatggtaacatagatttcttactgtagccaagattgatgatggctagtgtttttctcttcgaatgattaatattcgtttcttttgttcgtatgcagaatgtttctttatctgtcaatgatcttttagcatgttgtggattcctttgcggtcaaggttgtaatggtggatacccaattgctgcgtggcggtactttaagcaccacgntgtagtcactgaagaggtaaattcactttttaactgcaaagaacatctattaatggcaaagtagttataaaacgtattcttgattctacagtgtgatccatacttcgacaatactggttgctcgcacccgggatgtgaacccgcttaccctacaccaaaatgtgcaaggaaatgtgttagcggaaaccagctttg

SEQ ID NO: 16274 - DNA, 1119 bp, Arabidopsis thaliana landsberg
ttggattttatctatatttcatgtacttatttgtgtaaattttattaacatttggagagaatctattttttcttaattatatagattatttaccataactatatccatatttccttaagaacacattagaaaataataataacaataagaaaagacaaggcaatagtatctttatgatgataattgaaatcaaacaggaataaatagaacatgttaggtagcttctttcttcttgttctcttctccacattgctttatcctctcacgaccaacactatatataatccctaacttgggaactcttaattattctccaaacatagtcaaatcaaattttctaagtgtctcataaaaaatgacgagattcggattagctcttttgatgattcttgtgattcaagggtttgtgatcttttcagaagcacaattgaagatgggattctacgaccaaacgtgcccttacgcagagaagatcgtacaagatgttgtcaaccaacatataaacaatgcaccctctttggctgctggcctaattaggatgcattttcatgactgcttcgttcgggtattcttcttttgttttaaataacttcatcgtatacttattatcatacgtattacctaccaatacaaacaattttaaaacattgtgtgttagtatcatcaaaacaattcagaaggtttaacaacaaaaaataaaataaaaatcagatgttttattttagccatgcattaatcatagtatatgcgaaaacgtatatttttgtatatagatagctaaattaatatgtatatatcggtgttgacagggttgtgatggttcgatcttaatcaacgcgacatcgagcaaccaacaagtggagaagcttgctcctccgaatctaactgtgagaggtttcgattttatcgataaagtaaagtctgctctagaatcaaagtgccctggaatcgtctcttgcgctgatatcatcacacttgctactagagactctattgttgctattgtgagtatgctaataccccttgttttgtctaaactctaaacctgatacaaaaactaaccggtttcgaataattttggcttagggtggaccgacatggtacgtttcaacggggcgc

SEQ ID NO: 16275 - DNA, 2439 bp, Arabidopsis thaliana landsberg
cagttggccaattcttgtttctattttatcacaattatcttctttgtttttggtcaaaattaattctcttttaatccgataattttgtttttatgatcttcttcattttcttgataggatttttcattagtatcttagtataaaaatgttttgttttttttttaaatgtttcttttcctatacaagaatgtatgtaatggcttaattttctagttagttttctatccttctgtttttttttgtgtgcaaatctactaattagatttatattatacactcataatcacaagtaatgtacaagccaataagccaaaatatccagcatgacgtcatgtttaatctatatcatataataatctatatgttttatgttaatgtcaatatgttaagatttttataagtcgataaatcacatttttgtagtgttatacatgacatccaagatgttattaatgcactcatatgatacatatatatgtgaagaattgcatacttcaaaacttccccaaacacaaagaaatataacacacactagtatttgacatagttctaaaacatcactaagtgattgatatacatggcaatttgacataattttaaaaacattcaaccactcgagtataggctcattgatatgcatgtggagagcgatataagatcattcaacaccaacatagaccatctaaagctgatcaggccagagaaatgattcaattgcaaaaaccctcttgtcttcaagagatccttcgaaggagaatccatattgtttgaggagcaagtcaaggcggagatcatccataacttcgtaatcagacttggagtatttagggtagtgaagagggacttggaatccacttgggaattcttctttcttcatcatctttataattttgttgcgggtgctttggcagttgctggcttgatccatatggttcgagtagccgaacatttgggtgaaagccgatgtaaagagcaatttcatttccattgtcttggttgattttaagattttatacaaaaaaggaaagaaaacgaaggtttgaaatagagagaaagagtagagaagaagaagaaagagaagcaaggaagcttaagacaaaataccaaaaaaggagaagcttgagacaaactctaaggcaagctcgatgtttggttatagtaaaggcgaccaaagactagtatatatatagaggcaggcaggtaggtcagtaagacaattattatttgtcttttcgacatgataatcgtcatttgaattttatttttatcatcaaactatagtatgtaatataagatgtactagaaattatttgtttttgtttttttaagtaaacaaaagtatgattataacgagtagttcttgttctaaaccaaaccagtaaacctttttccttttaatgaaaaaaaagtatgatcataaataacaaaatgtgagaacgacggctgtgagctacatgcaccaggaaacgcatcggccaatgatggttcatgcattcatgcactcattatcttaggtggggacaagtataaaacagttgtggtgtgcaaggagaaagtaggtgaaagtatttaatatttatattaactaaaaataacatactatgtttttgaggttatatgagttttggtctatctttttaatttaaaaccatttttattggcattttttgccgaataccttgtatattctagaaaaaaacactttttatataaaacagttaagattatgatataattaacaaatttttaataaagagagaaattaagaaagaagaagaaaaatggccatgataaatacagttgttggttttactattcggttggtgatccttttgttcattttgataggtatgaatctcaccaacgcttccatatacttttttcagttttgttcaaatcatgaatccataagtttaacatcttaattaagaaaattagctattaaattcaatatgtcaaaagcatgcaaaaggagagatattctttttttgctttgatttttaaaatttgatgtatatgtttagatttaacaatacaaaacttttttaaaaagaaaataatattctcttcgtcccacaaagataagttttctaaaaatttaacattctttaagaaatattgtataatgacaatttaacattcttctaattaactaacaagaacacccaatcttttatgttgctttttatttcttatgtattgttctgttcctttctctctcactttattccatcctctgttttgtggattgtatggtatcgggatactagaggctagacaacttaggaaaatatattttctgtaacaatttgctaattttcttattacctaagctctgttttgtgtaacaatttgctaaacaatttttgtgtgtgtggattacactatacaacagaaatgggtgtgcaaattaataataagcatgttaaactctaccaa

SEQ ID NO: 16276 - DNA, 514 bp, Arabidopsis thaliana landsberg
acgagcccttgcacaagcacttcctttatcatcatgaccagcttctactcccaagatccgtaaacatatgtagtttatgactgagcagaacatattactggggctttctacgtgcaatccccacccaccatcttcgttctatataaaccagttttgctaagtctttttgtgtttaataaatatataggtgaaaattgtggacttgttgaaagagtttaacgaccattcatctaatttttcatcatttgagttgaataagtgtaaaaatgattcaactcatccaacaataattgggaaaataaacaaaatacaaaagaaaattgttcaactcactaattcatttactatttcgcagaggaataagttgaataataaacttttttttttgtcgactaagttgtttgtggtcattcatttacacacaatatttgcaccctactccatgtgtgtgcacacgagatattaaaaaataaacctgatggttgtacatgtaccgaagtaactgtacccgatg

SEQ ID NO: 16277 - DNA, 4042 bp, Arabidopsis thaliana landsberg
  unsure (1)..(4042): unsure at all n locations
ataaaagataagctaatttatcaaacatttgatagtcttggtagctatttttataattgtcagtccaactttgtgctataagccccaaatatcaaactttttgctataaaccccaaacttatcctaagtaatactcaatctgttcctttttgtttgatcctttaggaaaaacacaaatattaagaaaacatatgaaatgttgcttttaaatttactgtttttcgtgatttacaattttcaataactctaaaccaataatatttaataatttgtattgaagtttacaatttatcaattataactaacaattattgcattgaaaacctaaaaaataatcttttttaaacaatttttttttctaaacaatcaaacaaaaaagaacagatagagtactaatttaacagaagaaaaaaactcttacttgataagttttagatccaaaaacaataaacataggccattcaacatctacaatcactcactgtaagtctataactatcactgtctcctaaacaagtatcactatgactgatgggcctcaataacatgctgataagaagtgggcttaagaggcccattaaagtccccatgagaaatcttgctttcatcgcagttcattgtttaacaacgtctctttcactcttttttagtttttgattctctctcttctccgaaatgatgggtcagattacaaagagcaaacttcgtttccctctctcaacattcactaagagatactcatcatttcaagctgctaaatcggtgattgacaaggctgcaatcgatggggagctcagagttttcatcgtctccggcgaagtttccggcgataacatcgggtctcgtcttatgtcctcgcttaaaaagctctctcctttacccatccgtttcaatggagttggagggtaagcacttgggtttcccccaatttagaagtttcttatgaaaagttttgattctcaattgaaaatttcataaagttggaacatttgtatctttgcttcttacaaattgatagatccttgatgtgcaagaaaggattgaattcgttgtttccaatggaggatttggctgtaatgggtgtatgggagcttttgccacatttgtataaattccgtgtgagtaaccttttgaatggtttgatataaagctactctagattcttttgattgactagtctagtttttgagatactaggtgaagttgaaggagactattgatgctgcggttaagtttaagccacatgttgttgtgactgttgattcaaagggcttctctttccgtttacttaaggagttacgaggtaaacaacacaaaacttgtttcatcaaacttgtacgagagaatcattgagctttagtgaatagaatgcttgctaaacagtgtcgcttaacgactaagacatactaaattcaaagcttcattgtggttttcgaaaagcacagttttcttgaatagtaccaagatttatgtatggaagcttcttctccagtaggaacatgtttttgcgtaatttgacactaatctctaggatgatgtccttgattttgttttctgtagtagaagttgaaaaagtagagaaataggaaccttagaaatggctttttgaagccaaccattcctgaatgaagtcatatatatcatgtaggacaatggaggaatgctttttggctttgcagctagatacaagcagcagcggttggaaaattgttctgtgcattttcactatgtcgcaccgtcgttctgggcttggaaaggaggagagtcaagacttggaggtctgtctgaattcgttgatcatcttttctgcattcttccgaacgaggaaagggtttgtagggagcatggggttgaagcaacgtttgttggacatcctgttcttgaggatgcttctgagttcgaccttgtatgcgttttcttcttcttcttcttgaattacctcagtttctatgacactctgtcagaattctaagtgaaatggtgctcttttctgccacaggtgagaaggtgcaagcctcaggaactgaaacttgaaggcttgagttttagcgaacactcaataccttctggtaatgtgaagtttatcaaaatgatttaacttttctacagattggatatctacttttattgatatctcattgttcttctgctgcattgcataacttttcatgaaacaagactccactgtcatttcggttctaccggggagcagattacaagaagttgaaagaatgctacccatattttccaaagcaatgaagctactcaaagatccgtttccaaaactagtaacgcttatccacgtcgcatccaataatcaagttgatcattacattggaaaatctttcagtgagtggccagttccagcaatactagtccctagtggatccactcagcttaaatatgatgcctttggcgtaagtctttgaaacctcgttctaagtgtctcatctgtttactcctctcattntgcggtgttccataataacaggcgagtcaggctgcattatgcacttcaggaacagttgctgttgagttgcagcttgctcatctaccttcccttgttgcttaccgagcacattttctaacagagctattaatccgttacaaagccaagataccttatatttctctcccaaacattctcctagactccccaatcattcctgaagctttgtttcaagcttgtaacccttcaaatctcgcatcgatactagagtatatctttttcttttcacccacttttactttatattttgttatctggcaattgagaaatgggcatgatgatgacgtgagatgttgtttgaaactgtaggagactactcttggatgaaaagatgagagaaagacaagttgttggtgctgagaagttgatacagctcttgcatccgtcagaaagcagaatgggcaactcaattcattgcactggtttggaatctcatcgatatacgccaagcattttagcagcttcgactattcttagttatgccaggcgttaaaaactatcgtgagtcacatgcctttgtttgatactagagtacgctgagatacttgctataatctaaggttgaatttttttcataagagttctaacatatggtaaattacagttaaaggcgaaatgatccatgtagattagaatgtctcagcttatttggtttgcagtctaagacaaacagtcaaaaagggctttcgaaagcataaaaggataaagtgaaagtattgaatgtctaagcttatctgctttgcagaaacagataagatcctactagtgtggcttgtcataactggtttaatagtatatttcgctgtaaagatcgatacagaattgtgggagagtgaggaataaaccagacaaagatgcttccaatctcatgttctcaaaccccaaactctctcaagcaatgcaccaatctccatgtacaaaaaagaaaaagaaacattctcacaacagtatatttgttgatgaaaattcttgcaagagtatatgattatctggttctaagagccatccattgcaatatcaccaccagttgttggctttggtggagttgctccaaaagtgaactcctgaggagggatacttgaagcaggagatgaaaatatagaagaagtaggagcattgttgaacacaggagcttgtgcttgattatcaatcttagggaaaccaaacccaaacgttggagcatcattaatattcatcgccgacatcatctcagatccgaatatcccctgctcaaactcctgcagttgttggtaaaactctgtgtacaaagaaaaagcaatgagtaacagtttcaagaacaataagtaagtttctaatccaaagtctaagtacttgcctggacttatgtcagtgcttggtctccgttgtttaacccactgatgactctcagcgagtctccacccttttcgtttcatcaagtacgctacaacaaccgctggtgatctgtcatgtaatcgaaacacaaaacatatcactctattagtctaaataatttatggtaatcataagaaagcagccgcacgtttaggatga

SEQ ID NO: 16278 - DNA, 4664 bp, Arabidopsis thaliana landsberg
cctacatcaaggaacatattcaatatgactccattacgccaagttttaaaaaacactttatcatttaaaatttcatataagttttgtttatttgaaaatttagaacctcattttttggaaattattttagtttgaagtatcagccacatattttattttttattgtttgtcaattttctaattcattgaaattattatggacatgactattttagggaagttttaaggacttattggcaaagtagacactttttcaaaaataatttgtaaagtaggtagttttttttaaaaattagagagatagacactttttttgctttttgtgagatacagaatttgtctaatagactaaaaaacaaaatacatatcaaatactaaaataccctttatcttgagagagaataaaaattatatgaagaaccaattttattttattttgtttgtctttatctttttatttttttattttagtattcttaaatacttaaaaaagttaaatattattttttaaaaaaaattacattaacttttagactatttatctgtcatcattataatgcacaaacatttaaaacatcgttttatacactaaccattattcgttggtgtacaagtgtttacaccgatatttcataaatcatcaccgacttctcttatacttattaatataagtaatattgtttttaatattttacaaacataatgattgtataaaccaaatattattattcaatataatggtgtacatgatggtgtacataattaagttactcttaatggtgtacaaaatgattgaaattattatgacgtttggtggatagaatgatatatacaacttttaaatgataacatacaagattggtagacaaagtgtacaaaacttggtgtacacttatagagaatgtataaatcattatttcaattagtggtgtacatcatctcgtacaccaatgttagtacactgtctcatagatttttaaaggtgtaagattatatacaccatattttcatcatctatgtacatcattttgtatactgttatactcagtgtatcattttctacatcagtaattatatattaatttttacgttattgttgtatactaccattagtacaccaattttaacaatatcacgtgcaccgtcgactgagattaaataaaaattgctacatatttttaaaatatagcaaaattagacattttagattcacataaaatttttaagaactaatatgattatgtggtaaatttttatgaagaaatatcatcaaataaagtaaaaatatttaagtaaaaataaaaagtaggatttgacttgaattttgtttttatcttactacataacaaaataacaaaaggttatataagtcatttactaaaatctctattagacaaaaagttgtattagagagggaagagaaaagtgtatatttctcatatttctaaaaaaactaactattttgcaaattatttgtagaaaaagtgtctactttccaacttatctctaaaaaaaattaccaactatgcaactcataattcttcattttccaaaccaaacttaaaaacattagaggcagtggctatgatcattgattaatcagagtactttcagggggtaccaaatataaattttaattacaaagaatttactatgattaatataggtgtatagtggagtcaacaatgaaaaatgtaccaactaagcaaacaactacaaattcttttgacatttgtatacattaataatttagaatgatatgattgaaccaagctcaagtgacccttttctaccgtagtaggtttttcgcccatgattagaggcataaattcaacgataatctttactttttgaaatttattaactgttactaagatacaatattacttttaaagtttatatgtgcttccatgaataactaatgttgaacaagctgtagatacattcaaaacagtcgattttttatatggtccgtttgggtttggtacttgggtgtatatatatgactaaaaataaaatgtagcaaaaaaaaatgaaacgaataataataaaacaaagaatcaaaatattaattaatgcagcaaattattttgatagatattatcatattaatgcagcaaaaactgactagccaccagctagggtttcactgctcaagaaccaacaaataacataagagcattcacattggacagtttaagtgaatgttttcccatataatataaactattagataaattcaaatatgattattaaaataagtaggtgtgtttacgtacaaaattttcttcccaaaatattttctaatagacattttttttttaatgtctctcatttaaagacactgctatattttaataatcttattttaattttcttaatatttttattataaagaagacacccagtcaaaatgtccaatgtagatgctgtaagtcaactacgcatgagtcacgacaaattacactagtgctaattcctagagatttttttttttctttctgataaatagatcctagagattctagatgagaattttctaaaatatagaaactgaacaaatcaaacaacaaatcttataagcatcattaatttgaaaaaaaatactaatagactagaatttaccagatggagagagcagctacagagatctcagcattcttcaaatatccagcaaatagtatgactgccataagataccatacctccagacttccaaagtaaaaataaacaataataatgataaaagttaacaaaactgaataatggtaatactattttcataataaataaataaataacattaacaatagagtcgtatgggtgtggttgtgactaaccagagcataacagcagaagccaaagataatctgacgaaactccacaaattatgaaaagcttcccatgagaatccagaccaagcttcaccgtatgtaccactaaatatgtacacaagctgcgccacgacaatgaaccaccacgaggcgttgagcacgaccgctagacccgccgtgccccactggagcccctcaatgacaaaccacgtgagaagcacgtgtagaacaagtgcaaccgctgatatcgcagccatcaccatgattttgctttgtgattgcaagaacttagccgttgggtaattaacagcataagcaaagatctgagggatcatgtagatggaaaatattcccgtggcgctagagatcgtcggcgtttggccgatgaacgcgaggattggagcggcgaagatgtaaagaagagacagaattcctgcggtcacgtttagtatcacccatgatcgttgcaagtaaacgccaagcattgacaattttcctgctccaaacgcttgtccacatagcgtttctaacgcacttcccattccaagctagttgcggacgttcataatcacattcattacaatgatcaaaacaaaacttcttaaatcttacaaaaaaaaataaagtgaaacttttacaaaaggcaaaaaatatattaatttttaaacttgagaaaatggtccatttgataaataaattgtactttgactagtgactacaaattgataatcatgaattcatttcttcaatttttttgggcgtttgaatttacatttttaatgtatatatgttaaattattttttttaatttaatggtcttttgatataaattaaaatatagaaaattgtttatagaaatgtagacaaaaacattttgaatgatttggacatctcccaacttttggatctttgtgtgttttaagttaataatgaaacttagtcaaagaaagaaaaaaaacgcattttggataataaatgcaaaccacaaaataaaaggcgtggatataatttaccatgatgccgaatgagaagccggcaacgacggagttttcgacggagacagcggcaagagcgatggtgctgatgtgaccggcgaagacctgagtaatagcgccgagagaatattggttcacggatgtgaaaatggcgggaccggccaagtaccatagctttttggtttccacgttgaattccctaacgaagccaccgacggtggtgatcggaggaatatcgtcgacggataagaaaggaagatcagaacgttcttccgccgcagtgagaagcgtctccgttatatctttgtcttttgccatcttaagagaaagagatggagagattaaaggaggtcgaagactaaggaccaacgagtgaggatcttgggtttaatcattcatgaattatataggaaaaaaaaatgtcaatacgtgcgaccaaaaaaattgtttttatgatataaaggaaaaaatagctaatatagcaactagcatttaataaaatggctaaatgtagacaaaatcattgttgtattaatcaaattatggtatatattatggatggattcacatgtgttttgttttggtagtattattaaatgatatgtgtcagtattgaattttggttaaaactctagtcaaattataatataggattctattactagcaatcaattttctaatatttttttgggtattgatttgatttttttttgttaaaaactttaaaaaaaaagtttttgttttgggtgaataaaatcttaacaaatttgaaaaagaaaatctgatgctgtttttatagatgagaagaaaataaaataatgaaatttgaagacat

SEQ ID NO: 16279 - DNA, 1374 bp, Arabidopsis thaliana landsberg
  unsure (1)..(1374): unsure at all n locations
atttatacacaggttttactcaacatcctactttctcgatttcgagcagaggtctttaccgagttcatcagttcagcaaagcagagatgttcgtcatatgccaacctgaagatagtgaatccttccaccaagaactcattcagatcgaagaagatttattcacttctctaggattacactttaagtaagaaactaacttttaaacccgatttcctcttaccagagatttttttttttcacttaaactttatctttgcagaacattggatatggccacagccgatttaggcgctccagcatatcgcaagtttgacattgaagcatggatgcccggtttaggacgatttggcgaggtaaaaaacaaactctattcatttgtgtcggaccaccagaatggaatcctagtttctactttgagcttgctgctttaacttctgaattagatatcaagcgcatcaaactgcacagattaccaaagtcgaagactgggaatccgttaccgcccatctgaaccgcctcagacgggtcctaagaaagggaaagcgaatcttccagccactaagtttgtccacactctaaacgcgactgcgtgtgccgtcccaaggatgatggtgtgtttgctggagaattaccagcaagaagatggatctgtggtgatccctgagcccctgaggcctttcatgggaggcattgaactcatcaaacccaagcacaagtagtttttaatggttagctctttgcaattcttgctgtgattcctcttgtacttgaggttttgttcattatacttttcacaggcgctgagttttttgtgttcttgtctcagaacataccatttatagtttatatcatcataaccgatgttctttgattcaataataacgaaagggaagtatacattaacaggtttctttttaatgcaaatacatgtggatcgtggtatttcttctaaaaataactgaggtcagattatgtcttactaaaaaaaagtgtttgataattgcaaactaaatattgaactacagaattgtagggctttaccccgaagggaacccttccagaaattctcgaaggcccaagacaagcttaggcctaggagggggtttggaaatagttttcaaccagcaatagacgcgcctcggnnnnnnnnnnnnnnnnnnnnnnnnnnccccaagcgcaaagatgctttagcttcaaccaaagcctcgttcttatatagtcacacaatacccatcaacttgatacttactaccgatgtgggactctgttacctaaaacaaatcgactcaagttctcaaaaattcatttattaccgagaagatatttagataataaatgttgaaagataacaagattaggaattaaatagtttac

SEQ ID NO: 16280 - DNA, 2035 bp, Arabidopsis thaliana landsberg
  unsure (1)..(2035): unsure at all n locations
caaagatgagatcacgatgaatgagtatcaaattcggttgaatgcagtcattgatgcttctagacgcttattgcgacaaggattacctttttgtggacacgatgagacagaagaatcttttagcataaggtaactttccggaactcttgaaatatactgatgaccaggacgaggttgtgagtaaggtttgtgttaaaaaatgctcttggtaacaatcagatgacatctccaaagattcagaaatatattgtgcattttttttgcagaagaattagccaaatctattattgaagaaactgatcacgatctatttggtttgttggtagatgaatctgcagatttttctgataaagaacaaatggcggtagtatttcggtttgttgataagaatgggatagtcaaagagagatttatgggtgttactcatgtgagcgagacatactcagcatctttgaaatctgctattgattctatgtttgctaaatatggattaagcattcaaaaggtgagaggacaaggttatgacggagcgagcaacatgaaaggagagtttaatgggctaagatcattaatctcgaaggagaacacatcaacattttatgttcattgcttttcccatcaacttcagttagttgtagttgtagttgccaaaaaacattttgatgatggggattttttttatatgatttctccgttgatgaatgtggtgggaggttcatgcaaaagaaaagataagttgcgagataatcatcgagcagagattgagagagcaattaatgatggtgaactcagtactagaaaagggttaaatcaagaggtttctcttcaaagactagtgaatactcgtttgaactctcattacagaaatctaacgcgtttggttgagatgttttcttctatcatcaaggtgcttgagtatgttcaggatgaaggggttgaagactccaaaagacgacaagcacatggtctccttagatacttccacagctttgaatttgtgttccatttgcaaatgatgatacacttattaggactcacagatagcttgtccatggctctacaaagaagagatcaagatattttgaatgtcatgtcattggtgaaatcaactaagagaaagctgcaggagtttagggttgatgggtggaattctcggatgattaagatctcttctttttgtgagaaacatgatattgaaacgcttaacatggatgaagattttgttgactccaggaaaccaagaaagaaaacagggataacaaatgtgcatcagtacaaggtgaattgctaacatgcataacaaatgtgcatcactacaaggtgtattgcttatatgcaattttggatttacagcttcaagagtttaattatcgttttaatgaggtaaacaccgaattgcttatttgtgctgcttctttatctcccattgatgcattttatgagtttgatcactcaaagttagtgnnnnnnnnnnnnnnnnnnnnnnnnnnnnttagtttaggagagttcatatctattgagcaagaattatctatctacattgatactgttcgaaatgatgagagattttctaatttaaagaatcttggagacattgctcaaaagttggtggaaacacgaaaacctttgtcatatccctttggttataggcttttgaaattggttttgattttgcatgttgctactgctactgttgagagatgtttttcagccatgaagatcgtaaagacacatcgacgaaattgtattggagatcaatttttgaatgattgtttagtttgttttattgagaaagatgtattcaatactattacaaatgagattgtgataaagagattccaagacataaaggatcgtaggatgcttttgtaggacgtttttttttgtttgagaagttgtaaaaaaatgatttttttttattaaagacattttatttgttacgttttgaactgggtaaaaaacttccttgatacgcttctgtcaatgataataaaataagttggagttcttaaaaaatcaatcaaatactgtagtt

SEQ ID NO: 16281 - DNA, 4534 bp, Arabidopsis thaliana landsberg
  unsure (1)..(4534): unsure at all n locations
acgaaataagtattatacgaaaatttctagatcgttagatatatcttccaaaaatacgccaacctaatctaatactttaaggtagagataagaataaatacagatacatagtgaatgaaaatatatactttaaaatgtggaattattggattgtagattgtaataattcgacgcaggcatgcatgaacgtgagacagagaggaagaaacatatcatagtccatttatatacatgtcttctgtttggtgctaacattacatctccattatttcaaatatattaaaaatgtgtagaactgtccttttctcattcccgtttttaaatataatacaattggtctttgttaaagagttttgttaattatcttttaatttccatgcaatttataaaatattcttataatgttctgatctattgtcatgttgtttatatttctttgatatatactactttcattttttttgtttacctttttggtttgcaacagattaagggcgctaagtcttagacattcttataaataatgtcttcataagaattcaaacttcatattatactagaaaaatattaaatatgacaagattatttgagaagtatcttctaccaccttggcaaatcggaatcttctagctatcccggtaacaccgtaagagcacgtgtcaatctgactgcaagatttgcatgtaaaaggttttatattttcctgacaaattaagggttctagggcctgactggtttaaacgcagcagatgcggttgcggttgtgggagtttgcggaaacgggcggttgcggtttcaagtgttatcaagtgttttgaacgactggttacgtttgataatggatgcgtttgcgggagatttatgactggtaaaccagcgggtgcgatagtaactaaataaaaataaatcaaaataaatataatatattaatattaaaagaaagaaaaatataatatattaatcaaaaaactcaaaataatacaaaaaacaaaaaaaatgatgccatgaaatactcaaagaattacattagctaatgaatggataaaaggatagatcatacttacgttgattcttgattttgattttgattttccgtcagtttgggtggatgtcgtaattgagagaatagagttttaatatattgattagggttttctgataagaataagatatataaggtttgggtggaagacataattcttttaattaattaaaaaaaaaaaaaaatctaaccgcttaccgccacaaacgcttgtgggaaggagattttgaaatctggcgatttcgaacggtccaaaacggtatctagcggtttttatgattagtgtcaaacgctaacaaccgctaccacccgcaaacgcagcgtttgcaggtggcagagggagaaccaatcaaaacattagtcactggtttaaattgcgttctaactctgtaagcctcacttcaattttggttttaggccccaaaaaaagggatatactgttatgggtttgattcggtgagatatttgcgtcatcaaaatatgtatgataagttcaagaagggacacaattggaaattattagcgttgacattaaagaaatacgcgtggaagattagcgatacaatcatacaagcagaagaagccattttctaatttaaaaacgattacacacctcatcagtcatcatcatcaacattcctaaacccattttttgtgataaataaaaataaagtaaaaagtagattagacagggacatgatgggaccaccaccaagaccattacaataatactagtcaggcttcttctgtctgctccacccttctgattcagtgactgtgagcctcgtgtccctcctatatcacattttaaaattcacaattaatttaaaaacgaattaaagaattaacaaaagtatacaaaacacttgttatacgctcatggtcgctacgttagagaatgaggcacactcttacgtttcctaggactatattcaatgcattattaatctttataaacaaagattcgttctttgacccaccaaagaatactaaaactaatggttacttttacttttttttttgctttatgaatctcaaaaccaaaaagataaaaaatttacccggtgggggaaaatggagtggaggatgttgggcttggtgggcttggagtgggtggagcggaggacgccgtgtttcttgaactgttctctaacaacacggttgtagataaaagctgcgccttgaaactgaggaagaactagccaagccacgaacacaagtttcaccgtataccaaatcggaatccactcaataagcgattgcagaatcagttccgtgagtgagaggaacgaatatattatccaatacgcaagccactgttcatcgtccacttttgttgtgctctccattgctatcaccgatgcgtacctgtaatcaaaaacataattagtaaatattcacagatttttgtttttgatcttcaacaaaaagtagagagatcgaaccagaaagaaactttttcttttgttaaagggtttaacaagagagaaacttacaatggataaagtaacatcacgataggcctgcatatacattaccaacaaatcgattacggtttggattagaaatcgaaacagaggaaatcaaaaagtaactaattttggaaacataatggaaggaaaattaagattaagaataattacccagcgcctgaatgaagagcagtgaggaaagtccaaaatttgtccattgtttttcttcctttgcaagatttttggaaatgtttaggggctctgtgaaataagagagaaagagagagcgacaagtctgtgtaaatttcgaggcgaatcaattttatgtagaagaagaagacaaagaaatgtgaaaggaagaacctaatttatagaaggaaggtaaaggtatctaagagagaaatggtacggtttgctacagaagttggttggttccacacttttcattggctcttattggtggaatatcataaataatattttatttttatttttttaattaacgtcgtactagaacgctgatgccgacatacaactagtccggtctggtctgtctttggtctgtctggttcgattgggttcggttagtttatcccacacgtggcgagattctaagcttgaaggcgtcgacatggcaccgaccttaagaataaaaaagacaagacgtcggtcggtgagagcttatgtcatttctttatttctttattaatcttttaaagagatacttttgtcattttattaatctttttgctgattattattttaccttctttgcaaagttcaaaatttgtgattagtttgattaagggtgaaactaatgggtttgattttctcccaagtcacgtaagcttcggaaaaagttatgacccaattacattcttttgttcctttgatagtctaattatatatattttgaatcttcttaacaagtaacttcgtaaaacccaacaaatagttgattcaagtaaaacatatgactgatggattcaaaatgaaagatatacttggaattatgcttttttcttttgggcaacaaaacactgcaaattcataaaaatagcttccaaaaatgaaaacccaataaagatgtaacaattgaatgtgtggccttcttttgtttgagtccgttgggtatttaaatgattagcatctttttttgctcaactaaatgattagctttaaccatactaattttacacaaaacatattatcaacattagtgtcaccgatgcacctaatcaccaccaatgtagttctttccccaaaaaagtnnnttaatagaaaagatgtagaggggtgtagtttttgcttcttcatccaatgatagagtattattttgtaagattttcctaaaaccataaatacatacattacttatactgttttaaccaacatagttacagccaaagttgaagaggttcaatgaattaaaagagaaggcgagaggtaataatacaaaactaaactttttttatttattgagattgatgaacattctcaaaccaaaataaataaaaatatcaagtaggaaccaaagtaatgatttgtgtattcatggagagatgatcaaagtggttcatcaacacaactaaaacccatgacaaaagcagcaccattgtaacagaaacaaatcttctaatcgttgtcttcttctttgctttcgtggtatcactcgaactcgtcacattcgaagaccaacaagatgaatgagaaagcaatgtcgtcttcttagtttgatcatcatcatcagagtcgtgaaagagttttctccttaatggcgatatttcttgtatcatctctgcctttggtttgtgttggagagagagcattaggtttctgggagagttttcgacatactcaagagctttttccacggttatccatgaaaccgcagatgagtttttacccgttttctgggtgttcattcttcctaagctctctcaacttttccttaagatgttggtgtgaactactctcatctttgtctttcattttcatttcttaccaattactttgctat

SEQ ID NO: 16282 - DNA, 1340 bp, Arabidopsis thaliana landsberg
attctgcattttagttcctcatatcttgttctcttcgttttggaggaagggaggtcctggggttacacttgaagaacgaaatgtcccccaaaaagagtttgatatctttttacaataaaacgaaccaaaaataaactatggaaagagggagaatctaatatgtatggtgatggattgttgaggcttatgatgatgatgtgaaagaacatgttgtgttaagtcgttttatagatgaaagagcatcaaccctagtctactccttgggacgattatggaacaagtgtaaataaaaaattgaaaaatatagaagaataaatggcagtaaatcttattattattatttatttatttattttggcagtaaatcttcttgtcattaattagagattaaacataatcttgttgactagattctcttttagagagagatacggttagggtgcaacactatggtttatggagtatttgcaattccattgcattaagactaaaaagagaattagttagatttcaaatgtccaaacaataactaacccgtactttttgtatattgaagagaatctaggcattcgtaagaccatcattattgatagtttcttaggttagttcttagataaagtagatcttaaatttaatgttataagtcaattaatggttaagaatagctcttatataagagccaaatctaatgtttcttaagttaattcttagataaattaggtattaaatataatgttttaattcaattaatcttaattcttagataaattaggtattaattataatgttttaattcaattaatcttaattcttagataaattaagtcttaaatctaattgtttgtcattttttaaaatttttttatgtcatgtatgtttcaaattttatgagttgtaataattattaagttttttaaaattataatgtttctaaaaaaaaattcaaatttttttttttaagaactcaaagttaagagtccaccattgcatattgccaaaatttcaatctcttaaccaaattcttaacttcaaaattttcaaaatcaattataaaaatattcataagaactatgtgaagattatgctaagaaactagcattaatgatgctcagatattcttatacctgtggataagaaagattcaattacagagtagtttaacacataaacataacaaacacattatttcttcttatttttggttcattgacttaactgttgcagagccaagagccaataaacttgtcttttttcatttcctgaaatttgacagatgcgatgttccatcaagacctttcttaaagtatccttctgagtattctcttaaggttgtgtctctg

SEQ ID NO: 16283 - DNA, 1769 bp, Arabidopsis thaliana landsberg
  unsure (1)..(1769): unsure at all n locations
ctggttctgccttactccctactccaactcgctctcttgctttaaaagatgtcttatatgttccagatattcagaaaaatcttatctctgtttatcgaatgtgtaatactaatggagtatctgtggaattctttcctgcacactttcaggtgaaggatctcagcacgggggcccgattactccaaggcaagactaaaaatgagctgtatgagtggccggtcaattcttccattgctacctccatgtttgcttcacccacaccaaaaacagaccttccatcatggcatgcaagacttggccatccctctttacctattttaaaagcacttatttcaaaattttctttacccatttctcattctttgcaaaaccagttgttatgttctgattgctctatcaataaaagccataaacttcccttttactcaaacactattgcctcttctcatcctcttgaatatttatatactgatgtttggacctctcctattacttccatagataattacaagtattatctggtgattgttgatcattatacccggtatacttggctctatcctttacggaaaaaatcgcaggtccgtgaaatgtttatcacattcacagcattggtcgaaaacaaattcaaattcaagattggcacgctgtactccgataatggtggtgagttcatcgctatgcgctcatttcttgcctcccacggtatctcacatatgacgacaccaccacacacaccggagctcaacggtatctctgagcgcaagcatcgacacattgtcgaaactggccttactcttctaagcaccgcctccatgccaaaagaatattggagttatgcgttcgccacggccgtttacctcattaatcggatgctaacacctgttctaggcaatgagtctccatacgtgaagttgtttggtcaacctcccaactaccttaagcttcgaatttttgggtgcttgtgcttcccatggctgcgtccatacactgctcacaagcttgataatcggtcagtgccgtgtgtgctccttggctactctttgtctcaaagtgcctatctatgtctcgatagagctactggccgtgtttacacctccagacatgttcagtttgctgaatcgagcttcccgttttcgaccacatccccttctgtcacacctccatcagatcctcctctctcacaagacacaagacccgtctcagtcccgcttcttgctcgtccactcactacagctccgccttcgtcgccctcgtgctcagctcctcaccggtcaccgtcgcagtccgaaaatctctcgccaccggctccgttacaaccatcactgtcattgtctccaacttcgccgatcacgtctccttcgttgagtgaagaatctcttgtgggccacaattcagaaacaggcccaactggttcttctcctccactcagcccacagccacaacgcccacagccacaaagcccacaatccacaagcccacattcctcaagcccacaaccaaatagcccaaatccacaacattccccacgttcgttaacacctacactcacgtnctcaccatcaccctcacctccaccaaacccaaatcctccaccaattcaacacaccatgagaacacgatccaaaaacaacattgtcaaaccaaaccccaaattcgcaaaccttgctacaaaaccaactccactaaaacctataattcccaaaaccgtgggtgaggcgttacttgatccgaattggagacaagccatgtgtgatgagattaatgct

SEQ ID NO: 16284 - DNA, 1896 bp, Arabidopsis thaliana landsberg
tatggttaaggtaaaagagagagaaatgagaggatcaagatttggttcaaatccatttggtttgtttgtgggctctctctctttctttcttttcgtctctcttttttactattgttttggagatatatacatgtggtcaaggaaatatattatttttaaaaattatgctctataaaagataatgtactattgtcacaagttcaaattcgaacgttggactctaattaagaaaaaccttttaaaaaagcagacgaaattataattctagatttcttctcaagattttctttcttaaaagtaaaatataagtgtattaatatattatttggatgtatcacctcgaaatcatttcctctttttacataataacaaaagtagtacaaaagtaaccgttactcaaaaaacacaaattagcatttagtacaaaagtctaagctcaagcggactcgttgaggatcttaccaacaacggggcgtgctttgcacatggctaccaacggtatagctttgggcattatgactcctcctccaccttcagtcatatccacctcttcttctcctatcctctcccactcaaaacattgaatcaaagacccgatagtcaagctcgctagccgttgagccagaccggacccaggacacgcccttcttcctagcccaaaccccaatagcttctgagcctccccttctttctcgaacctctctggtttgaagctcgttggatcatcccatatcttaggatccctatgtattgcccatgcattagtcaatagcatcgttccacgtggcatatggtaaccccctactttacagtcttctgatgctacgtgaggaaccaacaagggactcgcagggtataagcgcaacgactcggacacaatgttttgaagataaggaagatgtgagaggtctgattcctctacaagcctgttgaggccaaccttattatcgatttcatctctcgccttgcttagtatctgtggatggttcaacaaagctgacaatgtccattccaatgttactgcggatgtatcagtccccgctagtataagagacttcaacacattggacgcatacaagcataaaacaaaactaattattattttataccaaatgtgacaatcgactaatgaacttaaaatgttactcacgagcatgattcctttgataatgttgtccgtgtagtactcgggttgggtttcttgcagacaaagtaaatgatcgatcattgtgttaccttttactttctccacacgtttctcgttaactagactttgcaaaaactcatcaacacgacctgctaacttcttaacatgtttctcatagttcgttacgtaacgaaggatagggaagtagtctgctgcgttccctgcgccgccgctaacaactacctcggcaattagctgtctcacgtgtttagcctcgttgtcgttctctgttccatcaccgtagaatctttttccggccaccattctaatgatgttgttgatagttaaacacataaacaatggtttcatctccactttcacaaacccctgaaattgcaattgtttaaccaaatggttaaatttaaaggttcacatatttttattggtatctaaaaatctagagtaactatgttatactttgtagcccaacgtattttataaaaagttttaccaatcgagacgacgagacagtgattaaatatgttaaaatcgtacgtacttacatgttgagagtttttcgctagacaaattatgagccgtcggatctcatcttgacggatagatacgaagctattaagcctaagagacgagaagatctcaatggtgccaatacgtcgaagattcctccaactatatccataagccgcaccaaccatggtcgtagagttgtaccccaggtgtgtcccgac

SEQ ID NO: 16285 - DNA, 2822 bp, Arabidopsis thaliana landsberg
taaataactaaaataatttatcttttaataaagtataatattaataatgtcctaaattttctcctttttaaagtaattagaatttatgaaaaatatattagataaggaaatgttagaaattaggaattttaatttattgataataattaatgctaatggcattcctcgtaaataagttctaactctgggatttatttcacaaaatggctgcaaaaatgtatatgtagatataaagatttcataaagactaacttggcaacaacatattttgcaaaaccattgcatatttcacaccaaaatcttggcttttgaggttgcttgacatcttcaagtttgatagcttcttctttgacaaccttcttgttgtgagcacgacaacaaaaatagtaccacggccaatctgtatcaattaccgaaacagtgcaaactgttttgcacttaccgaccttcaaatgaatataaagaggaattaacaaactaagctaaaaatataaaaatataataaaaatgttagtaggataaataaattaatgaatagtacatcagaagatgtgaggacttccttgattgtttgccttggataatcaccatcgtcatccccaattcttggtgcatagagcctcttgtgaaaagatccagaacttcccaaagttaacccatcagttggtatgctatatatcaagaaaatatactttgcttaatattatgtataaacaaatatatttagtgacaaataaatacaattacctttgcttaaaaagacccaactcagccaacgtgggatccacgaagacttgtgaaacatcaaaagaattggaaacactcctagtatctgttttaaaaatataagatcgtgtttttaaaatagtatagatatgtagtaatacataacaatataattaccgttgtagagattgatcttcgcaaatcggattaagcaaacaacaataccatcggttgactcctggcaagctttgtcaacgatctcagcatacttctcccaaagtgtacatgccaagcgagtgtcactaaaaatggaaagaataatttattaataaaaagtgaaaaaaacaacaaactttaaataagaatgaatatgaatatagattgtttgtactgctgatctctcaaatataaatcgatttttttggtgggcttgttgttagcgttaagatcttgaatttcagaccgatcgacaacctgaccgattacatctgtatagacaaagagaagaaatctatgaagagataatgcatatatgttcgaaaagaaaataaaattttgaatctaaccgtgcaagatattcgagttagcggatacagagaggatcacgtcaaacttagcaagtgagaggaacaaagcataagaaacggtatcacatggagagaccgtggttttgaaaacaaatccaatcttgtatttcaagtcagaaatacgatactgaccacttgtaggatttagagtgatggtcgtaatgatcttccaaacaccctcggttaagcacctttcaaacttcttgatctgctctcttctcacagcagcatatatcttatcaccctatatgacaaaaataatttaaataataattagtaagggaaaatgatgcttgaacctactataaggctggacaaaatataaagttgaaactataatacacgtacagcttcatcaaccaaaataattttgatggattcaccagcctttacagaatattgtctccaaacatgaagcaatttaacctgaatacgccaagcgttcttgtaaggcttgagagatttcaaggcagtaaatggaagaggattggcgagcatcatttaaaaaaaaaaaaaattagaaatgaagctgtatgagtctaagatgaatgagtagattgaaatgaggcgtccgatatttataagaataagtagttaggtcaaaaaaatatgcgcaaaagatattattcgtgaaattcaagtttattccatatcaaaaatccgacaattataagaaaatcttcatcattttccgtaaaagtggatatgtatataggaaacacttgtgataaatgtaagatatttgcaaaagaggatcgaaacgaaatattacatgtgctataattatggagaaaatgtaagataattccaaaagaagatccaaacgaaatgtcatatgtgatataattatagagaaaatgtaagataattctaaaagaagatccaaacggaatattgtttcatgcataattatggagaagtgatatatacttaaatgtgaacgaagatagacaatatattgaatgaaattcatacgattagtttcctggagtatagtcggatgaatttatgcataaaactacaaaatcggacggcttgtaataaatctattcaatgaccagtattaaacggagaatcccattttttaaaaacaggataaaaagaaccgcatgttttttttggaaaaatacgaaatcaaacggatacaaacaatttaattcaatggccaagattagaggcgagtacccaaaattttaaacccgggtaaaatgatccccgtgttttttaagtgaagccgcgaatcgaacggagaaaaacaattcaattgaatggccaaaattataacgtatgatccgaaaaatgtaaacccgggtcaaaaggatccgcgtgttttttaagtgaagacgagaaatcgaacggacacaaacaattcaatcgaatggccaagattataacgtaagttaagtgattctcagttaaaggtaattttttctatgacattaacattttaaacatatgattttaaggtaaaaatttttttaactgagaatcacttaacgtacgtctcaa

SEQ ID NO: 16286 - DNA, 4340 bp, Arabidopsis thaliana landsberg
cgcggataaggtggcttttggaatctcgatggatttatctaacgtttctttttgacaccttcatcctcgggctcaggatcctcttctcttttcttcttctcattcttcttgtcgttccactttccctttcccttcctccctttcttcttcgtttccttcttcggcgtctcatcatcgcctttatccgcttcagtttccctttcaacttgaacatcaccttcaaaagaaaagacaaccattcataaccaacaaacatcatatattaaaaagatcaaagattgacaaaacaaaccataccgattggaacatgcggaacataaagaaccatggcagaactcggatcatcgggctcaacaatctcgggcacaaaaccctcaggctcaacaaactcgggcacaaaaccctcaggctcaacaccatcggtctcaacatcatgagtctccacaccaccggtctcaacaccatcggtctcaacagcctcgggctcaacatcatgggtctcattagcctcgggctcaacattagcctcgggctcaacactagcctcgggctcaaatggaggcacactctcaccggcttgtctcctttcaatggtcacaagcctttcattgtgttccgccaacatcgccatcactctcttaaagccttcatcaatagcttccttcaaagagcaagagctactgctgcccggaacatccggaacatgtctctgaacattctcttcctccatttgctcgccgccgcttcgggcccggacatccgcttcaaacatatccttccagaagattctcttcctctctttgatcaaacggtttctccagctatcgacaaccggatcaacaaaccctatcccatcatcaacatgatcaccatctacaatccgcctcaacaaatctttctcctcgtaatccggttccaaaacgctagagataacctatacaaattcacacatcaaaaataatcatattctagctcatagataactgggacaactctagagataactgggacaactcgtacctttacacttccaagctcctcgtttatctcttccaacgagaaccctttcatgagactactagagaatttggccttacacattctcggacactcattctcgaaccttacagggtctctaaacttttgtcccaaatgtggaatagcctcaaaaggcaaaatctacacattcaaagtaaaagtcacattagtattatttttaagtctactaatgcatcttataatggatattactctaaattgttacctctaatggaagaataaatccggagaaacaagtctgcagttttgctttccctttcatggatttcattaccgacttaataccttccatacatccatcaaatgtgaaacgaccccatggggatgtctcacatgcacgcacatcatcaacaatctttagaaagaatttgtcaatgtttccatcagcctttgacttggtcgcgatcaccttgcacaaaaaaaaaaagataaccaacttcttcctatccgtcttcttcttttctccacaattcttcatttcatccagctttttctcaacatcaatgatcttaatcccaaataccttttaaaagatctttttggcaaacttcaattctgcatccaatcgaaactccttcgggtaatcatgacaatcgaaaccacataacaacacatgctctttaatggagtacctaataggcactccattaaccacaaaccagcactccctatccatctttgtctgtgctgtgcgaagcaaaagcatccacaagccttgggtcatgtggtttttctcctcaggcatgtggaatacatgcctaaactgtggatgcgccttgaaccatggcaaatcttctttaaactcctccaaatacttcactgtctgctgcacagtgcatctcgttcctatcttacacgtcttcacgtattcgcttgtactaaagaacatcctctctggctgcattggttgttcctcatcatcaagttcctgaaatttcatacacaaacatacaattaatattttgttgtactacttgtactagttatctcataacaacattatcaacttttctcagaactgaaactatacgtattaaattcatgcaccaatcatacaattaaattcatgcaccaatcaaacaaaccaatgtatgatcacgttaacgtataaatccatgcaccaatcacataagttgaaactatactattaagttgtcctaagtgttttctagttgtccatatacactacttttaattttcgaacacaatcttcagaaattaatgttacctcagatttttctttttacccttttttatcctgttcttcagggttttcttccatcccttgaggctgcatttgttcctcgttatcaatttcctggaaattcatacacaaccataaaattaatatttcgttgtactacttgtactagttatctcaaaacaacattattaacttttctcagaattcaattttgtaatgcaaaccaatgtatgattgatcacgttaacgtataaatccatgcaccaatcaaataaacctatactattaacttgtactaattgatttctagttgtccatatacactactttcaaacacagttttcagaaattaatgttacctcagatttttcttgttccccttctttattcctcttcttcagggctttcttccataccctgaggttgaattggcttctcatcattaatttcctgaaaattcatacacaaccataaaattaatattttgctgtactacttgtactagttatctcagaacaacattatcaacttttctcagaattcaattttctaatgcaacccaatgtatgattaatcacgtatatccatgcatcaattacacagaccaatactattaacttgtactcattgttttctagttgtccctaaacactatatcaatattcacacaaaattttcataaatttgtatatacctcagaaatattttcgtcttccggttcgttaaggttttccggaggctcttgttcacagttttcgtcttcaaatttgttttcctctgccacttcttcacggttcatatccgcttcacggatgatcgtgaccctctcgtcttcactttcactcgaactaggagtgactaaccttacacgacccatgattaccttgcaaaatcactcaacaatcaaggaaaccgttcaaatcaacacaacgaaaacctattctaatgtttcaaatcaaaaaccgttccaatttctatacttaaagccctattcgacacttacaatttggaacgccggcggtttggaacgacgacggttaggaacaacaccggtcacggcggaattgcaacggcggctaaacgggatgaacgactatgcgaaatcgaacacgacccacacaatcggcgacggagataacaagtgatgtcgccggcgacggtgaactgaacggagagaagagaaagtcgacggttttggatttttgaagttcgccggttgagagagaagagaagagagttgagagtagtcgacggttttgatttttgaaaagttacttaggttaaaaaaaattgatttgggggaacacccaataatactgggtcggattctgggctaacccgtgaactgtggttggatcctgtagtttcactaaatcaccgaggttatatggtaatctccctctgttttgttatttaaaaataaatgaaatagaaattccaaaattaggggtggcagaatagaatttttttttccgaatcatggcagaatagaaattctttcgaagatgaagagcgaaggaggcagaggccgacagaaaatattaaatattaggataaaagaaagcgattcgcgagtgtttttacggatcggtttaaggagcggttcggatcggctgcaaagtgtgtgataattgtctttaatacctttaattttttttgttcttttgttgtcttgtaacgtgaattttaaaaacggcttatatggcttagaaatttactgcctgtcattctttcttattttttcttaatagtatagatttctttatttgcttcagcaatagtcggcggcatagtcatcatattattttttattaaactagtcaaaaatatataactattagataagatccgtcgatgtcggcaggtgaaatatagaaatttatttaaatatttaaaattttaatagtaaatagtgatccacaacttttttctaatatttaatttagtaattttttgtattaaataatattttaatcatacacattcaattcgaaggatattttacaaatttgttgatcgatggatgtgattgtagttctttctgttaatatttgtcttaaatttatgatcagagacc

SEQ ID NO: 16287 - DNA, 1853 bp, Arabidopsis thaliana landsberg
taacaagtgttttgatacttttgttaattctgtaattcgtttttaaattaattgtgaattttaaaatgtgatataggaggacacgaggctcacagtcactgaatcagaaggtggagcagacagaagaagcctgactagtattattgtaatggtcttggtggtggtcccatcatgtccctgtctaatctactttttactttatttttatttatcacaaaaaatgggtttaggaatgttgatgatgatgactgatgaggtgtgtaatcgtttttaaattagaaaatggcttcttctgcttgtatgattgtatcgctaatcttccacgcgtatttctttaatgtcaacgctaataatttccaattgtgtcccttcttgaacttatcatacatattttgatgacgcaaatatctcaccgaatcaaacccataacagtatatccctttttttggggcctaaaaccaaaattgaagtgaggcttacagagttagaacgcaatttaaaccagtgactaatgttttgattggttctccctctgccacctgcaaacgctgcgtttgcgggtggtagcggttgttagcgtttgacactaatcataaaaaccgctagataccgctttggaccgcttgaaatcgccagatttcaaaagctccttcccgtaagcgtttgcggttgcgggcggtagcggttaggttaatttttttttctaattaattaaaataattatgtcttccacccaaaccctatatatcttattcttatcagaaaatcctaatcaatatattgaaaccctattttctcaattatggcatctacccaaactaacgaaaatcaaaatcaaaatcaagaatcaaacgtaagtatgatctatcctttcatccattcattagctagtgtaattctctcagtatttcatggcatcgtcattttttttattttgtatttttttgagttttttttattgaatacatgttttgatttgttttctcgattagaaaattatttggtcagacgagatgacccgtttcttgttagaactttatcatatgtatagaggcaatccggaaacccacgagttcaacgttatttacagtttattacactacttgatgcaatttttgtgatgtaccaaatgcataaagtactaagctttttcttacaaaatttatttatttttgaatttaatgttttatttatggttttaattattaagcatgtttaattttctaatattatcaatttatcataataatatattgtatttttttcttttaaaattaatatattatatttattttggttattttttatttaattactatcgcacccgctggtttaccagtcataaaactcccgtaaacgcacccattatcaaacgctcaaccagtcattcaaaatgctaaataacgcttgaaaccggaatggtccgctttcgcaaactcccgcaaccgcaaccgtaaccgctgccgtttaaaccagtcaagccctaatatgcaaaagtttgtaagtctaagcaaaatgctaaagtagaaacttacaaatagttatcaagtatcttcatctttaacattttgcttagacttagaaacttttgttataattgggctgccttgttgggcttgaaaaatactttgtcaatctttaaaaataaacctatattctttaatttgctcctactaacccctgaacgatcaagctaaaatcatggcatgctttattcactgatttttcatccctcatataattccaattaattcaaagttttgtctatttcatctttctttctattatcttccatcttttttctcttgcggatgctaaagaagcgactatgaaaatactattcaggttaatgc

SEQ ID NO: 16288 - DNA, 1003 bp, Arabidopsis thaliana landsberg
ttttctaagaaatttttctaaaaaatttggtctccataacacttttttgtcctcaactttagtcgtaagcagaagcgaacccacgttataggtggtgggggcaactgccaccaataaaatataaatagtttacgtttttttaataagatatagtaagtaaagtagcaaaattgtaagaaatgcccccactaaaagcaagagttgtcgggttcaaagctatttagaaacattttgcccccattaaatatttctgctgggtccgcccctgcgaatatactagattttgttttttagtaattcatataaattggatatatttgggataaaagtagccaatgttatagttttcttttaggtaatttgagtattttggttatatttgggtaaagagtagtaaccaatgtatttttgggtaatcggatatttcgattagatttagtatatatggtactctttccgtttcacaatataagatgttttagctaaaagcatgcagattaagaatatttatttttaaaaagtttaaccaatcataaaagacactgcataataaaaataatcataaaatattaaaataatataatagaaatttgaaaacaacttatattgtgaaacaaaaaatttggtccaaaataacttatattatgaaacggaagaagtatattatattctctcatccattttaaaaataaaatttgaggattttaaacaaacttgttcccctttttatggagtatttcttataatagtggttaattataagagtctaaaaacgaatttttatatgaatttagataaattaggatggggtttttgggaaagataaaatgttgcctataacagtacatatttaatcagacagaagtgtcttcacggcgacgaagagtgtcttccggcaattgcatactccaacgcaaacaaaaaatgaaaataaagcaaatgtcattcccgttaaataatacgtgaatgtcattcccgttggatgctaattaaagtagagaag

SEQ ID NO: 16289 - DNA, 2377 bp, Arabidopsis thaliana landsberg
ctgttgacaaaaaaaaaaaaaaaaaagtttcctaaaaaactaaacctaatgggtaccattgactatatccgtgattttgatctcaaaagaaccaactgggtcctctatgtgaatatcttaagtctatggaaccatcaggctgtcaacaatggtgaaccgacaaccatgattctctgtgatgagaatgtgagttcataattcaactacttgtgaagttttcataattttgtttctgaaacctgttcataatctaaagtatttttgtttttgcttcacagggatgcagaatcgatgccagggtaccttctcgaaattatttgtataacttcagatctaccctacatgagggaacgtggtattacgtggcagacttccttctgaagagagcaacttcaacaacaaagtactcatcatctatttatgagatcgagtttatttgaccaacaaaaatgtggcctgtaagtcctagatcgactcagatttctctacaagtaatccattctgatgaggtcgaatatgaacctgacacttatgttaatggtaaactaagttattcatattaatgttcttatagttacagtgattgcataaggaaaatttacagactctgacttaactattttgattgtaagatgctgttggaatcatatcgagtgtttctactgttgcgaggtttccctacgtctgtcgtgaaggggaaactgactatgaagccaaatatgtgaagtttactatcagagacaatctgtaagttacattacctgtgtaacttttagacatgtaggtttgtaaggatcaaaactgtctgatgattggtttctttggattgttgtttgttatagtaataggatcaccacatgtgtagctaaagcgagggcttgtgagttatttttgatcaagttttatcgacggattggtttggtcacttctaattttgagccaattgttgttgtgatccggttctggagagttcatgatttcaaaggttagttaaaattcatctataagtaggcgctttcatatgattcattgttatacaattgaaatttaaagtagataacaatactgattttgaagtctcttataggatccaatgccttattcagtgaggatggatgttctaggctactcattgatcctgcatttccagactatgatcttcagacttacatgtatgtaaaatcgagtagtttatattaattgtgcaaagacgtatacctatactttatccaagtgaattgagttttattgttttcttactgtggttggaatgcctatgaagatgacgaagagcttgatgggaagattgattatgtaatttgatatgtctataatttgcatgttttacacatccttttataaccattttgagtctagtttcatccatctgtcatagcattcaccatcatttttgtacattttgcatcttttgttgagtctaggactagtcttgcatacattctgcattctggagttgtttcaggtattttggagctattggtgctcagaaagaaggaaaacagaacagaaagtcacacttccaccaacatactcgatcaccagtagcagagagggaagcagtcagctcagcagtccatccagacacttctactatatcacagaggagaccagacagtccattctgccaaatatacttgatcacagaggagaccaggcagtccattatgcaattctactctatcgcagaggcgaccaagcagtccactttgccagtccaccagttaaactcgatcgcagaggagaagaaccagtccatcctgacagctgacacacttactcgatcacagaggacaagaagcagcccaaaccattctgtcaaccaacctactcgaccaccaccccgatcctctgatcaatccgaactcaactagacaacctgagcatcagaaagagaagagaagagaaggcccattcgaagcccattcgaagcccataaagaagcccactttgagccgacactcttgatcacgccgtccatgggccgttaagtgggctcgaagcccgctttcttatcttagtagaaataagtctctaagggtttcgcccccagacatgcactttagagacacgaattttgcactattattcagcagacgcttttcattcctgcaactttgtatttcgatattttttcttctaagttattcagattttgctttcatttgcttgttcatctttggttcatatttttagtatgcaatcttcaatcgtttctatgttattgtctttaagcatgttgtttgagtagtgattaggatttctgaggacgggatagagtagttgcggaacccctagtcgaatctattggttaagtgtagatttattgaatcccttctgcattagttgtgttgactgc

SEQ ID NO: 16290 - DNA, 944 bp, Arabidopsis thaliana landsberg
cttccttcaccgtcaaggcagatagcgtcagcaagaatgcaccgccggatttccaaaacaccaagctcatgacccgtctcacttacacactcgatgagatcgaaggacccttcgaggtttttcttcaatcacttagttcaatctcagtttccagttgttgcttctaccgcaagaaactgataacaagtcaattgaattgttgtcatttgatcaggttggttcagacggaagcgtgaagttcaaggaagaagatggtatcgattacgcagcagtcacagtccagcttccgggaggagaacgcgtgccgttcctcttcacggttaagcagctcgaggcttcagggaaacccgaaagcttcagtggcaagttcttagttccatcgtaccgtggctcgtcctttttggacccaaagggtcgtggtggatccactgggtacgataatgcagtggctttgcctgccggaggcagaggagacgaggaagagctatccaaggaaaacgtcaagaacacggcggcttccgtcggagagatcactttgaagatcacaaagagcaaaccggagacaggtgaagtgatcggagtgttcgagagtcttcagccatcggatactgacttgggtgctaaggtaccaaaagatgtgaagatccaaggggtttggtacggtcagattgagtgattcatataatttgttacttttgtaaaattgtattgaaacaacttctttctatcaatatatatatatattatatatatatatatatatatatattaacgctcgataaataaatatttatatcagtgaataatttgagaaatcaagttttagtttaatcaattctttagttacacacacgcaagtttaatgaaccgtaacaaatggaacatgaattggaagttggaacgagaggacgaagatcgagttacctattggttacaacttgtga

SEQ ID NO: 16291 - DNA, 1579 bp, Arabidopsis thaliana landsberg
attattgtaaagaagtgaaagcttctgtaatggttgtggttatcggtgttgggatttgtactgtgattgatgtcaaagttaatgccaaaggtttcatttgtgcatgcactgccgttttctccacttctctgcagcagattgtaagcttttttatatcatgttcagtgttcattccttccttattttgcttgatctctgattttgtcaattaagtggtaatctggcagtgactctgccttttcaatctttgaatctttgtttaccactgcgttaagcgtttcattagataagttgtcgtgtagtttgagtattgatcataagttgtcggacatggacagtgtatgttatttattgttcatcaacctgtgagataagatgtctgagtacttgaacctccttatgcaaaagtcttaccttgaaagccttctttcatgatgatgatgttttctgataaaagtgtctctctggaaacagtcaataggttcactgcagaagaaatactcgatcggatcattcgagttgctgagtaagacagctccaatccaagccatttcactcctcatctttggtccatttgttgactatttcttgagtggcagattcatttcgacttacaagatgacttatagcgcaatggtaactatccaaaaatctcctaatcccgtttataaaatcccaactcttatctaattattgataaccatcacacgcatacagttatgcattcttctctcctgcgcatcggcggttttctgcaacataagccaatatctctgcatcggaagattctctgctacctcattccaagttcttggccacatgaaaacagtctgtgtcttaacattaggatggcttatctttgattcggagatgacattcaagaacatagcagggatggtcttagccgtggtgggaatggtgatatacagttgggcagtcgagttagagaaacagagaaagtcgaaagtgataccgcatgggaaacacagtatgacagaagatgagattaaacttcttaaagaaggtatagaacatatggatttgaaagacatggagcttggaaataataaagcatatttatagtttctattcaagagaaacgttttttggttatattgttggttactcatttcccccatcatgtactcttttcttttgccctttttttcgttctttgtctcaaagaacctttttagcctcttattgatgagctctcctctgcagagcacattcttttttctatagaaatatatgattcctctacttctttgcatatatcattggcacatatcattcttgattctgattgaaaaaagagaaacaaatcatgaaatcaaaattgtgtttttggcatccttttgtagtaatcttgtgttctgtttccgatcattgtttctgtagtttctttctctttccttacctttctgtttgatttgctcgaaatatggatttttctgatgcaataaacaccaaaatgtggacaaagtggtctcatatagaaagtcaaatttcattacaagactgtaaaaatctattaaaacattacgaggttacaagccatctaacgtgaagagacatc

SEQ ID NO: 16292 - DNA, 1248 bp, Arabidopsis thaliana landsberg
cggttagtgtcacgggctgtcccgaaggatggttttcaatggcatctggtattttgagatcaatggcgcactttgcagctgcaatatctgcaaacccaaaaacatatctccatatgtctaaagaagctttcgcttcttcatctaataaattccttttactttcttccattttgttaagtaaattaaaaggcaggttatttggggtttgaggaattaggtttcttttatagtgatttaaaattgggggcacataagtaatatactaatattgatcttacacagaatagtaattcaagaattcaaacttagttgatcactgtatttctcaagtttttttttttaaaaatttttgtttggatttgctaaaaacattggtaagttagccattactgaatgattatgagttaaaagtagacctagtcaaattagactttaaaccttgcaacacctcttaataacaatactgcccgcaaccgcaagccattaatctcaagctgtgtcaacaaacgaacacatatcacgacgctgtcaaattgtctcggacacgtttatatatgaactttagagacatgtcatgtgcgcttcaaaagaatcctaatgcagagtgtatagtagcgtagtgtaactgtgtaacagtgtaaggtgtacgcgcgcgccgaaaaagggagaggcgattcttggttcagtaagaaggtaacatgtgtaagttaccctcattagtaatgggcttttgggcttcattatgaactttttgagagattgaatctagttgaaaccaaatcaaaattttgtatcgctgggaattgtaatgatttggattggagttggacctcttctttacactactaaggtcctttgtttctccatccagatggatcatatagatagagatgaaaaatgatgtttgtttttgacaaattaacagctcatttggatgttccatctgaatgactttgtaaatttaagctaatttgtgaaactcatttggatggacaaattatgtttgtttttgacaaaattaacagatcatttggatgaatcatttggatgttccatctgaatgactttgtaaatttaagctaatttgtgaaactcatttggatggacttggtagaaccatttagatggagatgatttcgttcaaaaaacaaatgacaaatataccctcttttaataatattatttttaatagatttcttatttaatattttttaaattacctattgtacaaaaaaactctaaaattgt

SEQ ID NO: 16293 - DNA, 1222 bp, Arabidopsis thaliana landsberg
acaaaaaccaaatttgtgaaacaaagtttaaattggattcttgaactatctctcgcaaaattctcgctctacacgacacatttactagcgtattcatcgctaactagcgacgaacttgcaagaaaacgttcgacgccaattcgacgcaatattgcgtcggaaacattcaatcctatttcattgcaaagttccatgtattttgcgacgttagcgtgggctctgcgagggatctgttttatcgcaacaatggcgacacaattgcgacgaattcaagtttgcgacaagagattcgcgacgaattcaaattcgtcgcaaattacatgcaagtgctatttgcgatgcatccgagaggaatacctacctcgcaaatgacatgtttgaagtaaaagaaccctaaatactttgacaagataaagaacacaacttcaataaacatattttattagaacaactttcaaactgatcaatcacagataagtttggacagtattatgcaacatcaacaacctgatttgctactgtcagaacctaaaaactacccagctcacaaacacagcaacagccgtgtgctctctttggtcactcaccaatgaaacccacaagaacaagttctacttaacttttcttctcttccacttttctcaagtaaagtggctaaccctaataagaaaccaaaacttctcttatgtagtttctcggaaaagccaggatgctccactttatcaagcatgttcaagtgtagctcctcatcattatcttgacactaggcacacgtcctatgtctgacgacttcgtctcctttgtctaaagcgatacgcctttccttcactccaatcaacatgccacgctggcaaaagcaactgctactttcccgcttcctctgttcatctgttctgctctgtgttatttcagacacgcctgtagaacttcagacactctgtttcttcaatctccccctttttatctgagtgtgatacctcaagtaatctgcaaaagagtagagaccacaatacaagccaagcaatattccataccaaacatagaaaccaaaggctcaagtttaagcaactactgccaaaagacataaccatttaaacatgaaacagaaatgagttcttggttccatacataagaccaatcattaaacacacagaagatccgataagaagccgatgaagaacaagatcagggagtttcacaaacacacaaaacaatcagtgca

SEQ ID NO: 16294 - DNA, 857 bp, Arabidopsis thaliana landsberg
gcgcacaatctaaatcacgtcccttaaacttgtaacaatctgacggtgtagattatcgatccatgcagtgtcatatcattggtcagaaatattttctatctcgccactatattaatcatcatggcgggtttcgctgatactcattattgttatttttgacagagagaaatattctcagttacgcatcgtcctcttaagagatcttttttattatcttgggaagtagagagaaatggcgggtcggggaaaacaacttggatctggtgcagcgaagaagtctacttctcgtagtagcaaggctgggcttcaattccctgttggtcgtatcgctcgatttttgaaagccggtaagtacgccgagcgtgttggtgccggagctccggtctatctcgccgccgttcttgaatacctcgccgctgaggtaatcattctcttctatttatcacctgtttaatttactctttttaccgaattaaatggttatagcttgcatctagggttctggattttagattttcttacccctttcgttaaattatgcgaaatttggaatattttagaatgcattagttccttagtttgtttttttcttgggaaaaattgtccatttttttttgtgtagttttgagctcaatttgtgtttctttgtgctcatcatgcttatcgaaattagggttaaatttgttccttactaatttgagttatcatagttggcactgattgatactgtcaattgtgttctcaaattcgaaaaatgttgctgttcacttagttttgtctttggatatgagaacatgtctgctcgggaactgaaatttgtgcgcctactttctataggtacttgagcttgctgggaa

SEQ ID NO: 16295 - DNA, 1339 bp, Arabidopsis thaliana landsberg
gcgcctcttaaatgtttgtttatgtcacacctaataacagcatctttaaaatactatttatctgatatcccacgatgtccttcttgattttgtatttataaacaaattaaactatctttcaatgttttaatgaacccatatttcacctgtttatatgatcccatatctttcaatgatttgactttgtttcattgataatacttggtgagtcatttttcaatggtcgttcattcaaacattccaacacataaggagatgaagaaggggaacttggaagcgaacacaaagacagtaccgttctacaaattgtttttcttctcagattctaccgatgtgttgttgatgatcgttggttcgatcggagctatcgcaaacggtgtttgttctccgttaatgacattattgtttggtgaactcattgatgcaatgggtccaaaccagaacaatgaagagattgttgagagagtttccaaggtaagaaaatgtgttactaattagaacctaaaaaacaaaacaatcttttgagttgctatttgatgttttactttattatgtttaggtttgtttgagtttagtctaccttggacttggagccctaggagctgcctttcttcgtaagatacatttttttagttctttttttttatcaaatggagaaaaacaatttttcgtttttttggttatagaggtggcttgttggatgattactggggaaagacaagctgcaaggataaggagtttgtatctgaaaacgattctaagacaagacattggattctttgatgtcgaaatgaccacaggagaagttgttggtcgaatgtctggtgatacggttcttatacttgatgctatgggtgagaaggtaaacaaacgaaaactgccacacaaaaaaaaaggtttttataatagattgatgattataaagttttgaaaatttctcgcaggttgggaagtttatacagttgatttcaacatttgtgggtggatttgttatagcgtttttgagaggatggttacttacacttgttatgttgacctcaattcctcttctagctatgtctggtgcagctatagcgattatagttacaagagcttcttctcaagaacaagctgcttatgcaaaagcatcaaatgttgttgaacaaactttggggtccattcgaaccgtaaaaatgcttcctattcccttttctgttttgtgtagcgtttatactaaactttctaacataaaactataaccaagtgtttgtgtgttttatctaggttgcttctttcacgggagagaagcaagcgatgagtagctacaaagagttgataaatttggcctataaatcgaatg

SEQ ID NO: 16296 - DNA, 978 bp, Arabidopsis thaliana landsberg
actggcggtagtagtgacaagacaatgaatagcaatagcagtaccaacgaagaaagtttagtcaacggtgaagctacaatcagctagtggaatgcaaacaagatcactgttcatatctgtgtgtcgtgagactcattacgaaaggaggagagtttcttccaacggaaccacaggtgcgacttgagaaatcttgaaaacttgagacaagacaagttgcaaatgtcttttcttgattttttttctaatgttttgtaattatgtttcttggcagtttcttgaagctgtgcatatatgttggcaagtctggtgtggaggaggataacatttttgaagacgtcatatgttgggagattctcagacatttcatcagttctttctgttgtcttctctcttgcaaactcattagtccgtttaggttacttgatatattaatgtttttgactaaattttatttgggatagatgatttttcttcagcttgtcaaagtttcccaatttttgttatgttccaagttattagatggacttggcaacttcaagagttttaaagatcacttagctaagtgaagaaaactatataactggatacatttcacaacaagagcacatatatttctaagcctgtacaagcaacaacagcttgaggtcgagtccctttaactgctgcattgaaccgcccatattaagcaagatgatctgcaacttttaaatgttcttgcactctttatctgcagagtatcaaagtttcccagtttttgttatgtttcgacttactagatggacttggcagtttcaagatcatttaaccaatattggcaaactttataactggaaatggaaaaaggaataaaacatgaaattggcatttaagagatatacattggcttgtgtacatgaaaatggaatgactatcaatgtacataaaatgttgatgtatatataggcttgtgtttactcttgtgccaaactgtttaattct

SEQ ID NO: 16297 - DNA, 1107 bp, Arabidopsis thaliana landsberg
actttcccattaaaagaagcagtgatcaactaagccaatctttacttgattgcaatcgccctgaaatctgtaaactcccggtagtccctcttttttggtgcaactatgaagaacctgatcttagggtattcgcatgcactgcatgcgatttgggaattctcagcacaaactatttcgcatgtctccagtgcgaaggaaaattccataaagaatgtgttgagtctccacttgagatcaagcacccttcccacctctttcatcctcttcaactttataagattccaaggaggccgatgacgtgcagttgttgtgaagaacctatcttcaaccttttttatcagtgtactacttgtgaggtgagtatgcatacggtctgtgcgatgagcccaataccctttgtcttagaccacccaaaaagccatccccaccctctcacctttttccctacacaagattctttagtttgccatatttgttccctgattcggaattttgatcccacatacatatgtatccaatgtgtcttcgtcatccatagagattgtatgggttacccacatgtcattagaatatctcgtcaccaacaccggatctcttttgcttcttctctaccatatggaaatttgtcttgtggggtttgtcatcaacgtgttgacaacaattatggagcatattcttgtggtaaatgtgatgcttattttgttcattcaaaatgtgcatttcatagaaatgtgtgggatggaaaagaactcgaaggtgtatcagaagaagatgatataatagatgatggtgagccatttgagaggatatctgatggagtaatactccatccatatcacagtcaccatctacgacttgagatcagcaaagtttatgatgaaaataagtattgtcgagggtgttctttcccaatctacgaaggccagttctattcatgcatggaatgtgacttcatcctccatgaaagttgtgcaaatgctccacgcatgaaacgacatcccttacatccacatccacttactctaaatgttgccacaaaggagcttggtaataacgaaggcgtataccattgtaatgtttgtggtcgtgatggtactgggttcttcc

SEQ ID NO: 16298 - DNA, 743 bp, Arabidopsis thaliana landsberg
  unsure (1)..(743): unsure at all n locations
tgagctacacccttttcttcttattagagatgcctttctctttgttctgattatcttgctcgtcgtcgtctgaatcagaatcagaggtggccttctttttgacatcttctttctcctcagactcatctttcgtaccgtcttcttcagaggcaagaggttcgcggaagttgaacttctcgaagatttccttaaactcatcgttaaaaccatcttcaaattcagcttgctctggaacatactctatcacaatctgctcagaaacctatcaaagagaaacatataccaaaaatcatcagcaaacgataaacaatcacaaaccctaagaaaaaccctagaacacctctccatgaatcgagtacgagaagatgagcacaaagttaacctgtggctggggatctgtattctctttggattcagaagcagcagaaacgtccgatgcatctacatcggcttgggatgctttgttgttcttcttctgcttccgtctgcggcggcgacggtcaatctcacgagatttcttagaggaagcggaggtgtttccgttggagacatcaccgttagaaacgacgctatgaacgagtgcgacggttgaatcggcggtcatattcggtgttctctcagaatcggtgatgtgaaaagagagattgagaggagaaggaagaacgacggaaatcgaggatatacgtgtatgaacaagagtcngtttgctgaaattctctctgattcttttcccgtttggcata

SEQ ID NO: 16299 - DNA, 718 bp, Arabidopsis thaliana landsberg
tctgcttctgctatatattttacaaatctaattcgatatgatgatcacaacaagagagtaggagccgtgcatgcatgctttggttagagaacaaacttggtagcaactaaaagcttcttctctccaaaatttgacatttttccaacttctgttattattattaacatatgtaaaaaacttaactgtagtagttaaaatacgtatagatgcaacggtctaagcttctcgctatgtatgaatgccaaagcaattgcaaatgattgcagactagtcaactttgcttcgaattgaactaagtagagtcctccactaacattcacaatctttagtcctgttgtttcatgttttgacccctgaaacagcccaccaaaagattagcaaagtagctagcttctttgttaaaggggttggctataagattgatgtgttagacgaaatgaatgactgttttacctctatgaatagttcgaagtactggtctttccgtggttggcctttaagaagggtcaaggaacaacacaaatcccatcctccacagtcacaatttccttgagatttccatctctctatcaaactcgaaggtccatcttcaggccctccatgaatccctgaaggaatcacaacattcatacttattgaagatgttgaagtttcagtctcactagcatcattacttctttggaacatgggagatctcttcaagaactttagtccccat

SEQ ID NO: 16300 - DNA, 4682 bp, Arabidopsis thaliana landsberg
tcagggaaagagtggaaattactcaacaaaaggcaggggttttcctcaacaaatctcttcaagtacttcaggttcctacaacaacacagagaatcgagttgtgtgtcagatctgtgggaagccaggacatccagctttgaagtgttggcacagattcaataacagctatcagtatgaagagttacctgctgccttgactgcaatgagaatcacggatgtgacagaccataatgggaacaaatgggttggtgacagtggagcgacagcacatgttacaaactctactcacaacctgcagcaatcacagccatatggaggatcagattcagtcatggttggaaatggagacttcttgcctatcactcatactggttcaacaaccttgccatcaagctcaggtattttatcacttaaagatgtactagtttgtcctaacattggaaaatctcttgtgtctgtttcaaaacttaccagggattatccatgctctgttgattttgactgtgattatgtccgtgttactgataaggccacaaagaagcttctggctcagggaaacaactttaatggtctgtatgttctgaaggattcatctgttcatgccttctattcctctcgtcaacaaacaacatctgaagacgtctggcatatgaggttgggacatccaaatcaacaaatccttcagctcctacacaagaataaagcagtcaacatcagtaaaagttctaagggaatctgtgaagcatgtcagtatggaaaaagttcaagattaccattttctagctcttgctctactatttccaagcctcttcagaagatacattgtgatctgtggggtcctgcaccaataaagtcagtgcaaggctttagttattatgccatttttgtagacaattactcaaggttttgttggttttatccactaaagtttaagtcagatttctttaagatattcaccatattccaagctctagtggaaaatcagtttcaaaacaaaattggcagttttcaatgtgatggtggaggagaattcacaagtgctaggtttttgaatcatctacaacaacatggtattcaacaacttatctcttgtccatacacaccacaacaaaatggattagcaaaaagaaagcataggcaccttattgagttagctctggcaatgatgtgtcacagccgcgtggcgatgagatactgggttgaaggattcttcacagcaaacttcctcattaatctcctgccttcttcagttctgtcagacaacaaaagtccctatgaggtattatttggtcagaaaccagattatacttctctcagagtctttggatgcaactgttatcctacattaagagattatgcaaagaacaaatttgatccaaggtctctgaagtgtgtgtttcttggatataatgaaaagtataagggatacagatgcttactgatttcaacaggtcgagtttacatcagtcgtcatgtgctattcgatgaggaggacttcccattccataaggtatcgccttccccacagttcatcactactccacttcgcatggcttggcaaaagagttttcaacctcagacatcagaaacaacacttagttcagaccagaatcagaaagtatcagctcagatcgacatagaagcttcagcaatacctattcctgctacttttccaactagtggtgatactgggagttctgggtgtacagcaggcattgatcctgttcctataggcaacaactctttagtatcatcacctagcttggcagaggtagtgacatctgcaacaacagaaacagctacaacaagtcagtcatcagcaacaacaacataaacaactacagaaaatagaggattatcagtacctactgtatcatctgtcagacaatctcaaggacatcacatggttacaagatctcaggtgggaattagaaaaccaaatcccaagtatgcacttgttacttccagagtcaaatatcctgaaccaaaaacagtaacttctgccttaaaagatgaaggatggaataaagcgatgcatgaagaatatggaaactgtcaagaagctgaaacatggtcattaataccttatacacgtgacatgcatgttctgggctgcaagtgggtcttcaggacaaagctaaatgcagatggttccctagacaaactcaaagcaaggttagtggcaaaaggattcgatcaagaggaaagaatcgattacctggaaacctacagccctgtggttcgaacagccactgtgagaactgtccttcatgttgccacaataatgggttgggacattaagcaaatggacgttaagaacgccttcttgcacggtgacctcacagaaactgtctatatgacacaacctgctggatttgttgatcctacaaaaccagaccatgtttgtcatttgcacaaatctctttatggcctgaaacagtctccaagagcctggtttgataaattcagtacttacctgctcgaattcgggttcacttgcagtatgtctgatccatccttgttcatctacatcaaaggtaaagatattataatgatactcctatatgttgatgacatggcaattacaggaaacaattcagataccttggctaaactgcttctggaactcaacaagaacttcagaatgaaatatatgggcaagctgaactactttctcgggatacaaacgcagtttcattcagggggactgtttctttctcaacagaaatatgcagaagatctcttgatagttgcaggcatgcttgactgtgctcctatgcctactccgttgcctctgcagttaaacaagacaccacatcaagatgagaggtttgaaaacccgacttattttcgaagtttagctggcaaacttcagtatctgacacttactagacccgacatatagtatgcggtgaactatgtgtgtcagaagatgcacatgcctacagtttcagacttcaatctgctgaagagaataatcagatatatcaagggaactgttactatgggaatctcgtttaataaagagacggattgtaccttaagagtgtatagcgacagtgactatgcaggatgtcagaacactagcagatctactggtgggttttgcactttcctaggtaacaacatcatctcctggcaatcacaaaaacaaccaacagttgcaaaaagttctacagaagctgaatatagagctttatatgaagctgcatcagagattacctggctgtgcaaactcttgaaggaaattgggattcctcttcatcagcctccggagctgtactgcgacaacctctcggcagtatatcttactgcgaaccctgcttttcacaaaagaagcaagcatttcctgaatcactaccactatgtgcgtgaacaagttgccttggggaatgtaagggtttctcacatacctaattatctgcagctagccaatgtcttcaccaaatcactaccgctgggtccgttttcttcactcagattcaaactcggcgtcgatgttccacctactccaagtttgagggggactattagtagagtgagtgaagtagagcaattctgcttgcctaaagcaaaagaagaagaagagagatcgacaaaagctgagcaaaaggacaagagagttaacctagcttcagacataactctaaacgacattgttggattaagtgagctgaaacagaaactgaagcccagtaacatggtctggaagcccaaagcaaaacaagagcccatcatggcccaagagcagcaacggttatctgcaaaagaagaagacataaatggtgagctggagattaaggaagcttcaagaaagagcatctccagctgtcttggtcaagaccttatcttgactaatagattcaaatgtttagagggtttaacctaattctctaggactatataagagagactaatgtaatctgaaatgttaaaagtgaaaaataagatggaaatattatcagtctccttcatacctctcatctagatagctcactacgttcatggtatcagagcttcatggttaatcaatccatggatctctatgcttatcctgcgttaaacatagcaaattgtgttacattaaaactcaatcagaaaaactatatatcatggaagtctcagtttgaatccttcttgtgtggacaaaacctacttggatttgtcaatggtgccatttcagctcctgtcactgccttgcaagttccccaagtaggaggtgctgttctagcggttccaaatccagactacaatgagtggttcagggcagatcagattgtgcgagcgtggctccttggttccttatctgaagacatccttgctgaagtcacaggcaccacaacatctatggagttatgggttgctcttgcaaaacatttcaacaaggtgtcatcttctagactctttgaactgcaaagtaaacttcagacatcagaaaagctagataaacctatggatgagtacttaagagatgttaagaatacttgtgagcaattagcatctataggaagccctgtttcagaaaaaatgaagatttttgcagtattgaaaggcttaggaagagagtatgaacctattaaagtctctatagaaggaatgatagatctctctccgggtccaacttttgaagaagtgtcctctaggctcaagagttttgctggcagacttgcaagttacaacac

SEQ ID NO: 16301 - DNA, 1627 bp, Arabidopsis thaliana landsberg
  unsure (1)..(1627): unsure at all n locations
tatatagttggtaatgacatataaatttcagtactctcccacatatataatattagaacttttaaatgattcacacgtgcagaagggattactgatggagtaatatgtgggattactctcccacatatataatattaccacatgcatacattgagacgaatgttaactaattaagaaagatactatgagattatgagtagatgaagatttcgtctgacaggaatcccaaatattctacaaaagtattttttttttgtcagctttcagtagttagttctgtttatctaaattatacaggtgcgattaggtcttaaacggtgtctgtactgtatgataaattgataatcatattagtaattttaaaataatgttgaagctaatattagtaattatacaagggagtttagtatatagagtatttacattaattagaaaatataatttttaatatagacaaattaaactacttaggtgaataaatttctctagtaatatacaataattaagtagaagaagaaaaactccatctcaagtataaatattatctttgttttccttatagttatcgctctgtgtgtcgatcaaactatgttagcaggttgtggccgaaaagctttgtatattttaagaactcatttaggtcatacaatgatgttcccaaaatggtacatatctgataaaaaggatcttggtctttactctttactaatgcgtcgttcaatctcattagatcattttaaatttggggtacacctaatttttatagtcatataatcacatggagttaactttacactttataaagaaattatggcatataaaaagaaaagctctctttttgttcttagattcagtacatttatatttatgtgatgtaagatgatgggagatcaacttgttgggtgttgctggtcacgacgagcctatgtggaagtatggttggatatatgatgggctcaaaacttgtaagttaggtcataccggcctaccaaactaagtaggctagtccaacggattaacaaactggcccgtaaattagtcactttcgatatgctatcttattatgtatgatgtatccaagcaaattttgatacgtgtgaaacaataaaaagttatatctttttcagaaacatcaattatacaacaaagaatcataatttttcaatgaagaagaacatcaatcaaaatcgaaatttgtatatacagtaaaacaatttcctataaaatgaattctgtaagtttttcctaggtatatgtttagggtttctccgggaagtcaaaccggagtttcttcgccggcataggactcatcacctcttcgtctccgttgaccatcgataattccggtatcggcggtatgttgaggtcaaacccacggtggccactgctgacgtggcttgtagaccccacatcttcagaatttgacacgctactgctcacaccgcctgcgttctttccttcgtagtgacaccgtttgcggccgccgagagcttgaccggtggcgaacgatttatgacagatggagcaaacgtgcgacttcacacttactgcgtcgtcaccggatataccagacgtggttatcgccgacgatgtcgacagctcatctactccngcagattgagtaagc

SEQ ID NO: 16302 - DNA, 993 bp, Arabidopsis thaliana landsberg
gcctttacaatagatgcagcgaaagtgttgagctgttgggttctaaggatggcttgaacatgttgatcttttaggttccgagtatgatgaacattcgttgttgctaagaaatgcctgtaatgtcccacaaatgtagaaaatggttcgtacctttgtccaagcattgatacgtctgatgagaggaaactgcaagatactgagcttggtttaacgaaggagaggcagtttcttccttccaaagcatttcatttgacaatgccttgatcatcttaagtagagtttctgttgtggaaagtttgaaactttcaagaaacgactctcaagtaaattgatgatcacaagtgaaagtgtatgttacataagtggatatttcaccctttttccatcaatcaaaacatcatatagtaatccattggtttatacaaacatcaaaatacatttacctctgaaatgaggaaaaaaatgcaaagagatttttgaaaatttccaacaaatggagagacaaaaaaaaaacaaagaattaaatcaatcagtacatttataaaggttatgagacctatatgacacttattggtcaagtggcagccattccatttctagctctaattctccagactctacattctgaagcttgatctgaacctcctgtttcactttcccatcaacaatgttaatgatactgtcatctattaatggattatcatgcgattttagccatttcccaatctgcatatccccaaacatttctggatccccaaaagccattgcagatgttatcaaaggttgtatatcaatatctgcttctcccattatgtcatcagcagaaaatgtatcataatcatacacttgctgcaaccacataagaaaccgtaagatatatatataagctttggcagtgactgaaatcgtcaatagaaaatgaccctgctcttaccaatttcacagggccaagcaatcaggaacagacagcatgagttcttgattccatccggg

SEQ ID NO: 16303 - DNA, 610 bp, Arabidopsis thaliana landsberg
ccgtcaccaccaccaaagtctcaacccaagtccccaccagttttttgcccatctccatgcccatcaccaccacctaagcctcaaccaaagccagtgccaccaccagcatgcccaccaacacctcctaaacctcaaccgaagccagcaccaccgccagcaccaaagccagcgccaccaccagcaccaaagccagtcccatgtccatcaccacctaagccaccagccccaactccaaagcctgtcccaccacatggtccacctacaaaacctgctccagcaccaacgcctgccccttccccaaaacctgccccatcaccacctaagccagagaacaaaactataccggccgtgtttttctttggcgattcagtctttgacacaggaaataacaataatctagaaacaaagataaaaagtaattatcgtccctatggtatggactttaaattcagagttgcaactggtagattcagcaatggaatggttgcttccgattatttaagtacgtactctctttccctctcttcattcttttcttttgagctcgaccttggcccaatagatggcaatggcaattaattaccaattttcacatactgaaaaaaggaaa

SEQ ID NO: 16304 - DNA, 1444 bp, Arabidopsis thaliana landsberg
  unsure (1)..(1444): unsure at all n locations
agttatgtacaaaataaataaataattacatcataaggagacaacgatccatcaacccaaagttgactgggagacgatgacctagacctctcacgaacacatcgcagcatccaccatgcgcctcatcctgtggtacctgtacttgacctgtggaggggtgagacagcaagaatgagctcacatacgttcatagctcaacaagttgtggggaataatgtgcattaactcgccaaaggtgggagcatgtgaagtgtaaggcttactaagagaatggttaaagctgagcattgctttttaaagttagtcaaaattttattagcaattactaagtataagtatataccaaaccataaataaacaaaattaataacaaatcccatgcaatataaatgacaaattgaatttagttccataatttaatcatgcgagagtcctgagctgctcatgaccgtgagctcggctagagtaccagttttacagtctgcagaggttgtaccatgtacccacaagtcgtgnnnnnnnnnnnnnnnnnnnnnnnnaggcccttagacactaccaaggtgaatggctagggatccactacgaggcctttataaagttccactagcttccgaaaacatgctacagtttatgggaagagcacttgcaagaatccctcgtctgaccgccatcacagcaaaatcaacccgagaacctccttgcatgcaactcccctactgcccttgcccctttcgggtaaggtagtcttccactagctttcctaattagttagccaagggcgtcccattccacccttgtggtggcacgtgtttctcaagttaagctctatgttccaattaaaatataatgatcttgacatgaacataaatcacataatagagtaattgaaatatggatataatgaaatattaatcccaaaaccatatagagcaatagcataactacccaagtgaatcaggggtaaacaaggtaaaaaggataacagactagggtgacctattgggtcccatcaaaattaaacctatgcatgaataatgatattaaagaacattattgggtaaattaaagtgatcaagggcacaacttgcctggcgcttgagattccagttaccagggtgattcttcggatcctcgtgaccttacgctagtcgtagcaatacaaacaaacatggtataaatagaattaacatcacaccaaacataagtacaaactgaataataatgatctacgtgtttctacgagactaacgcaacttgaacggatcaaatcggagttaaaacaaagaagatacgaatttcctaaggtttcatgtgcttggcatccgattaattgagaaatattttttaatgtgacttccatgtcaaaacagagacactatatgataaacaacattattacaacattataggaactggaatgaaaaaatttgggctccgtatgaat

SEQ ID NO: 16305 - DNA, 1611 bp, Arabidopsis thaliana landsberg
gaaattgggattttgaagagatgaagaagagattggcggggagaacaacgccattgttgcggtttacttgtttacttcattggttcacaactagtggttctaaatagacttgttatcgtttgaagaagtaacatgtatgtcgtttctttctcccaaattgagactacgtaacgtttttttccccctctacacatacagaaacaaaaaagtgactgttatcttcatgggctcgtattaaaagcccatcccagtattttggagttgttatgaggtatcaaacaaagaaagtcaacacatttacctgattaatcaagcaaagtttttattattattttgtattcaactaagcaatgtaccttacaatatcttccattttacaaacaatttaaggtttaactttttaaaaggaaaaattgtactaaactaaattcattaataatatatttaattaaaattttaattaatttttttttctgcaaactgaattatattaaccaattgagattttacaaagtagtttttgtaaccaaggtggttgacgacctgattaagaataaaatctccatgaatacaattggaggttgagaggtaatgagctatactattatttacacgctttgtgaagtcaaaggagattggagaaaattttagttaatttaaaagtttaaatcccataaaatatgatgaaaagaaagctcaacaaaaataaatttgtaaaaaaaacatgatatttctcttaaaacataaaaagcctaaaaatgaattctaaaatatgtctttttactttgatgccctaagccatgacttcacttgattgtgtggaacgtcggggttgatttattatacataaatgcattatatttgttataatgcaacacgatgaccaaatgatacatgaagttgattttcaagtatgatttgtatcatgtgttatgatgaaaagtgctattatatattagactctaaacttagtacttattaagacaatcttagtgaattcgggattaaaaatgtagatttgtcacaaccggttgttacaatagcattttatacaacttaattgtacgagatacgctcacttccagttctttaccaatcttgaatatgagtgtcggataatcaaggtgtcgggtaatcaaggcgttttgaatatgactctggggaactctttaaactaatcaaggcttttgaagagccgaggccgacatatatacggacgaacactctaaaggtaaatttggttatccattgttcaattgtttagtaaagttctgagattatgcattgttatgatgagttttgtttttttgcttaagactcgaagaagatatctttctcaacagcttttggaccgaggatttcacgtatgcatgcctcatacctggtcagcggtgagtatgcaaattttcttcctctagattcacatcaattattatgttgttcatatatacatgtagttgattctttcaaaattgcttgtagcatggacttgtcattgaaggtgaacctaaaggtcttcccatcggggaaactcctgaacatctgtctgggcgaaaaatggtaaaaaaggtataatatttgctaatgcgtctactgaacacccgcttggtt

SEQ ID NO: 16306 - DNA, 2651 bp, Arabidopsis thaliana landsberg
  unsure (1)..(2651): unsure at all n locations
tagatgtcacttgcttgtaaatttcctctaacttcccatcgatgaaagttccatccgcttttctatgtgtctcatctagcagctctaggaaatcaggagttgtttctccagtcttctcacactgaaacacaaagagataaacaagttagattcataacattgtagtttaagtaatggtaaggagagaagaatacttatcttacccgttttcttgcacgagctttgtaggaagtctggccagagcggtgtttatgtatctcgaggccatccggatcatgatacctcacattcctactgttgatactctttaactccgacttaggatccttccaaaacctaacaagacctttccacacttcaggatcaatccaccgcggtttagccacatctcccttttccttccactttcccttccacagaccaacttgatcagacatccttcccttcagctttgtttcaaactcaaccctaactctcttatttattgccctgtcccagttatacacttgctacaaaacagaaataagccacatcagaaataaacaagaaaaaagcctaagttacaaaatgaaacacaacttaaaatacttacaacanaggtttcaaaccggcgatcgataactggtcctggtgtttgtgaccaattggcatgaggttctttgaaatctctttcaaagatgctggggactgttgctgcaactgcagcatcatcgtcaaacctacaagaagaccaaccagcccacacataaggatttctatgtctttaaacttctaagacatcacaatgctaagtacaaccaagctgttctatttgttgaaacttctaaggcactacaacctaattccattacgctctaaggcactacaaagttctaaggcactacaacctaagctgttctaggacaatgaatttaaccttaccagagagttcccggaggacgctttgggtctagccttgtcaagccagcacgaccaggactatcaagaagcttctccagtgtgagattgttgagacgctcagcttgagaatcagaatgattgacagaaggctgagtggttggcgttggagacgatggtggatggcgtgaaccttgaacccctgaaatattcccagcactgacaggagaattgacatgcaacgggtctcgctgctgtgacctatatcgtgcataagtattctctgacgacggcatcttgcaaaacaaacaaaacccagagtttagatccgtaaactagaacagattagatctggaaaacaatgtcagatcggagatgaagaagaagttagatcggagagaagcagttagatcggagagaagtagttagatcggagaagaagacgttaccttggaggcaaaagagatcgagttgcggctgctgctggagaagaagagtcgcgacggctgctggagaagacgagacgcgacggagaagaagaagaagttagatcggacggtggaagttggaatggaaagaagaagttatatcggagaagaagacattaccttggagaagaaacagatcgacttgcggctgaagctggagaagaagagttgcggcggctgctggagaataagagacgcggcggagaagaagaagagaggcggcgacgtaatcagatcgaagaagaagagaggcggcggcgaagaaaatagatcggagaagaagagaagccggcgacgaggaaaacagatcggagaagaagagaatcgaagaaaaaaattaggtttagggtttgatgcggcaggtttgagctccgctcaaactaggttatcgagtatatataagaatatatttcctcgcaagtcactcgcaaaccttactaggaaattgcgaggaaccgtcttttaaactaatcaaaatgctttttacattgcgagggaactgcgagagcgcctagcaaatccctcgcagtgtttcaataattatatttgattcagtctctcctatttctagtaagaccctcagcaaaataagaacatgactaaaaattctaaatattttagggtttagtgtaaatattgcgagggaagtgctacgcacactagcaaacacctcgcaatttcctcgcaatgtataatcaatttcgaaaaatacaacaatcactactcaaaatcatttggattcatttttttgaatcattagaacgttaattatctacatttgaacctattttatcatcatataattcgaatgtgttttttccccaaatacatcaatgatgatcttatggttttcattaagtatgaatcatgaatgtttaacattttcaaaatgaaatgttaatattgaaactaatacaatatttttttgttcaaaccatataatcaacttgaatgattatatgggtcacttagattcatatttataaatgagaatcaaagattgcaaaacacttctatgcatagtttcgtctgagcttatccattgatattttccaagaattaaacttgtaatctgtgttgttcattttttttttatcaaatgtcattgcatgtataaaaatattggatgaattaaaaatctatgctcagaagaattcaaaattaagaatctatgcatagcttttatataattagttctctctccataatttacagaaatgctcttctacatataacanattagttatcgaagttttttgttttgtt

SEQ ID NO: 16307 - DNA, 2963 bp, Arabidopsis thaliana landsberg
ggattgaaatgcgagcacaggtgcatacgctaagcatgatatctggtctactagcacataaataaagcaaggattctatcatagaccggtatgctttttgatcaacggacttacctcctttgttgaggtcgacatgtccgtcggttcccatgggtgtctttgccggcttggcgtccttcatcccaaaccgcttgatcaagtcttgtgtgtacttcatttgggagatgaaggttccatccttgagttgcttcacttggaacctaaggaaatagtttaattcgcccatcatcgacatctcgaatttctgtgtcatcaccctgctaaactcttcacaagacttttggttagttgaaaccaaatattatgtcatcgacataaatttggcatacaaataagtcacaatcacaagtcttagtgaataaagttggattggctttcccaaccttgaaagcattagcaattaaaaagtctctaaggcattcataccatgctcttggggcttgcttaagtccatagagcgccttagagagcttacacacgtggtcggtgtaccgttcatcctcaacgccaggggatgctctacgtacacctcctccttgattggcccgttgaggaagtcgctcttcacatccatttggaacaacatgaaagaatggtgagcggcataggctaacaatatgtgaattgactctagcctagccacaggagcaaaagtctcctcaaagtccaaccctgccccttgggcataaccttttgccacaagtcgtgcgttgttccttgtcaccaccccgtgctcgtcttgtttgttgcggaacacccacttggttcccacaacgttttgcttgggacgaggcaccagtgtccaaacttcatttctcttgaagttgttgagctcctcttgcatggccaacacacagtccggatctagtaaggcctcttctaccctgaaaggctcaatagaagagacaaaggagtaatgctcacaaaaattaactaatctagaacgagtagttactcccttgcttatgtcacccaatatttggtcgacgggatgattcctttgaatcgtcgctcgaacttgggttggaggtgtcgggtgtgcttcttcccccattaaatgatcatcttgtgctccccttgatcacacgcctcttcttgatgaacctgttcatcgtcttgagttgggggatgtaccattgttgagaaagaaggttgatcttgttccgtttgttcctgtggtcgcacatctccaattgccatggtgcatatggcggccgttggaacatcttcttcatctatatcatcaagatcaacaacttgctctcttggagagccattagtctcatcaaatacaacgtcgctagagacttcaaccaaacccgatgatttgttgaagaccctatacgcctttgtatttgagtcataacccaacaaaaacccttctacagctttgggagcaaacttagaatttctacctttcttcactataatataacatttgctcccaaatacacgaaagtaagacacattgggtttgttaccggttagaagctcatatgaagtcttcttgaggaggcgatgaaggtacacccggtttatggcgtggcaagccgtgttcatggcttccgaccaaaaccgctcgggggtcttgaactctccaagcatcgtccttgccatgtcaatgagcgtcctgttcttcctctctaccacaccattttgttgtggtgtgtagggagcggagaactcgtgcttgattccttcctcctcaaggtactcctccacttgaaggttcttgaactcggacccattgtcgctccttatcttcttcaccttgagctcaaactcgttttgagctctccttaggaagcgcttgagggtcccttgggtttcagatttatcctgcaaaaagaatacccaagtgaagcgggaaaaatcatcaactataacaagaccatacttacttcctcctatgctcagataggcgacgggtccgaagaggtccatatgaagtaactccaggggtcttgatgttgtcatcacatttttggcatgatgagagcttcccacctgtttccctgcttgacaagctgcacaaggtctatcttttttgaaagtaacattagttagacctatcacgtgttctccctttagaagcttgtgaaggttcttcatccccacatgtgctaagcggcgatgccatagccagcccatgctagtcttagcaattaagcatgcatctagaccggcctcctcttttgcaaaatcaactaaatagagtttaccgtttaatacacccttaaaagctaatgaaccatcacttcttctgaagacagacacatctacatttgtgaatagacaattatatcccatattacataattgacttacggataacaaattatatccaggagactcaactaaaaacacattagagatagagtgctcatttgaaatagcaattttacctaatccttttaccttgccttgattcccatcaccgaatattattgaattttggaatccttgtttttgacgtaggagtgaacatattcttctcccccatcatatggtttgtgatccgctgtcgataatccagcttgaacccccggatgcataaacctgcaaggcaaatttaggcttgggacttaggtacccaactcttgttgggtcctacaaggttagtcacaattgtcttagggacccaaatgcaagttttatcacccttgcattttgcccctaattttctagcaactatcttcctatcctttctacaaatagcaaaggaagcatttaaagcatgataaattgtagaaggaccatccataactttcctagcaacatgaacaatattctttctaggcacatgatgaacataactcctagacatatctctatcatgcaaataataagatctagaagcaagcatagcataagaatcataggcatgtgcatcaaaagcatta

SEQ ID NO: 16308 - DNA, 2341 bp, Arabidopsis thaliana landsberg
aatttgaagttgttggatcttcgcctgaagtcttcctctgctaaattagcctcggaggtcatgcttactcacttaaagtctgaagacatgggcttatcccgggaatttgatttactgcaggtttgttttatatcaaacactctcagatacataaatctatgttaataaaattgaattcttgttttaaagcattcataatctatctctcctctcttggtagaccttattacttcagttttaatcttagtttctagtgttgcagctacgttccaaatccaatgttggtcattattgatgtcgaacctatagaacttggaattcccacaaaatcatactatgcagttgaggaggtcaaggaggtaaaataccagccaaatttctaaccatatcacttgttcgtctgttaagttgcattagacatgcttgttcgtcgacaagtcatgatatgtctttggttgaatcacattaagttggagtgtgaattggtttgtaagttagtgaaaactcagtagtctttgtggcctatattcatttcatgttttgtgtcggtgccttgctttgttttcaccttaatatggcctcataattagcttcgcatatgtttgtgatttataaacgatactttatatgctttagtagataactttaccttcgtcatttctttatggcttttcccaattctctgaatgatcttatagaattagatgtctttgtaattgtagttcattctcttttcttactcagttcattcatctttgctcgtgaagttaatgtatagtccttaagatactgccatgtcaatgatatatgttttagcttgttgcatgattagttgtggtagaagaaaagtagatggttgagtattactcataagccacccatgctaaaataaaggctttaaagaatcttaattggttatattggtagagagagatgataataagcaagaagatttatcttgccaagattattcaattatctctatgcgattatatgtatttgggtcattgagttcttcttgatggcattgactcaatttaaagtaagagccaagaattttactagcaaacctcaaggactacgttggtactcgatgcggctttagattgatgaagacggagatgttgcagatgagttcttggaagatcataactgcaagatgataacacacctttttagcccttttaagctattattttcttatgtttcagagagtattttgtgccattcttgagccaagaagaggagaaacacgtattctaggtgccaagaaggttttaagagttttgaagctaaaagtatcaaaaagcgatcaattccaatacttcagaagttaagcatccagcccaggtcttcctcatcacggcaacgagatatttcggtatgcatagaaaggtagaagagtcaagattaacgtcgaagtcaaatcaaagaaatccatgaagccgtttggaagatatgaccccaagagtgaagatatgtcaagaattgggcgtttggaaataataaatccaaaaagcatccggccaaggagacttgaacccgggaagctccgagaagctttccaccgaccattaggtcatgcataagtccttctctctttgtgacaccgtcattaggctcctcccctgaagcccactactcagcccgatcacttacttatccggcggattgacgttctaacccctaaacctaattcttagccctcaagtataaatacttgttctaagccctaaccctaggtgtgccttcataacaagcgaaccctagccgtcacctagagttgccaactcgccgccacaccccttgagctcgaagatcaccatctctttctctttctctttcgttttgtataagattctttaaggtggagctttgcctcttgtgttctacattaaaagaagtgatctctaaagcctttttaagtcttattatgttattattatggtttactcaaccgaactattgattagctcctttgccatgagcgagtagatctctagttgggtttgagggggtttcaaaggggaattcatggggacgttagatctgatttaggttggcggtttctatgattttgtttgatcgtttacacaattctttctatttgagtttaatcttaatgcatgtatgtccgcaacgtcacctagtacatgatcttaagtactttatacttggcagaatcttgtataattgcttgaactaactcacgaatgagtaagatttgattacctttgctaaccgccgattatagggtcttatggactataattgaacttgaacttaatgctttgatatgtatgtcatcaccatgttagcacctcctaaccgtgggggcgac

SEQ ID NO: 16309 - DNA, 820 bp, Arabidopsis thaliana landsberg
  unsure (1)..(820): unsure at all n locations
cacatattgaactagggaattgtccagcgttactccgaaggggaccttccagaaattctcgaaggccctagacaagcttaggcctaggagggggtttggaaatagttttcaaccagcaatagacacgcctcggnnnnnnnnnnnnnnnnnnnnnnnnnnccccaagcgcaaagatacttttcaagggaccaaatcctctttgctttatggggacacaatacccatcatcttgatacttacttccgatgtgggactctatatacccaaagacaaatatcaaaaggttgtcaaaattttcaattagtgatcaacaagacaactagtttgttattataggaagatatgaagattaagactaatgatggtaggggctgcgcgaacgcaaaccccctctgccacaaataatgacgcaggctcttcctcatgggaagaccttaagcatagcaccccagcgttatgtgcaatgcggtcactagcctaggccactcgtcttattgatcacgagttgaccccgtccaggtaagtaatttgctctaaccagccacttctctatttatactcctgtagtacccagtcattgtttctagtctagcgatgtgggataattatcacttacacacatcctaccgtttaatggtactgctatccaacaacgcgctgttctcttacacatgagtttgataagattagtcagtgaaccaaatgttattcaaagccaaatgacgattaataaattcttatttccatcatgtatttaaagttcctttggatttctttatattggaagatttgtgtgtggaatgagttttgatcgcaagat

SEQ ID NO: 16310 - DNA, 698 bp, Arabidopsis thaliana landsberg
tcttaattttcaggggcaaattggtcaaaagtttaatgaaaaagttggaaaaatgtcttatccctcacaagttccttaaaaggaataaaattctttaaaagtgcctaaacgtgtgacaatccctttttcaattgcagctatctcgtatcatagattgttttatatttaatgcgatcatgtgttttctcttttctgctagctcctgagatcttgaagttcgttgtgaagatcgatttgctctacttcttgttgcctatctcgagtaagaatgttatattattaggttcagttttttgttaagacgtatcgataaaggcatgtattagttcattcttttgtgttctgctagctcttggataggaattctctaagttcgtagttttgttcattccgagtttttctgagttggttgattccttgtttgttctgctttagagactaacaaaggtttttgtagaagtaaactctacatcaaattggtcgttagctagagcattaagctgttgcctcgtttgatctgatgatgatactagttattattatttatttagtttgcttgttggatgttagctcgagcattgacatatttgttgcctcatatgatttctctttccaaaggtgaaaaagatgaaaaatatgaagccctacattgcctattgttcgtgagactccaacaatggagctcgtaaagctcaccg

SEQ ID NO: 16311 - DNA, 3277 bp, Arabidopsis thaliana landsberg
tccacatggtaaagttatctaacaataaggtcaacattaggtttgaactaaattatgataccatgttcacttttatatttaacaggagtttgtggatcccttaacatttgcagataatattatattatgttttctcaccatctttttgtgtacttcaacttttaggacaccatggagacgcctccaacatctcattcattgttagggtttgcaatgttctctgaaaagaaggtcatccttatgtttaaactaaattaggcatgcatgttcacttttatattggataggagtttgtggattcgttataacttgcaagtaatatattcttatgtttttctcaccatctctttgtgaaccctaaacattcaggtcaccgtgtatatggctgcagcaattcattcaggagtttgtgaagtcaactctgatcctatgaaggcagacattaattacaagtatcataattttctggtatgttttaatggacagctctgtttggattgtttttaaaattatcttcttattccaggcaatggttgtgtttgtgaagcctgtatttgatacaagttccaaagctgacaaagagccccaatcatctcccacacatagtcccaatattgtgggtacaaggaacgaggtattgcgtaacatatactgacttttgttaataatgactagggaatgattttcagttttgtaacagcttgtccctattggtctgatattatatcttcctgtacaggataataactcagaacactctaactcacctgccccggaaccagatcaatattttgagttatctgattcatccccggcgcgtaaaagagaaaaaccaaatctctcccaagctgaagcacgtctcgtagccgagttcacatctcaaccaatacttgagacacaagcacttttaccaacactaaaaaaagcggagtattcacagtttgtcaaaaccctctcgagctctccaaatatgtatggttatcattcatttttcttatttccacaacattcatcatcaagttcatcactaatgctgtttttttacctcatagtgaacatctaaccaagtgtggattccttatttccaacaaattcttcgtcgaacttgccaaacctcagcaatgggtttcaaccctggtatgtagtccactatatttaccttaatacaaattaacctgttaacaagagatactaatgtgtaaatgttttatttcctagcacatggaggttttggtgtcattactttctcggaggctcagaactacacttgagaatcatcgttcttcttttgttgatccatggttcacaagccatctacaagctaaattcagagccttcaacgctgcgaaggtgaaatcacgtgttcgttggtcagaggacatgcagcgcttcatcaaaggatccaaaactgaatggttcaaggacatagatacaatttacgcacccatgatatggaatgattgccactgggttggtctttcaatcaatcttggcatatggagcgttgaaattcttgacccaaatacagacctctacgacgacgctaaggtaaaaagatgcattgagccagtagtcaatcttttgccgcacctcatccaaaggtactgtacgccagagttttctcagaatcacggtcttcaaccgtttggctggagtcgaattgatggtatctacaagaatttgcggagtggtgactgtggcccggttgccatgaagttcctcgagatccaggcaagtgataaactcccagataaaatggctgaaattactgacaaacacgtcgacgcgtttaggcgtcaatatgccatggacatatataaacaatgtgtctgcccactctattcatctaatgtttctgactagttatcgaatgccaccctacaaatctgttgaaatataaacgttgattccgccttctttgaatgcttataactctggatgatataaatatgttttttgtttttcttaaccatatcgataatcttatctctatattgctgttgaatgttttagtggtttgtatcatattatttgtttgttccaaccataacaacctttttttcaagtgcatctaacatttgatatcagttaacaatgcgaagaaaaataaataattttgcgtattttgaactattgtttatttggtaaatcattctagctaattatgtttacaaatacgtttaaacttaatataaatgtcatccagtgataatgaattatccaatcagataaacgaattaatacagttatattgtggatggattcatatggatacattaacaattatctttctcttttaccatgaaagacaaatctaaaattccttctaccggaaatattgagatattgttgtatagcgggtatattcccaccatcaggttttaaactaggatttttatggttcgagcataattcggggacattatggttagagcacaattatagttagatcattatcttttttttttttttttttttttttttttggaaggattattacgtttattatgagaagataattatggttagctctccagtgtttaagtttcttccattccccattcctacaaaataatcttatctctacattgctgttgaatgttttagtggtttgtatcatattatttgtttgttccatccataaccccatttattttcaagttcatctaacatttatatcagttaacaatgcgaagagaaataaataattttgagtattttgaactattgttgatttgtaaatcattcgagctaattatgattacaaatacgttaaaaccagtcatagtgaattattcaatcagacaaacgaatttatacagttatgttgtggatgaattcatatggatacattaacaattatctttctcttttaccatgaaagacaaatctaaaattccttctaccggaaatattgagatattgttgtatagcgggtatattcccaccatcaggttttaaactaggatttttatggttcgagcataattcggggacattatggttagagcacaattatagttagaccattatctttttttttatttttatttttattctttattatcacgtttattatgagaagataattatggatagctctccagagtttaagattcttccattccccattcctacaaaataatcttatctctatattgttgatgaatgttttagcgggctgtatcatattatatgtttgttccatccataaccccatttattttcaagttcatctaacatttatatcagctaacaatgtgaagagaaataaata

SEQ ID NO: 16312 - DNA, 361 bp, Arabidopsis thaliana landsberg
aaggctcgatatgaccactggacatggggtcaattcattataatgcagtcagtttgcctcaatcatcacatatggcataagacttgcgagcaaaatccaaagattctggcggtcactcatctgaccccttctactaatgtgtcttccgccattggctgttattatgtataaagaaagtcagtgatcgaattcgtatgtcatttttcttgtcccataattttatttgtataatttaaatttttaatggcagctacgattcttattttattggagaaaacaaacgattctgttatcattgatcttacatcctcatattacatatcttcctgattagaggagctgagacatatttaatttatta

SEQ ID NO: 16313 - DNA, 1247 bp, Arabidopsis thaliana landsberg
tctgcgagagtgggttcattacattgtattgtaaagcaggggaatttgagaacgcacgtaaggtgttcgatgaaaatcctgagagaaagctggggtcttggaacgccattatcggagggttgaatcacgctggtcgagctaacgaggcggtggaaatgtttgtggatatgaaaaggagtggacttgagcctgatgatttcactatggttagtgtgactgcttcttgtggaggattaggtgacttgagcttggcttttcagttgcataaatgcgttctacaagctaagaccgaagagaagtctgatatcatgatgctgaattcgctcattgatatgtatggaaaatgtgggcgtatggatttagcgagtcacatattcgaggaaatgcgacagagaaacgttgtctcttggagttctatgatcgtgggttacgcagctaacgggaatacattagaggctttagaatgctttcgtcagatgagagaattcggtgtcagaccaaacaagatcacgttcgttggagttctcagtgcttgcgtccatggaggtcttgtggaggaaggaaaaacatattttgcgatgatgaagtcagagttcgagctagaaccgggattatcgcattacggatgcatagttgatctattgagccgtgacgggcagcttaaggaggcaaagaaagttgttgaggagatgccgatgaagcctaacgtgatggtttggggttgtttgatgggagggtgtgagaagtttggtgctgatgggatacttattcacaagcaaaatgaaaggtattaactagacatttgagagttcttagacaaaacaaattaaaccataaatgcagatctttgtatatgagcttcatttctctcatacctccttctctgttgttatctttggacaccctaggattgttcctataagaaagcaccaaattccaaacataagagttgtttacatttttaaaaatttcagcggtttaatcaccgaaacagattttcgattgcttctgggtgctgtgtgcgaaaacgaaagatcaaagagatatttcacaaatttcggtatcaattacggacctatattcaaaagtttgttcacgtaatttattctaatgtttgctaactaattcgttttaagagtcagaacattacctctctagtgagttgttttgtgtcttttctgtctacgattgtttcggtcaaagggttcatgaaccactctggtttataggaaacgagtatgtatcca

SEQ ID NO: 16314 - DNA, 1573 bp, Arabidopsis thaliana landsberg
  unsure (1)..(1573): unsure at all n locations
aaattatttcacaaaaacaaaaaagttgaacaaagaatgattcaataattctatgaatttgttgaatagattggcttttgtaaaataaaaaggaaaatcaaataatttgaaaataaagaaaatgtgataaggagtataacaaagggtcattcacaaaagtagccttagttaagacttagattaatcactctttcttttttnnnnnnnnnnnnnnnnnnnnnnnnnnnnnnnnnnattatttttcttttgaaaaaaatttaacattttattaaaaatataaaattttgggttagtttcttaatttataactttttgttggttatacactcaaatttccccataacaaacaaaaaaaaaaaaaaaaaaaaaaaaaaaaaaaaatcgagataccaaaagaatttgaagaaaatgcaaacaagaaaaatggaaattgttacaatattaatatcaatttactattttgtgtgaaatcacaaactttataaatagagagctcttgtgttaagaaattaatcactaacaacaaagagaaccaaaacaactaaagagagaaacctaataatgagaattgtttcggaacatgattgtcccaaaagcgtcgaagggcttagctatgaccctgaacctaacaggagtttcgatcacttggtctctgagaccgagtcttttgaaaagaagctcaatgcttttacaaagtttcatcaaccattcactaagacaacatcaaggacggatagagcattcgtaatgcgtgtatcaaaagatgatatagatagtgatgatgaagatgtagagaataatgatcaacaagacaaagaagaaagtcaaatctgtacctgtgatgatctatacttaagcgatgatgatgagtttgatcatgaacttcagtataccaaaagtacggaagatattaagaatcaagtatcagttgttgaaaaggaaataaggaatgagattgaaagggctctctctgcaatagctctggttgacaagtaccgcgaaaaccgtagagaagttgaacggagtcttgatcttcaatataagcgagaagttgctgaagcacttgagactcatatgaatgcagtcaaacgtgaacatgcaattatatcgtatatagaagaaagaaagataaggagagaagaagcttaagaggaagccaagaagagagaaagggcaaatcagaaagagaaaaaggaagtgaaagagagagttagtgttgttgctttgtcattggagaagcatacattgaagaagcttgaagagttagaagcaatgaaccaagagctgagatcacgtttaaatgaggacttcaggagttttgaacagagtattgcagagttagttcagcattaccagaggaatgattacatagactgctattgattttgatgtatacttcagtttttgtttatggcggtttcaaaatgaatttgctaacatttagtgatttgaacaatttaaacattcagaagaacacatatcataaatcaaaatatttgacaaattctactggttacagataaactcttgaacttgatattaaaggtaccgagcatgactatttaattatcat

SEQ ID NO: 16315 - DNA, 1024 bp, Arabidopsis thaliana landsberg
tgtagaatttcttcagatgcgaggctggatacgaggccagtgcggatgtggtggctaccacgagctgtaagaagctcgtcatggacatgcactacgaggcgcgcatccaggccatcgtcacttaccacagctccgtcctaggggagaaggtgagcaagaaggacgcccgaaccatgtcgttgactccggaccagtacttgcaggtaaatacaaaactttattattggtactaaatatgcttaattttatcttctgatatgttgtgtacttatatttttttagatgattcctcattggtgcgccgcgcatcctgagtgctgggagcagatggtgcagaggtggtgctcggctgagtgggatgaggcgcacaacgctagccgggaacgcggtttgatgatgcaaggtccctcccaccatcaaggcagccgcagcctgggcaaatacgcggaacgatgggtacgcgctcttttttatttaggtatataactttcgattagacatgatttctaaccatctcgttggttttctcgcagtcggcggcacatggtggcgcgccttgctccacgttctcggcatatgccatggcccatgaggggaagacgatgtacaacgacacctacaacctggatgacgggcccgaggcatatagcaaccccgccgtctacagctgcctaagtaagtacactgccatgtcacaagaggtccatgagccagattatgatccgaggaccgaggacatcgacggagatgtcctcatgagggtcggaggaggcaagaggcatgggcggtactggattgccaacggggcaatcgacttgtcgtccactcccactctgtcttaggtgcgagcaaggaccacgagctcgagcctagccatacgacctcggcaggacagctcacatcatcaaatgcaacaactccaggttattagtgcttatgtaactcagcattccttgagttatataccttctctttgaattattataacattggggtgaaatattataggcccagctagaagaag

SEQ ID NO: 16316 - DNA, 3302 bp, Arabidopsis thaliana landsberg
atttactctcatcctcatcatctctcatcatcgagattcatagtctcttttgccgcttggattcttccaaggttagtgagctgctatggcaactcatcagcaaacgcaacctccttccgattttcccgctcttgccgatgaaaattcccagattccaggttcaatttacaccttctaatcattatttcttaatttttctttggtggattccatgaacagattctcagtatttcgcctggtgatgaactactgcgattgcataggatttttattgaactattattgatgatgaatgttcaattacaccaataccaaattttaaacctagaaaagattgatccttatgatctatatttatttgatgatatagagtaatacatagtaggatttctactaatgttattattgatgaatgtgtttgttacagaggctactaagcctgctaatgaggttcagcaagctaccatagctcaggatcctccaacatctgtgtttaagaattctgaaccaatacgggaggatcaaattcagaacgctatcaaattcctttcgcacccgagggttagaggctctcctgttatacatagaagatcttttcttgagaggaaaggtctcactaaagaagagattgacgaagctttccgccgtgttcctgtaagcttcctccttacttcttttgtttggagtctttttccattcctattgcttacctctctgtgaaaaatcttaatcataggatccaccaccaagttcgcagacaactgttacaacaagtcaaggtaaacagcaacgacatgtatttgtttgtttgttcctttgattactagactgggaggtaattttgtatgaattgttatgtgacaagcagatggacagcaagcagtgtcaactgttcagccacaagctatgcagcctgtagtagctgctcctgctccactcattgtgactccacaggcagcttttctctctcggtttcgctggtaccatgctattcttgctgttggagtacttgcagcctctggtgccggtacagctgtttttattaaggtatcatgatcctgttctccatttatatgcagtgtactgagttttttatgttatgaatttactttgtacactggatagtttttagggttacttggcatagtcctctaaagacgtatttagtgggataaaatggttaggccattaagaaaatggaagcagactatataggaatttggcttatctaatcaatttcattcctctgacactcgaacaccagaatatagttgccaagaactttcatgaaaatattatccgtaagagtttgttagggtgttagaaagttgttaatccctttctggcttttactgattgctgctagatgtgttttaatgctccatgtggaatgcaactttatagtatgaatctcccttcttcaaaatcaatatcttattgaagtgagatttgttcttgtttcagagatctctcatacccagatttaaatcctgggtccaaagaattatgttggaagaagaaactgaccctctgaagaaagctgatgctaaacctagcttagctgaagaagctgtagctgcagccaaagctgcttctgcggctgcttctgatgtagccagggttagtcaggaaatgatgataacaaagaatggaggtagatatatttctgcagcttatattgtagactaattttgtctctttttctgtgatcatttctggacttttcttgcttgttccttcttttcctctaaattaaattatatacattgcttcctgtcagagaggaaatattttgaggacttaacgcacctgttaggtgtccaagtacaagaaatgaagtccttgagcaataatatccgtaagcttgaaggtaagtattaagctttactgaaacagagatttggtcttggtctggacaactcttatcgggagtcatggagggtctagttaccttaatatttggttgatcttaagatccattgttaaagcttctcttacttactttcagggcaatccaacaacatcccaaagatttattcagctgatcaagaggtttataatggttcggtcactacagcaagggtgagtttataggttttggtttgagtaagctttgattcatagatttgtttttttgtaaaggtgattcatagattatataggattataaacacaaagaaaacccaaaaactatgtatcataattcttttggtaacattaggaaccttgatatgtgatgcagaaaccctatacaaatggcagcaatgttgattatgacacacgttcaggttattatctctctttttctctgcctcaaactgcattatgttttgttgtttttggttagcttattttttctaactaatggacaatacagcacgatctgcatctcctcctgcggcaccagctgattcgtcggcgccccctcatccaaagtcatacatggatgtaatgttctgaaatccctcaagtttgctgcagaatcatggatttataataaatcttatcctttgaattcctaataatctttgtaacatttagttgattattggtgatgctgcagataatgtctatgatccagagaggagagaagccttcaaacattcgggtaagttgaaaactacaatcctttctcgccccatttctagactaacaatatagttttgtggtgacaaacttatggcactttcactgaaatctacaggagattaacgacatgccgcccaatccaaaccaaccactatcagatccacgcattgctcccaaatcaaaggtacaaactgaaaatgtccctgaatgttaatctaaaagtacattatttgtaaggaatcttggtcaaatttgtggaactgaacttattattaagacttcattaaactcgtattctctcttattaccagccatgggactatggtcaagcgccgcaagacgagagttccaatggtcaatggtggcaacagaaaaaccctagatccacggatttcggatacgagacaacaacagcggcgcgtttcactgctaaccaaaatgaaacaagtacaatggaaccagcagctttccagaggcaacgatcatgggtacctccacaaccacctccagttgccatggcagaagcagccgaggccattcgccgtcctaagccacaagctaagatagaccaagaagcagctgctagtgatggccagtcaggtgtgagcgatgagttacagaagatcactaaattctccgaatctggtggtgatgggtcaggaggaattaagatcgcagagatacaagaagaaacagaacagcaacatatcagc

SEQ ID NO: 16317 - DNA, 1553 bp, Arabidopsis thaliana landsberg
tagtcttacatgttgtgccataaattttagaaatttattcaactagatatttttggatgattaatacaactggttaaaaacatactctcctatactgatatacatttttcctaacaatctacgataagataaaagtgtaatgggtagacttctcttgaaatgaattagtgcttgtatacaacaaatatgaaccaaaatatttgggtagaactgtagaagatacagtctatatatataaaccataaaacacaatattccgtataataatgaatccataacataaaagttaaattctttattaattcatagaatcataatacaaaccaatacaacaatacccccaatggtaagagtatatataataggaaataatgaaactgtaaacttcaggaatcttacggatcaccccaatgaacaccagagcaagcagagtagaagaaaccacagatcaagatatataaagacacaatataagagtatagagaatcaccctgtctctttaaaacaagaagataaattaatacacacataagtgtatttaaattatatatcaatatggtttttagcattggaagccaggaggaagttgtttgctgcaaacattaaggagtagacttaaagatattgggaggttcaagttgattccaagaatgttagccttaagagcggtgcagagacaaacggctgcctcaacatcagcgagtccttggatgaggctgcagcatggctcgaccggtggcttgccaagggtcaagtccaggaggccgttgagcacattagcgcagacaccgagcttgagggtgtctttagggcacttgctcgagccagagctagggcttggggttggtttaggagttggctttggcttgggagaggggcaacctccgccgcacggagtacagctaccacaggcggagattgttgtgaaaaagagaagattgagagccaagaaaagagctatggagcttgaagccatttttggtatatagaaaatactgttcactagctagctaggttgtgagtgaattgggtgtggagaaaatgaaagaattgagataggttttatagtggtttcaagacaagcccaagagcgtccgatccataagatatatgatgggatttttttataacaataagtataaatgattgactaccattatcataattttattgattacagtaatatataataaaaaagattgaatgattgaaattagggaccttgaaattatgtacacggaagtttacacattgtccatttgtttatatgaagatacgaaatgtattataactgtgatgtcatatttgcttatagttttgggataaactcgttgtcgttgtaatctacgcgaaacaggatcgatcctcaactagtatagatgtatgtatgtattattattattattattattattattattattattattgttttgtgcaaataactagctagatgcatatgttcttttttttgttacgagtaacgactgctagctttataataagtttgattttcatgtcacagttgtataagttatatagaaacagaaaat

SEQ ID NO: 16318 - DNA, 3680 bp, Arabidopsis thaliana landsberg
cttaagaaaaaaaacccaaattacttgttaacacaaagtgaaggcaggaaaaaaaagttatttatttatttaatagtcaaaatttcttacccaaaaataataagctagttttttaataacatagtttgtttagtaatcccaacaaaaaaatgtttcatgtatgccaaactctttacctttttacaattttagaaacaaactttttttttgctaaaaatccaatccggtaacaaaaacaaagggagtattatattgattcaaaatccaaccaaaataatagctagtcttggattaactagttagtaacacaaacaaaaaagtgtaaaaccaactgcaaaattctttacgattttaaatgcaacatcttaaggtggaccatgatggatgattcatgagtcttgactcttcttgaggctcaattatttgggcgtgttgaccaaaaaattgttccattgaaacaattttttctatatcctcatcaaatacatttttaaaatatgttgacaaaaaaaaaagagaaaaatgcgtactataaatttatgagatctcagtctattaaacaaagaaaaatgttacatctccaactttacaaaaagctgattttatttcttctcatatttttctactggaaatgcaggtgtgttaatgataagtatgtgtagtaaaaattcaaacacaaaaatgatttatgataatgcattgtagattcacaaattataaaggtgtaataattgaacaaattaggctcaatcctagtaacggaagcacttgctcttcgcaatgcccttaaaatggcagccgatcaatcggatatagcctctttcacggtattgttggactctcaagtcttgatctcacttatcaatgctaagaaatatctttcaaatctcaaagaaaatcatccatgatattgcttcgttttgtaattctttcgcttctatctctattgcttatgtcccaaagtcgtccaatactttagccgactccttagttaagtcagtccttgtggcttttacttcctcctcccctccaagaatgtaacactctctgtcttttagcaatgcaagttcggtttgaacaaaaacaaattatcacaaaatgccaaaaaatgaaagacaattaatttataattaggctcataagtcaaatagccaataacttgccccatacctaagatagttactttaggcgaaacgacggagaatttaaggacaattgactatagaaaagactctatattatactattcacagtgtcccaaatatatataaattgcctaacacattgccaccgtcgttgacaagttttcttagattcaaaatttactacatagtatatattatataatttataaacctaagaaatgaaggaaggtggatcttaatatgtataattaatagaggcaagacatgaaggaagatggatctttaccaaaaacagctgggcagctttgaaaatgcaatgttcgatgataataatatctcaataactaacaacgcgtttttatctcagaagactccaatatattgacttggaaccactaaaagtcgcattattattgttttgttatatatatatatatatatataatcccaaaaagtaaacaaacaaaaaataaaatacaaactattgcggaacaatacaatatatatatatatatatgtaattcttattgattcaattttgaaagaaatttctttgtctatatattattttgatgtttttgcgtttaacctcatgaatagagagataattctccggcttggtaaacatatacgttggattgtttttttacaaacaaaatctcaatatatttctaactttagccctacgaaccaaactacaggtcaataaacgacgtgaaatcaagctaaatggcaaattattagaattagtccgaataataaacaaattcgtctaaaattgtagaaaattttgggatctaagaatgagactacatcattttttttatcaacaactacatcattttaaaccaaacttagaattgttaggtctcaaacttctaacaccgatttgctgcaaaaacaattatggatcggatcaaaatatagagaggatttcacatttgacttctattgcttactcattccaaaagacggtttggtctagtttttgaaatttaaccaatcttgaaaatacggaatttgtaatgtactttacaaaaattgtaaatgctaattataattttgtgatctcaaatattcatgtttatatgataagataagagataacatgaatgcattattatataataccatagaagatagaatgtatacagtctcaaaataacaaaatttaatacggacccacatcccaaacctctcccactctatatatttggtctctataaaacccactaaacctaaacttttccaaaatcataccaaaaaaacatttagtaacatcaaaatttacaaaaaacaaaaaaacatgctatctctcaaactcttcctcgtaacactcttcttatctcttcaaacactcttcattgcttctcaaactcttcttccttcaaactcttcatcaaccatctgcaaaacaacacccgatccaaaattctgcaaatcagtgttcccacaaacatctcaaggcgacgttcgcgaatacggccgcttctccctccgcaaatcgctaacgcaatcgcggaaattcacacgcaccattgacaaatacctcaaacgcaacaatgcactattatctcaatccgccgttggagctctccaagactgccgttacctagcaagcctcacaacagactatctcataacatcgttcgagacggtcaatatcactacatcatccaaaacgttgtcgttttccaaagccgacgaaatccaaacacttctctccgcggctttgactaacgagcaaacatgtcttgatggaatcaacaccgccgcttcctcttcatggactatacgaaacggtgtcgcattgcctctaatcaacgacacgaagctctttagtgtctcgctcgcattattcaccaaaggttgggttccaaagaagaagaaacaagtagccagttactcttgggcccatccaaagaacactcacagtcacactaaaccattccgtctgttccgtaacggagctctaccgttaaagatgacagagaaaacaaaagcggtttacgagtcactcagcagaagaaaactcgccgacggtgacagtaacggtgatggagacgacggaagcatggttctgataagcgatatcgttaccgtgagccaagacggaacaggaaatttcaccaacatcacggcagctgtagcggcggcgccgaacaacaccgacggaagcgccggtttctttttgatctatgtgacggcgggaatctacgaagagtatatctcaatcgcgaagaacaaaaggtacatgatgatgataggtgacgggattaatcagacggtggtcaccggaaatagaagcgtcgtcgacggttggactactttcaattccgccacatttggtacgtcacacaatcacatgttattaataataatgtctcgagatctcaaagttatttttcaataatatttaaaatttctcgagtacgtaaatagttgcctttaattattgcatttaaaactttaggtcaaaaaagttagaattgaaagtggtgaacaggggacaagatgcattaataatactgagtg

SEQ ID NO: 16319 - DNA, 1611 bp, Arabidopsis thaliana landsberg
  unsure (1)..(1611): unsure at all n locations
aaaggtaagctattgataaaaaaaactaaatccctgatatttgattttgaatctcttatactcatacattgctgttcatgtgttgttgtcttgatttcaaatctgcccagctttttgtaataatgatgcatgcactatgtttaatgcttgagttcgatttccctttgtttcgggttttgcctcattgttataactcggtcgaaagtcatctcctttacatgaaatttctgttgttaagattatatggaatgtccttcattgttctgctttctaattcttgtgtcaatcttatctaaatcttataaatcagcatttgcattagaagatttgatctattttaaattggttaagaagtgaaatgattgattgtcaatgcaggctcttgttattgaaaatggcagattccaccaaagcagggttgaagaagccagctttcactaaggttgatcagctgcgtcctgggactagcggacacaatgtcaatgtgaagattgtcagcacgaaaatggtgttacagaaaggtcgtgctgatggtcctcaagctcgccagttgcggatttctgaatgcattgttggtgacgagacaggagtgatcgtctttaccgcaagaaatgaccaaggtactttacttcagtcaataaatcatttgaaaaacaaaacgttcatataacggtttgtgtacttgattctagtaatgttacagggtagctagtaatatcttgatttggttttgtgtgtagtggacttaatgaaagagggatcaactgtaactctacgcaatgcgaaaatcgacatgtataaaggatcaatgaggctagctgtagacaagtggggtcgtgttgaagtcacagagcctgcgagcttcaaagtgaaagaagacaccaacatgtcccttatcgagtatgagctcgtaaacgtcgttgaatgagtgacaaattcctcgaaataccactaggagaaacgccctcaagaataaacaagtcaaatccgtaaccgtttatgttagcgtcaagaaaagagttaaaccctgatcagctgatgtcttgcactaagctatgtaagagtgatgatggctctaaaagttgaatgcagagcttttggcttaggttatgacttcgtgataccttttcttttgtaatgtcatcatacacgctaaggcttttgtgctacattattactctctttgtctttgcctcgtttcaaaaaatccatattcttagtgaagtaaacagaaactgcaagcctctgttgatcaacgaccataatgattatctttctattttggggttatatataaaaatagaagtttaaccaaaatgcaactcgagatgggcttgaatcactttgctaatgattgtggagaagaaatgttgtcgtgtgaagtgatgggacttcaaatgtgtgtcatcattgcgtcatgactgatggcttcttggtttcctttgtcttttaatatgtttatcttcttacatttttatatgtttgtccttgtcacgtatcggtaatgaaacttcaaacttgatataataaacgaataataggtatgaatactaaaatagttagtgaagaaacagtttctaccaacanaaagtaatgtatcttttcatgagt

SEQ ID NO: 16320 - DNA, 1087 bp, Arabidopsis thaliana landsberg
ccataaagaaatcttcgctaataataaaaatgatgcacaagaggaactaacattaagaagatctactcttttgaggagatgtgttatttcctatgactgtgttttatcaagtagaatctgaagacctaaatataaagatctagtttcttattcactagtcattaaggatgttaattcttataaattgattgataccatgaaggatgaaatgaactctatggctgaagagggagtctttaatgtagctcctattgcatgaaggacaccaagcagtcgggtataaatgggtctttaatactgaactcgactgtaatggcagtactgaacgacataaaagtaagacttgtagccaaaagctttaatcagaaagaaggtatcgattacaatgagacctttttctcatgtgtcaaagaaaagactcttagaattatcatgacattagtaacttagtatgactacgagttacattaaattgatgtgaaaattgcctttttgatagagacttgtaagatagagtctatgtatgtcagtttaaggtttcataatcgaaacttgtgaagatgaagtctgcaaactaaagagattaatatatgatctgaaataagccttgacgtaatgatgtctaaagttttatgaaactattacaaaattcgttttcatagaaaacattatataaccaagtatatacctcaagattagtgggagtaagttcatatataaatgtattgtatggtgatgatatatgataagtgtatattttgcatgttttaagcatctatttgtcatcactttagaatcatatcatcacttttttatatcatttctcatcatttgtcatcaatttgcatgtttcggatagttttgcatgcattttgcatatttgtgttgttttcaagtgatttgaagctcttggcgagctaattggaagaagcggacctgatcatgtcaaaccactcgagcccctggtcgagtacaagcttcacgacctcaagagaccactcgaccccttgttcgaggagaagacttcatcaattcacctcaccactcgaccacctggccgagtaccaccatgagagtcacttgatca

SEQ ID NO: 16321 - DNA, 684 bp, Arabidopsis thaliana landsberg
gacacactctacaatgaaaatctgtattatttttctgttttggttaagattatcaaagaggacatgggttgtaacttgtgaacggaaggataacctagccttttatgccacaaatcatgactagtaacagacgcaacagttatagaagaatctgtacctggatgagataatgaatcaagatccagaatgtacagattagctacttgtttacccattccaaccattaattcccgtgtagcatcctgaagaacacaggaagtttcatcaaaccagattctacaccccatactcttagttaaagaactgacactaagaagattgaatttgaactggggaatgaaaagaacatcattaaggatgagatgtctacccaagtgaactgaacctataccaacaatgctcacacgaattccattaggcaaggaaacagtagtatcatgaagatatttaaaagaagaaaaggagtgtttatcatggcaaatatgattggttgctcctgtatctatgatccaagaatgaatagcagtgacattgctatctaaagaacaaacataaggcctagcaattccggcaaaagaacaaaggatagagggaaaaaggttatcggagattgggcacactatggaagaaagaagaaagatccgaagatactgagacagagtgtacttcatgttgaacgggagt

SEQ ID NO: 16322 - DNA, 2258 bp, Arabidopsis thaliana landsberg
gcttgtcaacctccgaaggtactggacctgaatgtgcttgtgacttcttccgacgcgcgttgaaccaacatgtcatcatagacctaataaatcttagcaattccacaatatgtgacgatctccccttgaacaacgccttgtttaacgtttcagcaatattgctagtcatcagattgaaacgctggccagggaaatatagccttgtccaatgagccatccctacgtcgtgtagatactttatgcaaagggggttaatggcattaatctgattataaagcgttttaaactttccactcgtaaactcatatccagcgtttttcactaactgcgtcaatcctctgttcttgaaccttgcttgtatattcctacataggtgaataatacatgcaccatgatgtgcttgcggaaataccttcttcacccctacctttatcgattcgtgcctatctgataatatagtgagtgtgttgctgtcagctattatccgctccaactttgtaaagaaccaagttcatgcatcatcattctcgctatccaccacagcaaatgcgagtggatacacttggaagtttgcatcttgaccacttgttgtgagtaaaatgcccttgtgctttcctttcaaatgtgatccatccacaaccaatacccttctcaaatgcttaaaaccttgtattgaagccccaaaagctaaaaacatatacaaaaacctctcttttctttcatcttcaatatctggttctgtttctatatgtgttatagttctcggatttgttaactttagaagatgcaaatattcagccaaattgctgtaagactcttcatcactcccggccacatctgttaaagctgattccctacctctctaacactttgtgtatgacgcaaaaaccctcaaatcttctagtacaagttgctcaagatccagcgggacaagaccatttgaaggttcactgtattttgccttaaatacatatgcatttacctttgatgttgccttcttcatgtattgcttcctagtctctaccaaacatgtgtgttgaagattggctttcttaattacatagtaacctttgtcattcattagagtcgctaatattctccaatcacatttctcatgtgagcaactaagaacaaaataattccactttgttcttgtttgcttgaaataaaacacattctttattgcatatatagccaatcctatttggcaatcgtctttgcttgcatacactattccctggtatatccttttaccatcatcatcaatgtccaaatcagataagttatctacttcatactcgatgtcctcaaacaaaggtgggatgtcaaactcctcgtcatccacttcctctaactttctgacccccttcttcagtccctgagagcttccaactcgaccaaccatcttatctttcataacatgttctttcttttttgcatgctctgtctttatccctgctccagccccattgacatatacaacgtggtcaaagactccgctgccagtacacaaaactacttcatcccgattggtgcccccaaccttattgttagacccgtaccttacatctaaacctcctgttgccatcaactcctcaacattggagccaccataatcatctgttaagaaatttgaccaaaactccttatcataaccgccacagggcatactatcttcaggtttttccatgactgcttcaacttcctctgtatcgttatcaacgaaaaataacttttcaacatcattgttaaaaccttcgttatcagtatcattccgtgacgatttatgcccactgttacttcctatgtttgcttctgcttgttccaattcctccatgaattcgtcatcacgaggggtcaacacaattgtaggagtttttgaacccacagacgatatatcgcgaacagatgtgacaccacttttaggcgtttttgaaccacactcttcctccaaactgctttgatgcggtcgtttagtgctactatctccacactgctttgtaaatcttcctccatttcttcaaacttcacaaacaaattaagacctctgttttctctaagtgcacttagataatacagaaggccaacctcgcttgtaaccaaaactggaggagtcttctcctttgttgtgaacatatccaaaaccggcttaactaatttattgaccaaaccgaacagtcatctatacacaagtatactacaaatcatcaattgtacatgttttttttcttgtcttattggccattagattttaccat

SEQ ID NO: 16323 - DNA, 336 bp, Arabidopsis thaliana landsberg
  unsure (1)..(336): unsure at all n locations
agatagctatccaggggttgagctcaactcccttgttgaagctaagctagaacttccttctctttatattggggatacctacaatgttaggaatctgataaaggggttgaaaaatgttcagattctgcgcttaggagctgttgacacgatgcacgtaagtgctctccactgagatattaaaataaaaaatctttctatacattagaatgtttattgaagttatgactgactagttttttttttttttttcaattctgttccagctgttttgggtcttcagggaagcagtcccagggtttgagaacctgtttcatttatcagntagtactcatgacg

SEQ ID NO: 16324 - DNA, 1156 bp, Arabidopsis thaliana landsberg
ttggtgctttattgaataatctccatatcgaaaggccggggacctacatcaggtttagttcatatgcttttggttcgtcaaccttcaccaaaaggcagggggcatatgttgagctctaaaaagagcagtgcggacggtccgcccccgaagtcggacggtccgcggtggtggcgcggacggtccgcacgtgcgcagagtcggttagggttcctagtttctcacgggatttgttacctaaaaccgcgggattaactcgggaaacagtttgaagcggatccagacctccccctttatatagatgacgggctacggccaattgaaccccccaacgatcgatcaaatcaagtctatttctcatttttaccttatgcattaggagtagctctagtttagttctagtttagtattccaatccccaaattctccgcttctctttgactctacatcgattagaggagtctaggtcggcctgccgagcctagacaacccctaggatctctcctccccgacggggttcctcccgggagcaagatccaggcaccaccggcgaccttcgccgcccctgcgcacacgcggaccgtccgaccctagggcgcggatcgtccgacacgtcaggcagggaaccctagccctacgctagaccgcggaccgtccgacccctggccgcggatcgtccgtgcttgtgcagagagcaccactgtcggttcttgttagtgtttggcgcctgaaaaaggcgtcaacatacttttggcgactccgctggggcaacacatatagacctatcaaatcggccctcaatggccggttcaaaagatagctctgagtttccaccagcaatatcatcacaccgacatgggaagcttgccggctgaagaacagctcctgttcgaggagcgccaggagcagctgatccaagaagcaaaggcgaagttccttgctgacttcaaagtggacaggaacaacaaagtcgttcggcaacgggcgacagatctgcgttcgctccgacctactacgattaccccaaatgtaagtagcaccaacgaactccaatctcttaaagcttacatagacgaacagcgagaacagatgcaaaatatcataggggttatgcaaaacgattgtaggagactagtacgtgcatttgataaatctagta

SEQ ID NO: 16325 - DNA, 151 bp, Arabidopsis thaliana landsberg
gggggaaacgcgggggtatctacccagaggaaaaaaaaagggttctattttttctcaccgactctctcccgagaaaaccgagaactttcctcttactacgccgattgttccctgtcctccgctgattgttccctctacgtcgcgccgattt

SEQ ID NO: 16326 - DNA, 592 bp, Arabidopsis thaliana landsberg
  unsure (1)..(592): unsure at all n locations
tcaatgttctagaatcttacactggaacaaaatagaaacaaaagaagtattatagtagaaattaacatgntgttcactaacttgactactataaatgattataaattaacactttatgtagcattcgacagttctgtttatagaagaggagactcacttaagtctttaatatcatgtttgcatatgttgtagtcttttgtttttaacatctttggattgacacggtctattttatagccaatatctattatgcaaggtaacgcgatttagttgagtcaaactctggtggaaaaagtggaatcaaatggacttaaccacaagagtaaaggcatatttcctgcaagatatatgtagtcttaaatctataatttagcaatataaaaaaggacaatttttaaatatgatacttaagtttttgtttatttctttaaaaataccacttaatgtttggtttcttaaaataacataaaacttaaatttaacttccaacattcaaaattaaattctagactttaaacactaaaccctaacccctaagaacagtatcttaaaattaaaatggtcaattcaaactttaattttttaattctga

SEQ ID NO: 16327 - DNA, 1699 bp, Arabidopsis thaliana landsberg
tattgattaatcaaaaaaaatcacatatatatatatatatatatatgcaaatgttagagtaaatttctttgttctcaccttgttttggagaaattatatatatatatatatttccctggacacttcttcttaaaacgtggaaaaaaaatgtaagaaaagcacattacagaaagaaaaaataatgtataatgagacttaagaagaagaaaaatgatttaatacaaattatctttggaataaaaaaaaaataataaacctttttttgaaatgaagtttctgaatgcgttgcgtgcaatgaaagagacctagctagtgaaatgacatattggtttccttataaatacattgttcacaaatatcgaattagtctctttttcagttaattcgctgctactaacgtcacacgctgcgatggttctactctctaaatttccggcggcttctaatggcgacgatccaaacgagaatcctcaagaagaagtagagaatcatcctccgattcctcgacaaatcccacaagcactcatcgcaagcatcgtcgcactcatcccaagatgtcattacccatcgctatccctcgtctccagagcctttcgtcacttaatcacttcgcaggagctctacgtagcacgctcgaacctcggcttcaccgaaccggttctttatgccttaatcgcattccaagcgtatactcccccaagctggttctttcttcgtcagagcaacatcgctttacaattacacagaatccgttcatttcctataatgttatctggagcagctgtggtcacaatcggctacaagatgtatgtaatgggtggttacatcggattatcctgaatcgtcgagagtgattgtcatcgactgcagattccatacttggaagtctctcccggatatgcaaagggctcgttgccatgcagccgccggagtaattgacggaaggatttatgtgatcgggggacgcgagccacaagatgctgattgggttgaagtgtttgatgtgacgactgagagctgggaaactgtgcctactcaatgccctaacgaggctagtgagaatggactgtttgttacatatgcggtgatgcagggcaggattttcattttggatcttgggcgtgtttttgcttacgaaccaagacaaggtttatggcagtcattgggagttatatgtcagttgatgagattttggggctcgtcttcttgtgtggtcggagatttgttgtatacacttgatcctacgtgttcttttggacatccgatagtggtatataatccgaatgaattggtttggagacctgtgtttggtatatttatgattgatttgcccgttctcagtttctatggatctaagatggcgaattttggtggcaagttggtgattttgagcggctattcttcttggtggttatttggtgcatagagattgcgttggagacacgtcccggaggtcatatttggggggtggttgaatcagtctcgcgtgtgtttagaaacgtgatcatgttgccttccattaagctttgtcgaactgttatagtttgatcacacgccggcaggtatgtttttctgatgagcctggactattgatgtcaatcattataatgtttcgtatattttctaaaacatcaaaaatcagttacacgttcacgatcttgcacgtgaaggttcttattatccactagtttgaacagcg

SEQ ID NO: 16328 - DNA, 804 bp, Arabidopsis thaliana landsberg
acatcgtactaggacatcaattatcttagatacaagctcaggtgcatctttgcagaacagtggaagcttgcggatggcttgaactcgtacctacaaataagaagaacatgataagttttcaaggaaagaacaatatcacacaaccaagaaactgagaattgtgcagaatcaggctgtatcctcttggaaataagaaaaaattggccccgattccagtctcctttcaaagtcatgtgtcactccaaaacaaacagttaagaacaacacacacagaatttttttttaaaaaacttcttttgattctgctgtttgaaagagaatccagcttatctatcctaagtgaaactaagtttgagcactgaagttcccttgtggatacacaagcgcaactaaatctaccatgtccttgtagataattagcctatgtgaaaaagactatgtacataccgtaagattcacatccactgcctcgattatatctttgtacgcatcaaaagcttggtttgagtgactggtgtagaactggaagtaccgaggaatcagatccgctccaagctccttggtctcgatgctcgtcttggagaactcgataatccctaaataatctttaagattctgcaatttaagaggaacttcattgtcatataaacacagaaaacatcgaatctctttgggattgttactctgacctaaacaaagatgaataacacaataacacagaatttcccgtacagaaaacacaacctgagacttttcagtagactctctaagtcgcttctcaaaatctttaagcttctccatgta

SEQ ID NO: 16329 - DNA, 1477 bp, Arabidopsis thaliana landsberg
aatcttttgggtcatgtttaatagagtgttcaacctgtttcgaagctccatttttaatacctttaagctttaaactaactgtttgtgaatatgtaagtttcttcagttgtaaatcttgcaactcagtttctttataaaaagtagggaaatttgcaaatctaacaaaaaaaaaaattataattaaaaaagtagcatcaaaacaaaaaagagatcatattctctatattttgtgtattattcacaatttttcccccttcctctctttctctcctatgctccctctctccttccctctctctcgttctctctctctccctccctctctccctctctctctccctccctctctccctctctctcttactctctctctctccctctctctcactctctctctccctctctctctctcttaatgtctcttacttctattttctatatgtactttctattctattctaacaaaaaaaatattatacataataaaatttataatataactatcacctatattattacagtaatatttttactaccaagtcatcattatccctatcactagctcactgctataaccgtattgtcgccactacaatcgtattgccgccactaccaccgtcatttttaccgttatcaccactataatcgttatcatcatcaccattgttaccgtcaatcccaccaccatcgctactgtctatgtcacagcaatagtttaccacgcttgcttgggttcccaatattgtatctcttagggtatagttttttaatggggatcatatcgttttaactcgatcatttaaatcgtgtatgttttatcttttacgattatcgtagctaatattgcaacataaactactatttcaccaccactaccaccactattactttatttaatttaaaatattttgttttatattaaaattaaaactgaattacgaatgatttatgaaaatagtatagtacaacattctatttctatacatcataaatagtacaatataaatttacttacaaatattttttactattttataaatacaaatccgattttaaaaatttaaactatgttgtatgtagaaaaaaacagaaatttttatctaataaatttcataattagaatctattttttggaaaagatatataacaaaaacatacaaataggtgaaaactaaatgaagtgttactaaatcatctctcatcaactattccacaccaaaattgtcttttcccaacccttatatgctattttcttaatttatatgtatatgatactatattcttaattaagttatcaaatatggctagttttgcaattgaccctttagtttgtcttataattttttttctgtaataatattttgatttataaaaaataatcaatcaaaacaaaatcgtatattttccgtcaaaaaaataaaaaataaaaaatcgtatattcattttaatagctaaaaacaaatcacgaaaagtgaac

SEQ ID NO: 16330 - DNA, 2208 bp, Arabidopsis thaliana landsberg
cgtgttaacggctgaactgacgatgatgccaaacctcggtcgatcacaaaatccagcaaaataagctggattgtgatgacttgaagaacctccctctctctcagaagtattagagagagaagaaagagagaggttcgccatctctagcgaatgtgtatcccttctaaattctgtaataaagtaatttaagatgaaataacaaaaacaaaatgcatcataattacttttttttggtttccggcaaagtacggcttgtttctctcgtgcgagcttttgttagcatttgtggctatttcttttcagtttttcttctcttttccttttgcagatgtcgttagatgcaaaatctgagggataattccaagatttctgaattttcatctgctcgatcttgattcttgaggagagtaaatcttcataccgtctagtggccatctaatcggctatggatgttggtttctctttgagcttgtgaatcgtgaaggttggatttcgtgtttgtttgagaccaaattagccaagcaacgtatagcgactaaatcaacatctcatcttctgcgcagattccggatgtttaatagatttgaagattcaaggacatcggttttctaccttctcaaaaacgctgcaaatggatctggtgaaatacggagtatgaagctgacatatgttggaatcaagtgctgaaaagggtgattttcctcactgaattttttttgaacctgaccggctttttcagttttggtggcaagacaacgaagagtcggttgtgttccaccacacctttgtgcaataacacgtggttaacacgtgtctcattttaaacctatgctttgaatggaggctgattttcgattcagtttttagatttagattttagtttctagattttagtttttagttttagatttttgttattatatttttgttttaaaaacccaaaaaaattggtttttagtttttgagaaaaataacgttgatggagtaaaaactagattccctaaattttaggaaaactaaaaaactaaaatcatgaatgaaaaagtacaacaaaatagtttttataaattgtagggaaaccaaaattttaaaattttgattggtatgaaaataattttttgaaaaacaaaatccaaaaactcttacaaaaactacaacaaaacattcaaggccctagtcttaatttgctgtatttattgtatgggtttagtttggacttatataatggggtttgggctccgcaaattttacctatacttctcttataatttgccattttgggttagtaatcaaagaaattgtcgacaaaaaaaaatacatcaaaattactcctaaagtttatatattatacaaaatttctaagtattacattaacattaattctgcaaaagagcagattaattcttattagggatgtttaatccaatctgaaccaaatcaaaataatcggtactaaaaaacgaacataattgaatcttgaatcataatttaaaggttactttgacaaaaaaaaattaataaggtttagttataatcattttatatatataatctaatccggactaaataataattattgatagaaactcgagttttcagagaaaaaattaagaaatcataggttaaataaccttaatccaaaccaaaacgcttcataatatgattggtaaacccacaatttgggttggacatcccatttctactaagtttaataacaagaataccgccctcaaaccaaaatggtactaattgtccgaaaatctatattgtttcagaaccgaaattcagattaaactcgtaaattctagtttcaataacaaaaattatacgtttgcatcattgcctcatcaccatttcaatagattcactaggtaaaattgataaaacttgtaattcttaacagaaattagaaaaactttgtaaattttgttggagtaagcttgaagataatgacttgagttataagttatttaaatataggattagattaaatcttaaggagatatcttcggagataagttaggagttatctaaccctaatcctattgtgatttggttttgaatctctatatatatgagtcgcaaagttgtggtgaaccatatgagtttagagagattaagactttgagattgtttaggtttgagtaattttttaagcttaataagagagtaattcttatatctttgagttcttaatctgtttaaaac

SEQ ID NO: 16331 - DNA, 3160 bp, Arabidopsis thaliana landsberg
  unsure (1)..(3160): unsure at all n locations
acccagagagagttaaaggtaatgtatgaaggcgatcgtaatgtctcttatcttatttctcccttggaggttttgggtgcaatctcattgcttatatagtctaagggattaggttaagcctctaaacatttgaacctattagagagctttagaccttgacttggacagctggatttactttcacttttaggaaattgccttgaagctttcttctcacctttaacaagtttgtcttcttcttgttttgcaggtgaacgttgcagttgattgggctctggttttgtcttgggcttccagactgcttctgttatgtcattgggccttgtcttctgatttggcccaaagctgggtttactcaatatgctgtcgtttggagttgagtccaaaggtcttttgtcagcttcttgagttagggttgttgactgtacttcttcattctcagtcgaatcttcttccttctcagcttctccattgatagtccccctcaaacttggagtgggtggaacatctacgccaagtttgaaccggagtgaagcaaacggcgcaagaggaagagatttggtgaagatatctgcaagctgcaagtaatttgggatgtgagagactcgcagcgttcctaaagccacttgttctcttacatagtgaaaatgattcgcgaaatgtttgctgcgcttgtggaaggtcggattcgcagtgagatagacagccgataggttgtcacaatagagctccggcgtttgatgaagagggatcacaagttctttcaagatcttgcacaaccaggtaatttctgatgctgcctatgacatagatctgtattccgcttctgtagagcttttagccactgttggttgtttctgtgattgccaggaaatgatgttgtttcctagaaaagtgcagaatcctccagtagatctactagtttcctgacagcctgcatgatcactgtcgctatatgcccgcaaggtacaatctgtatctttattaaacgatattcccatagtagtagtacctttaatgtatctgatgatccttttcaggagattgaagtcagacacagtgggcatatgcatcttttggcacacgaaattcaccgcaaattgaatatctggccttgtaagtgtaagatattgcagctttccagctaaacttctaaagtaggtaggattctaaaatgtttcatcctgttttgataccttgtttagctgcagaggtagaggagtaggcataggagcacaatccagcatgccagcaacagccagaagatcctctacatacttttgttgggagagaaacagtcctccttcatggaactgtgcttgtattcccaggaagtagttcagcctacccatgtctttcattctgaagtgcttgttgaggttcagaaggagagtacctaaggtttctgagttgtttgcagtgatagccatgtcgtcaacataaagcaagagcatgatgatgtctttgcctttcgtgtaaatgaaaagagatggatctgacatactgcaaatgaatccaaactccaacagataagtgctgaacttatcaaaccaagctctaggtgattgttttaatccatataatgacttgtgtaagtgacaaacatggtctggttttgcaagatcaacaaatccagctggtagcttcatgtacacagtttctgtaagatctccatgtaaaaatgcgttctttacgttcatttgcttcacttcccaattcatgatggtggcaagatgcaagactgctctcacagttgctgatctaaccacaggactgtaggtctcaaggtaatctattccctcttcttgattaaagccttgagctactaatctagcattatacttgtctaaagatccatcagctagaagctttactctgaaaacccagttggaacctaacacattcatatctggtgtaaaaggtactagagaccaggttttggtttcagaacaatttcccatttcttcaaccattgcagcagtccacttttcatcttttaaagcttcagttactgttttgggcattggatgagagactttatgagcaagcatggcataccttttatttggtttgctaatacctgccttggatcttgttaccataggatgaggtgattctgtagctgtagttgttcttgatgcaagttgctctagtctagaaggtaacagagaaacgttgatgcctataggatcaagatctaagctagccgtacactcaggacgttttccatcacttctagacctttgctccggtgttgtttcattatcttgctgaagaactgtttngtaacggatactancttattggtcctgcaatcgttagttgcatattttcagagttctcctcactcaaaccatttccaaaaataggttgattttctgacatggactcttgttgatgattctctgtagaagcagttgttccattttcttgcgtattggtttctgatgacgaagtagtggaaaaaccttgaagccaagctgcaaacaatggagttggagatgcagtctgctgattgatgtaagtgtctgcgaatgggaaagattcttcagcaaacaagacatgacgactcagataaactctgcctgttggtggatagaaacatcgatagcctttgtatttatcagtgtatcctagaaagatacatttcagagatcgcggatcaaactttgtgcgagcatagtctcgaagtgttggaaagcatgcacaaccgaaagtccttaaagccgagtagtttggaacttttccaaacaaagcttcatatggactgatcttggttgctagagctattgttggtagaaggttgctgagaaagtttgatgtaaagaaagcttcaacccaatatttctgtggtgtcttgctttgaaacattagagtgagtcccatctctgtcaactgtctatgttttctttcagccatgccattttgttgaggtgtgtgaggacatgacatataatgttgtatgcctgaatcttgtaactgcttgagaaacctttgactaataaattcttcttctcctccatcactctgaaaagctctaattttcgtttgtaaagaaggtcaacaaaacgctaaatcttgatgaatattgagcagaaatctgatttcctttttaatggattgaaccaactaagtttttgatagattatcaattaaagat

SEQ ID NO: 16332 - DNA, 576 bp, Arabidopsis thaliana landsberg
ttttaaaatgagttgaagtgtcaaatctatattacgtgaaaacattgccgaacttcgaacacctcaagacttacggaccaattaaggacgggatgcctaggcgcggttagtttccgacgtttttaaaatttaacacttaaactaataattaacaaataatagtgaaatatacatggttttagttaaaagttatgaattgtttatcttaaattttaagttttaaattgtttctaaatttttagtgaaaactattattatttaattataattttactaaaaatatattttttagagaaaagaaaaaataattgaagaaaagtaataccttgttggattttgtagcaaagaaagcccaatgaaaaaagcccattcgaagaccaccgtgaactcgtctgaaaagcccttagttgctgctgcgtctttgttgcaactcctccgaaattctccgtcttcttcattcgtttttgactcttctctatacttgtcgtctcctatcatcgcaattcatcttcccccgtttggtgtgttaaaccggagaaatttggagtttcgccggaatcttcctctgtctattgt

SEQ ID NO: 16333 - DNA, 1736 bp, Arabidopsis thaliana landsberg
cggttctccctttgcccttgtgaattgcgtatgttgtgatataagtttccaagacatgatttatcattcttttacttacaaagtgagtatgcatcctgtttgtgcgatgaaaccagtaccctcttttatagaccacacaacagacatccccaccctctactttttcccctagcaaagctttcttaccttgcaatgtttgcggcctgattaaagaatctattctcacctatgtttgtgttccatgtgactttgtagtccatcaagattgtatctatttcccgcatatcataaaaatttctcgtcaccaccaccatatcatttttacctcttctcttccatctgcaaaatggtcttgcggagtctgtcgtggagaggttgacaatcattatggtgcttactcttgcatcaagtgtggtgattattttgttcatacaagatgtgcattgagaaaagacgtgtggaatggagaagatctcgagggaatacctgaagagcctgagatggatgttgagccatacgagatgatagccgatggaattatactccatttttctcatgaccatcatctaaaactcgagatcggtagagtttacgatgaaaacaagttttgtcaagcgtgcatccttccaatctatgaggctacttactattcatgtatggatacatgtgacttcatcctacacgaagcatgcaccaatgcccctcgaaagaaacaccatccgttgcatcctcacccgcttacgcttaaggtcgtcagtattggatacgatcattacagaagaagaggaaattactttgaatgtcgtgcttgtaggcgtcaaagttgtggttttgtctatgatagtcagggtttctcacttgatttgtggtgtgcctcggtttccgaaccatttgaatatcaaggccacgagcatcccttattcctagccttagaaccagatgaagaaaaagcgacgatatgtcaaatctgccaagaagatggtgatggaaataactatattagaaaactaaattgcatggaatgcaagtacattatatgtttcaggtgtgctaccttgccatacaaggcaaagtacaagcacgacaaacattttctcacattccgggaaggggaagaaggaagtgatcaattagactggtgtgaggtctgcgcaagaaacatagtatactcacgaaaagatgggttctatgcgtgtgatgactgctgcaccactcttcatgttcattgtttgcttggagaagacatgtatatgttgaaacctagtcacaccataacgtatattaagagggaggttcatatccttcccaacaatacccggtctcgaccattctgccatcatcatgatgaagaccgttgtccacacaaagtagttttcaaatggcaggaccagtacacgatattttgttcttaccgttgtttgacaaagtaaaatgtcttcgtcgaaacgctttgtaatcttcattccttgtacacgttttgtaatattattcttctatcaataacgctttgtaatgtattcgacatatgtaccttttaatgttattttgtctcaatctcatagttttgtttgtttaattcgtattggccattaattctatatggactatatatatgttttgaaaatacgcatttgataaagagatggttttgctctactaaagggttttggactccacaatgatgttcttgttacagggccattaatacttcgagatcggacggttctccctaaacg

SEQ ID NO: 16334 - DNA, 1394 bp, Arabidopsis thaliana landsberg
taatatctatggttaatgaggccaaatctctcttaattatttttagagagtttctaactaatttggaaacgtgaaggaaaaacagttttgtggttgacaattgatccacggttataacaaagagtgattccgatgattctttgcaaaatgataaagacggactgaattaggaataggatcaggtccggagaattttcttttttgattttgtttggattgtgtatgtttcgatgaaatttaagagatagggaagtccgaaacattcattattcacgtttgaccaactttcctttccaaaatactgtggccgaagccaaactcaaagtccaattaaagagtccgattcgagatacttactgagaaataagcagtgaatctaaaggagaaactggatgatggaattataaaagtaagaaacacatgttgaaacaattgtcttggaatcatacgaggatccttgtctacaactgttacaataaaattgaaacagaaaagagcagaaactacattatcggttctacaaccacaaatcatcatcatcttcttcattcttattcgctagtggctgatatgaaggcacttccaggttgacggttagccaatggaccatggtttgatagaaactacaacaacaacaacaaaaacacacaatctagttcagaatcaaccaaaccctaaacactataagctcaaaaattgtgtgtgaaaatagacaaaccttagcattgacaccatcaggcacaatcctcttcatcgctctcagcttcgtgtactcagcacggttgaatttagtgaatcccctgaaaacaccaatgatatatttagtaatttcctcaaacatcaaacagagacttacaaaaacgaaacataccatttcctgctaacaatgatcttttgacgaccagggaacttaaacttagctctacgaagagcttcctgagcatgaactccatgattatccttacacctaacagacaaaagaacctgtccaatcgcaactctagcacaagtaccaagagctttaccaaaagcacctctcattccagtctgaagcctatcagctccagcacacgaaagcatcttgttaatcctgagaacatggaaaggatgaaccctaatcctcaaatgaaaagcatctttcccagcagatttcaccatatacttgttgcaagcaatacgtactgcttcaagtgcttcacttgacacattctctttctcccatgaaaccaaatgaacacagattggaaactcatcaacacctttcctcttcataccaacatcgtacatcctgattttgggatctggcacaccacgacagtagcgagactctgggtatggcttacccttgatctgacggtgacacctcgcaggtcctaaatcaacattcagattat

SEQ ID NO: 16335 - DNA, 754 bp, Arabidopsis thaliana landsberg
acacatcgtgtgggttatcggtatcatatattattctacctattttattttattgaacaatgtgtctttaaaaatgaataagtacataattttttagacttatattttgaaattttgtctatattaatacttactatatatgaattgaacttgttaaatattgtattgacttttgtagtggtaagaagaaacaataaaaatccataaaaacaataacttggtttagcttttggttatgtatgtaagggggttactaaaagtaaaaacactgggtttgggctgggttcagtaactctcatacaatatccataaaaactttgggctgggctcattcaaaatccatacttattttattactttcctaattaaaaaaaatacacatagcacaagaaaaaccaccgcccaagcttctctagaacctctccatcgttctcactatcactcccccccccccccgcccaaatataaaccctaattttcacaatcacagtaccaaaaaaaaatggcagccgccgcaccgccaccgccaccaacagcagcaccggaaccaaacatggtagcaccactaatttcaccaatcggccacccaatgttctcccggatccgtctggcaacaccgtccgatgtcccattcatccacaaactaattcaccaaatggcagtcttcgaacgtctcacgcatctcttttccgccaccgaatcaggtctcgcttcaacactcttcacctgttggactttccaatcattcacagtc

SEQ ID NO: 16336 - DNA, 1208 bp, Arabidopsis thaliana landsberg
ctctgatcatgtactgattacacatgagactttacactatctaataatgtcaggagcaaaggttaagtgttttatggcggtatagaccgacatgagcaaggcgtatgacagattagagtggggttctattcaagaggttttggctcacatgggctctcatgaaaaatgggtcagatggattatgcaatgtgtgtctacagtctcgtattcttacctcttgaatggaacagctaaaggttttgtaaagcctgggaaagggattaggcaaggggatcccctctccccttatttgttcatcctctacagtgaagttttgtctggcctctgtaaatctgctcaagatcgaggaaagttattaggcattagagtggcaaaaggaagccctagagtaaaccacttactatttgcagatgataccatgttcttttgtaagtgtgatcctcagagttgtagagaactattaggaatcctacaaaaatatgagcaggagtcgggtcagataataaatgaacagaagtctgccattactttttcctcaaaaactttgatggaaactagagaaagagtgaaacgagagtttaagattacaaaagaaggtggccaaggcaagtatttaggcttacctgaattgtttggaaggaaaaagagggatcttttcactagcatagtggatagaattaacagaggggtctaagctggtcttcaagcttctgtcagcagcagggaagcttgtaatgttgaagtcagtccttgcggctatgcctacctatacaatgacttgttttaagctgccagcaaacctttgtaaacgtattcaatcagcccttaccagattttggtgggactcaaacccggagaagagaaagatgtcttggatttcctggaaaaaactttataaatcacttaaagatggtggtcttggtttacgagatatcactaagtttaacgatgctttgctagctaaggtaagttggagaatccttaccaagccggagtgtcttctcagccgggtccttctagggaaatactgtcatacgtctagcttcctcaactgcactgtttcttcgtcttcttcccatggctggcggagcatctgttgtgggagagatctgcttagaaccaatcttgaaaaagttgtgggaaatggagagcatatctcgctttggaatgatccctggctttctcttactactcctttgagtccaatg

SEQ ID NO: 16337 - DNA, 2468 bp, Arabidopsis thaliana landsberg
atacagaattacatttaatatttatgtaacacatactgttttcttattttaaaaatgttttatttgtcggagatatgggtggctttgcattaaaaatttgatatgaatagatgaaaacttgctaattaagaagcactctattgatcgatttaaggctttatttgtgagcattacttttacgtaattcacgacaagactgcttcatttgctaaggtaacgtgtcaattcagcttaaaatatcttttccttattctgttaagaagaagctgctataattttcggtacaaattgtgaacatgtgacacaaactaatttttcgattatatctttcagttacactaatcggtcaagtcatatgtctatttttatcattaggcgctgcacgttttaggtcactatatatagttctaaaggttattcgttactttataccacggcttttgctaagcctctagacaagcaactagctacagagcactttcataagctattcacccctttttttccagagtttcatcagagatttcaataacagtgaaaagatcttttctaactcttttctttattaatttgttaatgctttattattcattcatgttgtttgtttcatccatcatgtctgagtagtctgcttgttagggtaaatgtttctcactagggattcatatggtttagtagattgcccccttgttaggttatctgtaagattcttcctctttagttgttcttaatgctagttctagagtaattaactagaacttgattacagataatagatatccccaccataggtatatgttactagaactactatttgatgagcctgttttataggggtgtaataagaatcggcctatctactaaggtgaacttatcgaactcgtttagcatgcatgtttaggtataggatttcacggtacatcaagaggaatcttagctctaggcataatgagtatcacggaatatcactagttattgtgtaataagagtttgagtttaaggacggttcgataacaacctagctatccctatatctactaatcatttgttttttgagaattttctgagaataccctaaacctagcattttattatcttgatttacaaccaaccaacctgctatttgcttactttgcttcctttttatttttcttatactcttctaccttaatcttgatacttagctcactatgtgaacaaaagaattttgtggaatttgacccttaaatactatcgacggtctcttatttgagagagtggttttaaggcaatttaacctatattaaatttggcgccattgccaaagttcttaagaatcaccattaagcttagtttagatatttcgtctagatttttatttttattttgatacatacgcgttccttgttttttttcttttctgtgtttcaggtgtatgcctaggctcgcaagaagcactaaatagatggaccacatcaacttatttgtgcttgatttgggaatactagaacgcactaaccgcaaaactcacaaaatagcaatgcctgacagagtcattatagctgatgagcaaggagttttgagggatgaagatgggcaatcctacaatttggctggtcagagattggatgatcatggactcatccaccctgaagacgtcaatgaagaacaagcgcgcctcatcgcgtaggtggctgctagaaacattgtagggctcggtgtcgagcgaaaccaactgggtgtcgatcgacaaccacgggatcagatcgaagaagagttcggtgtcgagcgacaccacctaggtgtcgatcaacaccacgtgggtgtcgatcaacaccaatcacagatcctaccgcacctaatccaccagctgttgaaccatgtcgtactcttagggattttaacaggccagacctgttctatgccaacgagttagcgatcgtacccccaccctttaagatgaacgactattagctgaagcctggctacttcgcactagtaggccagcaccctttccaaggcttatctcacgaacagctaatggaccacatcgagcgttttgaagaccttgttctgagcattaaggctaatggaaaatctctgaggacgacttactatgcaagcttttcccctagtcacttgttggggaagatacttcttggttgaagcaattgaaggctggttcacttaaaacttggaggagcatcaagatagccttccttaacagctcctatgatgatgcgaagtctgaggagctgtgaaacaagctgtctaccttcactcaaggtcggacagaagctttcaaagcagcttaggttcgcttcaaggaatatcaacaggactgcccgcatcatggcttcattgacgtacaacttctcagtaccttcttaagatgagttgattagagatatcagatggctcttgatttcagcgagcaatgggaacttcaacacacgctaccggacatatgatacaactttgattgagaa

SEQ ID NO: 16338 - DNA, 2294 bp, Arabidopsis thaliana landsberg
  unsure (1)..(2294): unsure at all n locations
tgttttttgtttttttcctctggtcttttaaaacgaaaagcacaactttcaagttccactactaattgtcacgttacagatatgacatcactactttgatttgagtaaaattttctctataaataaaagaacaaacaaaccataagccaaatcctcgcacaagtagaaaaaaacacaaacatcctgaaactagaagagagagacaaaatgttatacttcatccttctccctcttctatttcttgtaataagttacaaatttctctactccnnnnnnnnnnnnnnnnnnnnnnctccaggaccaccgtcacgacccttcgtcggccatctccacctcatgaaaccgccgatccaccgtctcctccaacgctactccaaccaatacggcccaatcttttccctccgtttcggctcccgacgcgtcgtggtcataacatccccttctctcgcccaagaatccttcaccggccaaaacgacatcgttctctccagccggccgctccaactcaccgccaaatacgtcgcatacaaccacacaaccgttggtacagctccttacggcgaccactggcgtaacctccgccgcatttgctcccaagagattctctcctctcaccgtctcatcaacttccaacacatccgcaaagacgagatcttacggatgctcacacgcctctcacgttacacacaaacctccaacgaaagcaacgatttcactcacatcgagctagaaccgctcttatctgatctaacattcaacaacatagtaagaatggttacagggaagagatattacggcgacgacgtcaacaacaaagaagaagcagagctattcaagaagctagtctacgatatcgccatgtatagcggcgctaatcattccgctgattacttaccaatactaaaactattcggaaacaaattcgagaaagaagttaaagctataggcaaatcaatggatgatattttgcagcgtttgttagatgaatgtagaagagataaagaaggtaacacaatggtcaatcatttgatctctctacaacaacaacaacctgagtattacactgacgttatcatcaaaggccttatgatggtaaaattctataaacttctgtgagatttcaatgaagtgaattgtgagattcgattttaacctgattgtttttgaaattgtgaagtcgatgatgctcgccggaactgagacctccgctgtgacattagagtgggcgatggcgaatctactgagaaatccagaagtactggagaaggcgagatcggagatcgatgagaagatcggaaaagatcgactaatcgacgaatcagacatcgcagtgcttccttacctccaaaacgtcgtctccgaaacattccggctatttccggtggcgccgtttctaatccctcgatcaccgacggacgacatgaaaatcggaggttacgacgtcccgcgagatacgatagtgatggttaacgcttgggctatacatagagatccggagatttggcaggagccagagaagtttaatccagatcgatataatgacggatgcggaagcgattactatgtttacaagctgatgccgtttgggaatggccggagaacttgtcccggcgccggattaggtcagaggattgtgacattggcgcttggatcgttgattcaatgctttgaatgggagaatgtgaaaggggaagagatggatatgtctgagagtactgggttgggtatgcgtaagatggatcctttacgggccatgtgtaggcctaggcccattatgtcaaagcttttactctaataagatgagtagaggttaaaaaagaaaaaataacttattggatgtaactggtaattatctttaagataaagatgaataaaatgaatctttgcctcataaataacaaataaataatagataatttagattctttttattgttaactaaattatctccataaaatactttttatatatatatataatttattccagtaaaattgagtttaggatgttattttactaagatgcagttttcttatacaaacgatttcaaagcttattttccgatataaaaattaattttgcttaaatcctcaagaatttttttattccactgacgaaatttccaggcttcaaatctcgctgaaatgaaaaataaagttagcaataagcaaataatcagtttaaaatacgtatcagaataataaaataacatgattttaaactaactagcattttctataagatactaaaaatgttagcaattgcgttttaacgaatggataaattttcatttt

SEQ ID NO: 16339 - DNA, 1902 bp, Arabidopsis thaliana landsberg
  unsure (1)..(1902): unsure at all n locations
ctcagttgatatgcaaagagccctggtcaaaccatttcaaacattttagcgtaatagctcattggtctagtgccatggcaccaaaaatgtatatatatatatatatatatatatatttttaaccccgtattgacattagtaacaaaacaaataatacaatcattaaatatgtttttaaatgatcaataaataatagtttggaaactgaccattacagagcctggtggttgggactgaatagcgagataggttggaccaccaccacgaccaatgcttcctcctcgtccatgaaataatgttattttgattccaaattcattacaagcagcaacaacattttcttgagctttgtagagttcccatgctgcagtaaaacgtccagcatcttttccagaatcagagtatccaaccatcacctacaagtaacattgttacaagttcttagaacctcccttcaaaattaacatgtttaaattcacgtgtaacgtacctcttggtgaccgttgtggttcttttggatgtgttccctataccaatcgattgagagcaatttccttatcgaaggaccagcggctcttaaatcattcaccgtttcaaaaagaggtaccactcgtagcctattcaaataaatagatagtagtaagagatcttaagactactaaaaatgttactcatgtatgtacttataaagtgattgctataaacaatgtaatatcttggtggagatttgaactcacgttccaccaggacatggttttccatgttcgctagttaaagcaagtcgagcatctttttgaagaagttccacagcgaggacatcacttgcctgcaagtaacaaacaaatctatgtcattgttttgttttaatgaaaatgtttaaagtcgtcatgcataagagaaatcatacatttgaagccatagaaataacgtaagcgccaagtgattcacttccaagttcagcagcgactcggaatgtgtccaatacttctttgacgtcaggaccaacctacataaataaaatacagataaataaataaaatttaacaactttcataacataacattgctctttcttgtaatttacgcaatagatatttcattatgaccttaatacattgaggaacaagaggtcgtttcccttttagttctcttgtcaaaaattctaatttcttctcttcatcccattcactataagtacccatatccaagtatgttgtaattgcatccaaagcttcagaatgtcttgcagcttcctagtaattgaatcacacatattattgaattagaggaccaaagcatgaagatttaagaaaacaaactaaaatcacctggcgtaagtcgagtttcaccaaaaccattccaaaggtagaaactctacgaatcagatcagcaagtcgtccatcagctagtaccctagcacccgatgattgctgcaaaaacgaatgatgttaaattttatgattatggattattgtggtaacacaagtttcacatggaatcaagattgctaaccagagattcgtaacagaggagcaatggttcaagaagttgatctgatgtttcataggagtttttagggtcatactcacaaggaagaccctcaataagaagttcaagaagtcttcttgtcttcacaagctatgatcataaatcattaaatttgaaaatctgttggttttgacatgctaaatctgaatctttatattatctttgattgaaaagcttatgatctttaccttttcttttacttctccaagaacaatacgataaggagcacttccagctcgtttaagtggaggtggttctagtagcttttggaactagtcttcccaacctgagattcctcanatagttttctctggagaagagttgagaagtagatgagaaagacctcgagagtag

SEQ ID NO: 16340 - DNA, 511 bp, Arabidopsis thaliana landsberg
tattgttaaatagtgaattaccaggaatcttgacaaaggcatcccaaatgcttgggccacgactgtcttgatgagtctcgccttcgacttgataagctgacgtggcggttccaaacacgaatcctttaggaaaactctgtctactgagaccaccggtgtgcaatttttttttttctgcggacagagaggattcgccggaggtgaaagaagagaggaggaggagaaggaggagaggccatggaggtgagataaggtgtctcatggcgagtgaggtttgaccgtttggtttggggaggataaaattatggggatatttataggctttttaagccttttgttttcaaaacaaataatacatgaaccaacgatgtgaaattgctatgggagtgcattagtggaaagggtggatttgttttaataaataggataaggctgtaagcattatgaatttaacattgaatactatgtaaaactagatatatttcaccaaattcggattttaaaactatat

SEQ ID NO: 16341 - DNA, 537 bp, Arabidopsis thaliana landsberg
agtctccttggggcgggaggacggtccataaatctcattataagctaattcaattttcattcgattcctgttgtatatacacagccaaaacaccagtacatatcaacaagaatgaatatcggtattgacaggacgtttttgacctaccttttcgtatggcacgaggtcaaatagaagatagtttacgctctaagatggtttccatcaaggtaagaaacagtctaacccaagtttacaccttttaatctgttatagctgctcatatactaacctgttccgtttttttgtttgcttcgattactgaaggaacgtatgggtcagttagtagatgcacaaaaagaagtatccattacttcagaagcgtcagagagggaacttgaacttgaagcacaactcgtcgaggcacgcagcattattcaagaacaggtattttaaaacatatccttctttgatttctctggtcttatgattatctctagaaacattacaaatttacaaaatcttctgatgcaggaatctataatgtccaaacattta

SEQ ID NO: 16342 - DNA, 1030 bp, Arabidopsis thaliana landsberg
gaagtaatttaggtacaacaaaaagctgttcttgaattggaaacatattaattcccaaacccttaaaagcttgaagctcaggtctgctcacactccttcagtgcaaagcccaatacaaactttgtgtggaattcttaatctccatggtcgaggacttcatgtgagagaggatccacctgttctgttacggttttccacccatctcttgcataaccgggttctagcttcctctccatatcgctacgtaatgtctgagctcatctctcaatatgcgaaaaacctagcaatcatcctcaagcatctaagcaatattacccttgctcgaacccgtgtccaagcactttctcgtgtagttctcttcgggccagtgagattcacgactttgaccacttttacaacgccacttggtctcttgacaatggctatatgttcatccattgactcgtctttggaagaattgtcgataatctttgatctcacatgtaccaaaatgctttatagcttttggctcaaagctctcaaagaactcttgtcgattaaatctatcgatccttttatctatctttttatctaccttatgttggctttgtggaatgctccttatggttgtattgttaactttgggatctctgattccctcctcctttgaacttggtttctatcttaattgaatgatatcatctctttgacaaaaaaaaaaaaagaaaaaaaaaaaaattaataataattcccaaatcccacaacacattaccagatatggaatgatgatgatgatgtgagttgttttttctgttattattttttcctactttttttccatcaattgaagttaaatacattttatgataaataattaaacaaacaaagttaaaattgtatttctttggtttatctctttggagttctaataataacagttgtttcgcaatttatttctataatgaaaaataataatatatatttccaattaatccatattgcaactcatgtgtaatagattcattgaaatatctaataaataaacaaaaat

SEQ ID NO: 16343 - DNA, 1941 bp, Arabidopsis thaliana landsberg
gagccactctcgcaatcagaatgtcttaggcacttaatcttcacaactctgttttatcttttacaaatgtcttcccttacctttggaaaatttagaactctctgatgagggaagacatcaaaaggtaagtaaagaaccattttttgcaatgctcatattttcaaacatgttttgaccatgctcattctcacgagtagaagtttatatatccattgtgactattcgttttcaccatccttgtaactcattcaattcttcatctctcgcaaaccctaatcttgctgcaaaaatttcctgaattcttcctctctcaacttttgcgtttgatctttatgtacttactttttttcgttttcaaagatgttgatgcaaatctacgcaaagactctcacagaaaagaccataaccattgacgttgtaagctccgacaccatcaataatgtcaaagcaaagatccaggacatagaagggattcctctagaacagcaaagactcatcttttccggtaaattgctagatgatggccgtactttggccgattacagtatccaaaaagattcaatactccacttggctctcaggttgagaggtggtatgcagatatttgtcaagacgcttaccggtaaaaccattaccctagaagttgagagctcagacactattgacaatgtcaaggcgaagattcaagacagggaagggatccctacggatcaacagagactaatattcgcgggtaaacagcttgaggatggtcgcactcttgcagattacaacatccaaaaggagtcgactcttcaccttgtgctgagactccgtggtgggatgcagatttttctcaagactcttaccggaaagacgaaagttttggaagttgagagctcggacacaatcgataacgtgaaggccaagattcaagatatagaagggatcccaccagaccaacatagacttatctttgcaggcaagcagctcgaagatggtcggactcttgctgattacaacgtccaggaggattccacccttcatctccttctgagattccgtggtgggatgcagattttcgtgaagacccttaccggcaaaaccattaccctagaagttgagagctctgatacaatcgataacctgaaggccaagattcaggacaaagaagggatcccaccagaccaacagagactcatctttgcaggaaagcagctcgaagatggtcggactcttgcagattacaacatccaaaaggagtcaacacttcaccttgtgctgcgtcttcgtggtgggatgcagattttcgtaaagactttgacgggaaagaccatcacgcttgaagtggaaagctctgatacgattgacaatgtgaaggcatagattcaggacaaggaggggattccaccagaccaacagagactcatcttcgctgggaaacagctcgaggatggtcggactttggctgtttacaacatccagaaggaatcgactcttcacttggttcttcgtcttcgtggtggaagcttctgagctttgtggtcaaaactggtgttgtacgattgagcctcgtgcacttgtgtggtgatgtctgcaaaagaagaacactttctctatcgtgttgatgtttcattttctgtttatgtttttcttgttatgaacctttcggttgggctcttaatgggcctttatgtttcaaatattaataataatccaagtgcacgttagaaaatctattattgcattcctcctaccaatgtatgtcgcatacttaactcgtcaaaatatgggattgggtctgtgggaaggtattttggccaaggatatgaatttcgtaattaagttttacttttacggttttaccattatttactatggcgaagttttctgttttagggaattatcttgaaatggccgacacagacaaataggtttgaacagaagcctaaaggctttaat

SEQ ID NO: 16344 - DNA, 3905 bp, Arabidopsis thaliana landsberg
  unsure (1)..(3905): unsure at all n locations
tgatctcgctaaaacggggcacgatgcttctgaagtttaggacgatgagttagtttttttgaaggtcattagttcttactttttggtgtatgatttttaattgttactggcctggatccatagataatcgtagtgagaatcagtagctctatcaattgttttgtatcaattgcttggaagatgattgtaactttgttttggatgaagagagttttgacataaatcttaacacttgttatctcttttgcagctcgatacactgttcgttcttttggtataagacgtaatgagaagattgcttgctatgtgactgtcaggggagagaaggcaatgcagctccttgagagtggattgaaagttaaagaatacgaactcttgagaaggaacttcagcgacactggttgctttggttttggtattcaagagcacattgatttgggtatcaagtaagtcaatccccttaaatcatcctgtcataacacttggggttcaccacattcttggtgatactcattgatctttgtttcacttcttataaaggtacgatccatcaactggaatctatggtatggacttctatgtggtcctagaacgtcctggctaccgtgtagcacgtcgcagaaggtgcaaggctcgtgttggtatccaacacagagtaactaaagacgatgcaatgaaatggttccaggtgaaatacgaaggagtcattctcaacaagtcccagaacatcactggctaaaacaattcctcctaactctttcttctgttttagaaaaccctgtctcagttttgtttacttgtctgaatcttaatctttgtactttatatgcattattggctttagtttcagttatttaagtatctaatttcgtgtgaggataagcaagataagaaaattttggcgggtagttgaagcgtgtggagacatataaatccactagctgacacgtgccacggacggctaagcacgctttcgccgatcgccgatcgccgctagattcatctcggattcctccaaataagcttccctggttcttatcttgccacgtcagcatttctccctcgtacgccttaaattcttcacaaaaataataaaaatattaattcaaataaatgttcatcttctcctacgaatgaaattgaaattaatttgagcgatcggaacaggatcgggtcggatcttttnnnnnnnnnnnnnnnnnnnnnnactttcccctgtttgtacggatcttttgaagttccagaactcagctcttagctccagatcaggtgcgtcgccgcggttctcggcgaagaccaccggtgcttcttcatcttggtacttacctcggtacgcaggaaagaggcgaaccgattcaatcggaagattgagagttgcaactgaggatgcttcttctctttccaccggtgatgtcgccgatgattactatgccgttctcggactcgtaagaaccaaggctatttcaatccgatttgatatatgcatatagggattttgaagtgatgatttttttttttggtttaagttgtttgcttatgattgaaacttcttgtgtatcatggaaaaatactctgcatttcatatggttgtagctagattcatctttgtcgaaattgtgaagcctttgacaggttacaatcattaagatcaaagattgtgactttaataactctcctttgctatgtcaatagcttccagatgctacgcaggaggagattaagaaagcttactataactgtatgaaatcgtgccatccagacttgagtggcaatgaccccgaaaccacaaatttctgcatgttcattaacgatatctatgaggtgagttttttacttgacttccttatagatttttgtaagcgtttagtaaggtccatatgctttttcgtttaatgatttaccgttgcattgcagattctcagtgaccctgtacagcgtatggtttacgatgaaattcatgggtatacagtgactgccatcaatccttttcttgatgactccaccccaagggatcatgtttttgttgatgagtttgcttgtataggtattctttcttcaatttagaggctgcgtgctttgatgatctggaaagtgactacatttgcgtttggtgtttaacaggctgcaaaaattgtgccaatgtggctccagatatatttcaaattgaggaagactttggtagagcaagggcttgtaatcagcgtggcaacccagatttggttcagcaagcagttgaaacatggtaggtttatattctgtagatgcaactgattgttatagttacttctggtgggcaatttcagagaactgattaggagatgcttttggttttgttttcagcccggttgattgtatccatcagacttctgctgcacagttgtcattgcttgaagatgaaatgcgaagggttgaaagagtgaatgtaagacgagcatttcccttgtagctatcttgttgttcattgattagaaacagaagacattgctgaggtttcttgattgtatatttgttgctgaactgctgcatttaagctcttggaattgtcattgattgatcaggttgctctgatgctttctggaatggggtcaggagcagttgatgttttcagaatggtaagaaggaaataaaacccgctcggttcggtagctgatcaaagctgaaatgttcttagtcattttttattcccacatacaaattggcaacaatgtagcctattgttctttaattttcatctaactgataagtctttgaatcctgtttcaggcgagatctcgatgggaaaagaggcaagcaaaagttttggtatgaactttcatcacctttgaaatccttggaaaactatttgcaacataatatctaaacatcacctcgtgcttacctatgtttcagaatcaagctagaagtagaatgatgaagaggaaaaacacagatgaaacaccttcctattgggataacctctggggcaaacagaatgaataccagaaaagcggtaaaattgnnnnnnnnnnnnnnnnnnnnnnnnnnnnnnnnnnnncatacaacattacatatttactcatttcggtgtatgtcatgtgacagaggaagaagtacaagaacgagcacagcgagccgccgcagcagccaggagatggagggaatactcacgaagaggcgtggataagcgccccaccttcaaactcccagactccgcctccagaggagacaactgaaaccatagacagaaatcacttatagtttatataggtaagcaggtttcttactagattatatatctatatatgtaaatgtcatgtcgcgttctagacctgtatagctttgttctcacatcgattaaggaagaaaaaaacaagtgtatttaacgttttcgatttctgtattatactatttaaaaaaaaagtttgcaacgcctagataaaattaaaatacattagttatgtaatatgctcgtgatcattgagattgttcgtgtcaattatttccttacaaacgatttcaagagcgtatgaatgtgaacatacatacttatggtttaccccttaaagtattaattctcgatatatataggaatcctgaacaattattcacgcaagttataaatcatccacgattaataaggtttttaaatattattctacattaattaagtgaatattggtctgtgaaaagtatagaacgcaacgatgaaattacaaagagagagagagagagggtggatcttatataacatttgcaaaacagttaatttatgttcaaaaaaattagttcattattacgtaatttcatcaattattatgcctagacaaaataaatagtaaaacactagtttcttgatagataatacactaataagtcgttatcaacgtgattatgcacaacaattgtgtgagaattatgtgatagtg

SEQ ID NO: 16345 - DNA, 1534 bp, Arabidopsis thaliana landsberg
attacgtgacgtaacatgagcttatcccatgtctctttacacaatcttagcaatgctgtctcaaataaaagattttacaaaatcaactatgacggatcaaatatgcaaatagttatgtgagtacaacaaagatcatactagttgtatttttaaaaagttgtaattgtaacttgaacaaaaatttcatataaaaatgagtcttaaaatataaacttaagatctatgattattaatttataatattattgggactataattttacatagggatttcaaaaaaattattatcttattatcttatcgattttggttaatttttacattggcccgacttgggaccaacaaaatttattcatttatcgtgtttattaatttatcgagtattaatttatagagtttctactatatagggttcatatagtttctggaaaaaaaaagtattaatattttacttttatatccaaaaaacaaaaaaactaacgtatagaaattgtataaacgatcctaaaattaggaattttagagattctctcatatctatcttaatttttaaatatttttatttttttaattgtatgagtttctactaaaaatctaccgccttggtgttaaagccacttagactacatgggttttgacccaaatagttaattaatctgatatgggttttgcgataaactcctcactctagaaagtagtctcacaattttatttatttaatgttgttaaatttgataggaaaaatgggcctaatgggcttttatatcttttctcaataataatttattccttaagttatcttcttcaagtttaatccaacatacttaagccacttagactatatgggttttgacccaaatagttaattaatctgatatgggctttgcgataaacttagtctcacaattttatttatttgtgttgttaaatttgacaggaaaagtgggcctaatggaccttatcgagttttcttcatgagcttagctgttttgctccataaaaaacgacgccgtttcctgtgcgaactgagaaatatttcttcctcaagtcgctttatgtcggtgaccgacggcgggttaagtttagtgaataaacaaacaatcttcgtaaaccaaaattgataatttttaaattttggtgtgaaatcagatccaaattctggtattttaacaccgtaactatgctgagtaactagtacgattgctgctcactcaccacttgctcctgcgatataaaaactttgcaatctagtaggatcattgtatcttactctctctggttctttctactagatccggatctggaactttctctactctctgctcataaagtttcattctttggggagatctgaggcaaccctttttctgtggcgagtatctctctctctttcttttgatgatcttgcttctgggtatctttacaaatgcaagattcggatatgtacatgagcttttcttgatccttttacttcttaaactctctttgctcttaattttgttttaaactactgtgattttagttctcctaatgt

SEQ ID NO: 16346 - DNA, 649 bp, Arabidopsis thaliana landsberg
tatgtagaaaatgcgagaacagagcaagttgatatatttactcacctaccaaatatttccttaactaacaaacagatcctctctaatcaagtatggactctattacatttactttcaaccattctataaaatcttataccagttatcttaaatcactcaatactcatgacagtctagagtattgaaatggggaaaaaaaaacagccatgctctgtttgatctaatttcacctccaccctcagagaagagaccacgtataggtcaaataacagcctcacaaagccaacttactcagcttaatggatctaattctaatggttctgcgtctattagatcagttttcaatacagttttcagagatatcactaatttgccactcagttgtgatgttaataattaaccatcttcttctacacaaccatttgattcagcaacttctatacagtattcacatggtactgtcattactatacaatatccaactttcagattctatctgctttacaagattagcaaatggttgtcacagttacttagaatgtgtttgaactactcgtaggttcatttgaaagatcatgacttacctcgattggtagagaaaatttgcatcagcctaagacagcttctactattccatttagtgatctca

SEQ ID NO: 16347 - DNA, 1965 bp, Arabidopsis thaliana landsberg
  unsure (1)..(1965): unsure at all n locations
atgtaacatccctttataaaagtattattatatactctctcttttcttttttcttattccccttataatccagaaaatagaacaattgtataagggaatatatatacacttttgggtaactatatcaagcaaatgtaagaagtgaaatcacttgggcaaaaagtgagttcgcttattaatattatacctttgagccttctagttatccattctacactttggaacgcttacaggtgaaaaaagtgtacaattttatttaaatgaccttaatacattaaggaaatgacattggttttttattttgccattcgaacctcagatttgcgtggtaatttcagcaaataacttggtatatattttctcctgaaagcacactatttaagcacgctgtcgtatgcagtactcatgatacataacccttattttgccaaatgagaggtattttacgtaccacactagtttctattatcattttattcatttataacaatttcgtcaaataaaacgctgttttaccaagagatacgttattaaatcaacaatttcgttgagagtgataaagtatttttattatttttttattaaattgtaaagtcttttgttgtctttagatttttcaaaaactcagaaatgaagtacttgatgtagcccagtttttttttttttgaataaattttgcattcattcaaaaaaaaataaaaaacaatttgcatgaaaatcaccttccctcttatatctcagtttgccaccatattcatatatggtgaattaggtaaatatactaattacctaattcaccatatatattaatgaggtaaaattagtacgtcaattgttattctttagcaaaaacatgtatatatacggtgtactgctaacaaaagtagttgagatatatctaacatactttgttttattttctcaatacccataaattttaatcacgaggtagctatagtttgatactcgtatgctgcttggagaggtgacgcgtggaatatgcaaaggtcgatactaaaaatctcattttgatgcgataactagtgttacgaattcaatactattcacatttcaactattcagattctattcgttctgtcttgacggttgtcaaaaaaacaaaaaataaatatttatatggtcgtcctatcctatgtcatttactattataaagtagacttaagcgtacataatgttcttgaaataacttaggtaaagatgtcaacatggatgggagtctctgcttgtgcagacggtccttcctaacatgtgcaaaaagtattagaccattcatgtgaatgaattttcttaacaaggattgagagaaaatagtccatacccgaaaatcataaatgaataaacagacaacctatatcattaattacgaaggcctaatcacatatcaaactctcttacttttgggtacgtaataccaacatttggaaaaaaanatgattaaaatagagaaaaagagtcacctaacatgagactggtgacgtcatataatcacatgattatattgaatgcttgagcgactgttttgtcgtttatgactttaaacacttaacattataaaagacaaagacaaagatctctctatccttaaacaccaaaaaaaaaagatggacaagactgatcaaaccgccattgacgaatcagctttagtgcttaatcgcactgagaaatcggcagaggcggtcctgcgagtagcatcaatggctctaagtattacgggtctcgtcatcatgatcaagaactctatctccaacgaatttggctctgtttcttactcaaatcttggagctttcatgttcaccttcttctatctctctctttctcttcttgcttcattagagcgtaatcaatcataacctttcctttttttttcccttattggaggtatttggtgagtgctaatgggcgttgcgctgctatattcgtttctaatggattttggaaatatta

SEQ ID NO: 16348 - DNA, 1642 bp, Arabidopsis thaliana landsberg
attacatttcatgagatcaagtctcgtctcagcagccgttggattccctttccagtaagcataaggctctctatctatccatttagtcctctggtttccttctcttagttctttcacaggactttcccatggctttatattcacctcagccctacaaaaccaatgcaatcctcaacactgacctatttgcatttgacattctctaagcaactctcgcagctatattccttaagctaccaagtaaatttactatggtctgtgcggtttcatttgtcaaatctaaaacttcagtggtgaaattgcaaaaccctataagttatgggtgcttgaagaagaagcaattaccatccccaataggaccaatcgggaaatacaatgtcgagcgtctcgtcgttcgcgcaataacggaacaatggcggcggtggaggttgatcaactccggcgaattcagccgccttcactaccggccagtcaacgcagtcaaacatgagctcgagatccggaatctttcccggatatctccgtaggagctgtacgaatccccagatcgtgaacacatctcttgtctgaaaagcctcacgaaatttctcgacgtagattctcccgttgataatcgccaggcggaaaatcgccgtcgcattggctcgctccaaggcttccctcgtgatcccggtcttctcccatggccgtagatcctcgtgaatccatcggaagtaatctgggcacgtggcggatggagaacggtcagattctccttctccggcgctagatcggaaactcgtcggataattgtcctttgggcaagttccagtgtcgttgccggagaaagcagcgcagtttagcgtaaactcttttggtttttccgtaattagcttagtcgactgagggtattctggggattgagtggtttctctctcagtcacggacaccgcttctttctctatcaaaacctatagacgaaaacgaagtcgtttagcaaaaaccggtagttagttaatgactaaaaacaatcacgtgattattaaagctcccgtgtagacacgtgtcaagcgtaggaaacttgtttgacaaaaaagtaatggtgacacgacaaattaggcgcgaacgagttttagcgccactaataccgtatacgacgtggcaaacgacaaacgggactgtcgttttgatgtaattagaagagaacacaagaatctatttatagtaagatgttcgtacggagggatcgaggaggaggcgcgtggagagaaacgcgccgaggaggaggaagagaaagatggagaagaaggcgtaggatcggttagaagcaccggtgccggttttgacgagtggagacaaaatggtgtcgaaattacgagagtgcgttgcagaggtatatgacggcgagttcctcatcatctctccttgctgttgcatgccaatttgataatcaatgatcgtgaaacgaaagatgaagaagagagatgtgagagagagagagagagagagagagagagaaagagaaaaggagagctttttgtgtgtgagaaaaggaaaggacagagaatcatgtgaaccagaataggaaaaggtttggtttataactaaagtgttttaatgtttgcaagacttttgatgggtgtgtcatgttgtgagaccagga

SEQ ID NO: 16349 - DNA, 2788 bp, Arabidopsis thaliana landsberg
tctaaacagataaaatataacaatatttttttcttatcaaacattgaatccacatttttttttatctttttttagcagccattatctatcgttatattttcgaggtttaactgtaacaaacttataaatcaaatgaaactaattctttgtaaataatgatatagttgcctaggttccaataaaaaaaagtcgaatttcttcaagtcccttttgagcgtttagaaaccgtctaataattctcaaatcttagacaatttccagctcaatatcctcacgatttagctagttacttcaagagatccacaaacatttttttcgtgtgaagtagcaatagaggactttactattggagacgtaataatgctatcaaatgtgtagttacgtttcttgagtaatcgaaaaacttaagttgaagtcgcgattcagaaaataattatgggggcatctctcccgtcctcctctctggaccctctggttactcacgtgacagcaagaccttgtagtaccacaagacagtaagacacgaatgttgatggagattcaatacatatcaacacacaaagagtgaccaaatttacagtagtcacacaaaacgttaaagaatccaattaagattataactttttcaccagactcaatttctaagtacgagaattcacatgattccaaatgtatacatcatcgagaatatatcaaagacattagatccactaaccaaagatctggaagcaggaaccctataaaaaagttacccggatcttagcgagaacatctttcttctctagggttcgagtgtctaaggtcttgagatccatcatctctctagtataatcatcgtccattgttctcactctcacagccaattgaaggatcagatcaaaataacagattccctgctggtgcaatcagattattggtcaccggagaattcgacaatgccgttccgagagaagcgttgcattacaagagataagcaaccgaatctaactagagacattatgacacaattttggcctattaagagaatatcaaggaaatgggaatattcatctgctaacttggaatgatgatcagtaaaacaacaggaatgttatagatttgaacaagttatgtttggaagagaaacaatgcatttttgggattgaactttgtttatgtaaagtggctactgctgtattaaatttatgcttgataatttcgaaattttatttccttgacaataattaacttaagtataatttgttgagtgttgtatcacagacgcatacacatcatacttatcattagatcattcaatcaatggccaaagtgtcctattaagtttataaaggtggtacaagttagaaatcaggctgtgtgagggagtggagtgttacggataaagctggtaaagatattaagagcatgtataggttggtccgtaggaacactatgacctgctcctttcacagttacaaaggttaagttccctttgtaatcctctgtgaaccctcccagctgtcctcccgtaaaccagggacgaaattcctttacaaccgttagattcatctccttcaccacggctaatgtagatgcaaatggaatctccaggtccacgtctccattgtagatcatgactcggacaccctcgcccatcagctcgtggaggataggtatcatcggggtgtctctatcattttcgctccaattctcagtcagttcgttattgcaagaggtccactcatacggtaatttggtggtgttggcatgtatcgctttttgaaccttttttctgttaagataagccttcaagtagtccttactgcacggatcaacctccaaaactgtggtgcatttcttggatatcctgctcaacgtggagtttagacacacaggagcgtatatgttgtaaacgtccaagtgtttgttatgttcaatactaaatttaggcattatctttgggcattcgtccatatcatagttggcaaaatcgcagactttactgtactcttcaaaatctttttgggaaaccaaaccatgacttaaaataaatttattctcattatcagcctcgataagtaaatcgagacctggattaccgatcgaaatgcctcgtagattgatgaaggtttggttgttacggtgaaggatgatctgggccagttggggaatatagtggccagcgtaactctgaccggagatgtaaacgtctcgtcctttatattccggaaacctttcaagccaattcaccaagaacatgtagttatcctctgctgttagcttatccgcttgttccccaaatatctcccaatcaaaaggagtactcgagtacgagaatcctacacttatggcccttcgaagaacaacatgttgcctctgcaaatccacatgcaatcgcatttctcattgatctcattacaacttataaataacgtagactaaaatttctaattatcatttttttaaaaaaaggtaaacgtaccgttgttccatgaataaggattgcggtaaagcgttttgccatcgctatgtacgcggaatggaccaagctcttcaaatgccccaaatcctacagatgagcaccccggtcctgtacatttttataaaaagtttgttcttgttagaagagtctaattgtattttaaaaaatctataagtaataccaataaagagagtttgtatagggaatatatattttctagaggtacctccgttgaaccagagcacaagaggagtagatttactaggtttgatggcttccacaaaataatagtacaaaaaccgagtggcaggttcgtttcggccgcat

SEQ ID NO: 16350 - DNA, 1608 bp, Arabidopsis thaliana landsberg
tcacataacgattaattcactattgagataaaactaaaataggagctttgcaagatataaatttcttagttttagtaatgggtattcacggattcaatcaaactaatatctagcatacaaacaagattttagtcaattgaagtaatggattagaaaacacataaaccattaccaaacgaaaaccgaaacataagtaatttttccagaaaatttaaaattacctgaactttgataatgttagagaaagagtcgatggttttgtagtaatcaacactgaattcaaccattagatgtctttatcctctcaaatgcttcaacattgtcatgcacccattgtatctgaaaagatttaaaaacaaaatcattggaacttgaacagtcgtttgtgattcgaaattcgctggccatgacttacatttttggaagacaaaaacgacggtatacgccacatgatttgcagaaatcggtggtggaagatcaatctgacgacaaggattgaatgatttagctaaattcagcattgttcttccgtcttcacctccagatttggtgaagaaggtggtgtttgagaggaggaagagtaggaggagaggcgttggagcctccattgattagagaacacgaaagtcacacatagaggcggaggatgaagaaggaaggaggaggaggaggaagaaggagattagtggtgaaaaagaatctgatcttatctctctcttttttgtttgttcttttgtctgtaaaatcaaaatcccgagagaacaaaaaaatatctacctttttttattaacatgtgctttaaagacaactgataaatcctattgtctttgttttcccaaaaatcaaaaatatatcatactacatatgtatttacaacctttatcatcaacaaaataattctactatctatcatgttactaaattgttgtaactattttatttatatcaaatttacattaagtaaatcatacacaattttaaacacagtaaaacatattcttctaatctctaaacagtatccatactattaaaaattcccaaaaaatatttatacaagtctttaaaaaacaaatatatatttatattttgtgctataacatataataatttacttaataaaaaaactatacaaagcctatcccgcgggaaaccgcgggttcaatcctagtaatgtttatttccttagctacattttcaatattcttctttcccttgtttaatcataattaattggatttttgaaatataattaaaattttgaaatacacctataaaagcaatttatttttgctggataagttttttgaatgacaaatgtataattagtttacattatttcaaaagtttgtgcaataatatattatggatttattttacaaaagatccggttgaaaaaaaagaatcattaaaacccaaaatatttcgaaattagtatgtacaatttgttgtttagatatttctaaatttaaggcataatgataattactttaaattaattaaatttagtttcattcatagtaaatataaatctttatatttcaaaatacttaacccaaaattaaaaaattgaatttatttatgtatcacaaattataattttttattcag

SEQ ID NO: 16351 - DNA, 659 bp, Arabidopsis thaliana landsberg
  unsure (1)..(659): unsure at all n locations
ataggcagatgtggcccatatcgtacttgcagattacagatagtaatctctccgcgacagggccaagatttctcaggcctagttgattcaataacgagagatggttcactggggatgtctatgtattgaagcattctctccacggatatcattttgttctcaagatcgcaaagtgtccatattaaagttgcttgcaggctatttagattgagtgcatatgtaaccgccaatcctgcaaagcctttaagaagcaaaataccaagaacgacccggaagatttttagtcttgaaagtaaacaataacaaatacaatgattaaagggcggtgacctacttggattaatgactccttcaggcacagaaactaagataacaagcgaaagcgcaaatgccacagtggataagagatcaagacggannnnnnnnnnnnnnnnnnnnnnnnnnnnnnnnnnnctcagccgagaataacaatcgttaagtctcatgatatcagtgcggaatcttggttcttgatcaaagctccttatagttgttatccctgaaagtgtttcagaaaaatgctgcnnnnnnnnnnnnnnnnntattccagataatcaaactagttcccgagccgcagatatgtaatattgctgcatacatacattaaatcaatatcaaaa

SEQ ID NO: 16352 - DNA, 860 bp, Arabidopsis thaliana landsberg
actattggtatatatagctgaatgttgttcctcgtatcgatttttcttgatctcttatgggtgtagttttgttcctttgtgaacagagaactgtctatatgagcattgttctattggatcaacattcacacctgatcttcaaggaagttttttggctacagcatctttctactacaccgccaaggtataatcccatgacgtcaagattatatgtatgaatttgtgggggagaaattgtttgaacattaatgtcttatatattttcctgtatgaaattaatctgaatcagttctttgagttggaagaaaagggttggttgtctgaattgattccagctgggaagagatattgtggagaagaatggtcgaaactgatattggaatacccaacaactgatgaagaatatttgcgtggctattgtttctcagcagcatatactatatcaatgcttcatgatagtcttggtattgctcttgatgatgaaaggtaaaatttactgcacaaattcaagaacattgtaagattaatcaaatgtgggtttttttggacaaagatataaacaaaaactatacgtttgtttttgtttgcagtatcacgtatgcaagtaaagcaggagaaaaacacataccactagattgggcattgggggcttttatactagatgttgtaacacccaattctgattacaatggtaaatctagaaaatatcttggcttttaagtaacgtagccaaatacaaaatatgaaatcatagttttgtattttacgttaaactgttgttgaaagtaactatcatgtcgtcgttcctttccatgaaataagttagctaagccccttctaggtgtgtatctttccctgca

SEQ ID NO: 16353 - DNA, 1841 bp, Arabidopsis thaliana landsberg
gctacaaggctagcagttattggtgtactcggacttgtttatgatggttgcattcacgggaagttggttagcaggaggcattggagaagtgctgctcatagtaccaactggtgttaaaggttttgaaatgaggccattgtttatcacagaaattgtacttgcgattcctgtacgatttggagtctcggtaagcgataccggtgctggagaattagcaccacaggcaacattttccttagagccctgtgatccaatgttagtagtctttgctgcgcttgcagttgtctttgcatttacactagcagactcaaactgagatgtagttgctgctccagaaaccaagccagtattttgcaatcttgaaaacgtagatacaattggtttttgttgattagcctttatatccatcggtccaatcttctttgctgaggatgatagaactccggctgccctaaaaggcatttttgctgtagtcgtcgctacggcacgagtcgcacgcccatatgtaggaggaaatggcttcccattgaatgcttgcacacatcttgagcaatgccattcagattttggaacccctttcatattgtttccttgcagacatttcaagtggtatgctttttcacaggcatcacaaatcagtagagtgtccatttcattgatggtaacttcacatatctggcatgccattgccctgctcatatactctcttgaaggtggattccacaaaggatattgtttagcccgcggttgcagaactttatggattaacttagcaatttcagtatggttgcctccgaacgaagaagtttgactgtaatgcattggctgatttgtgccagtgaatgtaccgtgcctgaatggcctaaagcttggatctgctgtcctgacagaactttgaattggaaccttcttatctggtgcagtactgaaagatatggtggatggaagttgggcagaccagggttcagcataataattcgcggaagaaactgctgaaacaagtaatatatgaaacaaactcaaaatcaactatgaaaaagctattaaagaactagaaacataacatataaatttagcaactcaggatagaaacctaaccaaaaagaaaggctaccatgaccagtaagatttgcaaaagaaaacgatagtattcacaaaaggtatacttattctaagcatgagggctagttactcagctacaagcctagtgattagccaattatctgtatttggctgttatgattaccttcactaaaatttacaagtcctatcgtataaagcaaaacagcaaaccaaccagaataccctacccatactaaaagtgttgtaatttccaaatcaaagactaaaagaatcttatcactacaactgcatctatacaaaacaaagggggatatgaggacttacgagtcccttgagaagcaccgttaagtaccatctgaggtctgtccaatttgaaatggcttccactagtgttagcagtagcaacttcactactaggccactgatgagccacagaagctttattcgctgcagaaacaaaagggtgaagaaactgtcaggaagcctgaagataaagctttgatggtttgtcaaaatgtgtagccttaccaagaccaccaggagatgcaagactaccgtttggctgtgacaatgtatatccagtggatactgtcgaagtggtaggatacttttctgcttcttccatctggacaaaatcaaaacaatgatgaaaacgccacagagaaaattgcatctctcaaaatgctgacaaaactatacccaattgaagtgagcaatatcaaagagaaaacacaattgtgatctgagaaacaaaaggc

SEQ ID NO: 16354 - DNA, 3591 bp, Arabidopsis thaliana landsberg
aaacaaattccaacaaaatcaagtttttgctaaaactagtttatttgcgggttatttaattacctatcatattacttgtaatatcatttgtatgttaacgggtaaaccaaaccaaaccggatattgaactattaaaaatcttgtaaatttgacacaaactaatgaatatctaaattatgttactgctatgataacgaccatttttgtttttgagaaccataatataaattacaggtacgtgacaagtactaagtatttatatccacctttagtcacagtaccaatattgcgcctaccgggcaacgtgaacgtgatcatcaaatcaaagtagttaccaaacgctttgatctcgataaaactaaaagctgacacgtcttgctgtttcttaatttatttctcttacaacgacaattttgagaaatatgaaatttttatatcgaaagggaacagtccttatcatttgctcccatcacttgcttttgtctagttacaactggaaatcgaagagaagtattacaaaaacatttttctcgtcatttataaaaaaatgacaaaaaattaaatagagagcaaagcaagagcgttgggtgacgttggtctcttcattaactcctctcatctaccccttcctctgttcgcctttatatccttcaccttccctctctcatcttcattaactcatcttcaaaaataccctaatcacattttgtaacaataatacaattatacattaaaactctccgacgatgcctcaggcaccgatgccagagttctctagctcggtgaagctcaagtacgtgaaacttggttaccaatatttggttaaccatttcttgagttttcttttgatcccgatcatggctattgtcgccgttgagcttcttcggatgggtcctgaagagatccttaatgtttggaattcactccagtttgacctagttcaggttctatgttcttccttctttgtcatcttcatctccactgtttacttcatgtccaagccacgcaccatctacctcgttgactattcttgttacaagccacctgtcacgtgtcgtgtccccttcgcaactttcatggaacactctcgtttgatcctcaaggacaagcctaagagcgtcgagttccaaatgagaatccttgaacgttctggcctcggtgaggagacttgtctccctccggctattcattatattcctcccacaccaaccatggacgcggctagaagcgaggctcagatggttatcttcgaggccatggacgatcttttcaagaaaaccggtcttaaacctaaagacgtcgacatccttatcgtcaactgctctcttttctctcccacaccatcgctctcagctatggtcatcaacaaatataagcttaggagtaatatcaagagcttcaatctttcggggatgggctgcagcgcgggcctgatctcagttgatctagcccgcgacttgctccaagttcatcccaattcaaatgcaatcatcgtcagcacggagatcataacgcctaattactatcaaggcaacgagagagccatgttgttacccaattgtctcttccgcatgggtgcggcagccatacacatgtcaaaccgccggtctgaccggtggcgagccaaatacaagctttcccacctcgtccggacacaccgtggcgctgacgacaagtctttctactgtgtctacgaacaggaagacaaagaaggacacgttggcatcaacttgtccaaagatctcatggccatcgccggtgaagccctcaaggcaaacatcaccacaataggtaataaacacacatcattttatttcacctacatatatacactaacaatgatatacacggtgaaaactatatcaaggggtgggcattaaatattattggtcggctccgttttgacttcaattcggttttaaataacagaataattactctatctctatatatgttttgttattatggttaaatgtactttcttggtatatgtctcacttctatggaaatttaggttactctattcggttgcattcaattcggtttgttcgatataaattttattatgatttaaagcaaagtttggtttggcttaggtttaaggaattatggtacgtttttggttttgatagatgaatttgtttgaacaggtcctttggtcctaccggcgtcagaacaacttctctttctcacgtccctaatcggacgtaaaatcttcaacccgaaatggaaaccatacataccggatttcaagctggccttcgaacacttttgcattcacgcaggaggcagagcggtgatcgacgagctccaaaagaatctacaactatcaggagaacacgttgaggcctcaagaatgacactacatcgttttggtaacacgtcatcttcatcgttatggtacgagcttagctacatcgagtctaaagggagaatgaggagaggcgatcgcgtttggcaaatcgcgtttgggagtggtttcaagtgtaactctgccgtgtggaagtgtaaccgtacgattaagacacctaaggacggaccatggtccgattgtatcgaccgttaccctgtctttattcccgaagttgtcaaactctaaactgaaaacgtctttgaacggtttagtaacggtttgattttgtgttacggtttaggtttatttggtctcgggatttggtttaaaggggattgagaaatgggaagttagagagaagaaaaagcaaagcataaatgtttgtatttaattgctctgcatatacttaaatctctgcttttcatttggggtattttttagtttctcgtgctgtaattaataacttgtggtgtactcaaataagaatatttctctctgttttattatttttaaattggagaataaacttctttgttttcatcgctgccttatatatattgcttctgatttgggttgaccatccatccagtttgcaggatccgatagcagtaaatatgtccactatgaatgtggtgcatggacagtcatctcttacagacttttgcatgtaaaattatatgttgcatgcatgatggtatgtaatgaatggattggatgatgtcatgactcatgatgattaaaaaatacgtgagtccatatatttctccaatagtattaaaatacgagtacatcaaacatgttttccaacactgccacaaaatgtattggacctatatcaataagtgggccttgatttcccagcttatgatggcttaggtttcattgtagaatggtgaaacaggccttcctagtgaggatgcaggtcatcaatagcaaggtttaccaacggaggtttaatcctcatgaagtgatgaagaagatgtcgaagagttggagtttgagaagagatgtttggaaaggtattctaagaaggatgcagaggatgataatgagattgatgatgttaacgacgttgatcaacaagcgcttttgccatcagtccgtacgtgaccctaaactgtggctggtgaaatgtggcgttatgagtttttgttctctatgaattcctagtattaaggatatctcaacagacaggacaaaagtttaaggttaatgatcttttatcaaatgcaatcaat

SEQ ID NO: 16355 - DNA, 2140 bp, Arabidopsis thaliana landsberg
atcaatgcatataagattatgaatatatcggattaatagctcgaccttttctactgatttggtaatgagtgacccacaagtcaggcaagaggattgttttattagcctctttctttctggtgaatctggtcttagccatatatgtaacgctcgtactaatcgaaaaatttcgacttagaaattaatatatcctttgtttaggaaaagaagataaagttttaacaaaaagtgttgtctcaataaggctagaaattacacgtgttggcatagttttgaccatcgaagacatgtttttggtttcttttgttggtcgtgcaatttggaatgatcttgaatttcccaagcgaattgtgaacacattatcgttccatatacataaaagaattggataaagaagcagccattacaaacttgttgaataccgcctactgatacgccgccgttttgcgatagcaaagagaaaaggtaaaatcagtctgatcgatatatgaaaaatctaactttcaaatatatagtatatatatcatcaatattacaccaaagctgctatagaatgattcagatagtatacattgatttatacacaaaaactagatcataacccgtgctatacagtacggacattaatattttgtataaattaaattatatactttgtttgaattacataggaaatattatagtataaaagtgatatcataatatttttcaatatttttactatttggatataatgctgcattggattgactttgtttaaaaatgttatttttatactaaatacaacatacatagttttaagtaaatgtataaaatttgtatacaagttgttttggtaaaaaacaagttttctttgtattagaggatctaatttttggcctaacttagaattagtctttgtatagtcttttggttatatttgtggacctaattgggccctatattaaattatttttgatagggctgacgaaaaaacggacccgataaccaacccaatacccgaaccaaaaaacggggttaggcagggtttaaattttagcaaatttccttattgggtagagttttagtatacccgtggatatccgattggttcggaaattacccgttacccaaaaagggtattcaaaaacccaaacattaatttaatatccaaaatattaattatatttaatcgtaatataatctaattatctaagattataattataaatctaaatatgtcaattaattttggacctaaatatccaaaacaactaaactattcaaaaattatttgttatgtttgtcaaaatttagtaaaatatattcaaatataattaaatttattaaaacttaacaaatttaaaagttttttttgtttggagacccgctatctacatacaaaatacccgtttctaatttttgggtatttttagggcctgaaactttttatccaaactgactcaaacccaactggacccgacccgaaccaaaaccgaatatttagaattattctattgggtagtaaatcatataccattaatcctaaacctgaacgggttctacccgaactcgaatgggttactcatatgtccagccctattctctgatttaattatctaaaaactcccaaaaaaaacatatgttttgctgattactttttattcaaaaaaatttacatcctcttctgccaaaatcatttcataagacatccccaaatccttggaataatgatttcatgaatgaagaatcctaatttgaatataccaagaggttttgaaaggttttaagtttttgataggtgtgtatgtgagaaggtacatccatgtgatggtaatctgcttatttataattttaacttgcattatacagcaggtaggcttatattttagttaaactaaaaacttttattgtaaagttgattataaatatatgatattattttatttgattttaaatgtatagtaaactacgagttgtatatgttttgttgatattatttatattgtttagtgtttaaaattatatacttgtattttgattgttaattttagagtttcacatgtagtataccatcttgtattaatattgatttaaacccgtcaattgtaggaaatttcagcctgtattaaaaatttaatcccctcaaccccataaaaat

SEQ ID NO: 16356 - DNA, 2236 bp, Arabidopsis thaliana landsberg
tggaacatctaaaaaagaagccaaaaaatctaaaatatgtaaacttgcatatgtttgtttagtgagctttcggccgatcaattagctggagttcaaaggaagttaagtacgagctcgcaagacaaaaattgaaactcaaacttcttctttcttttttcttttttgattgtaaaaaatgtcttctactgatgatttcgaagtggaaaccatatctgaaatcatggttccgtttcatcatcatcctttatcaagttatgcttctgaatttttgacttcctgctctttgtgccttttttctacgtttctaggagaaatagtcactcgcatcagatatcagtgtacggattgcggcttgaagttacacgacgaatgcatcaacagcctttccctcaaccgaccctttctgtgcaatcacattctcaaggtgtatactcatattttcacatcatctggccgtatatatgaaaacacttgtcatttttgtcaaagtaagttagaatttttatttgctcgttgcactatatgcaacttaaacgtggatatagaatgtttgtttgcactgccaccactcacaatttctgaaccaaaacaccacaagcatagcctcagtctcctgctaaggctagtcacctttacttgtaatgcttgtggtgtggaaggcgaccgcaatccttacgtatgtcttgaatgcaatctgatggtccacaaagattgtgttgagaatctaccgcgagtcataagcataaatcggaataaccatcgcatatctcatacttttcatcttggtgaaagagaaagagattgggagtgtggagtttgtcggaagacgatcaattgggtctatggaggttataaatgctctcgttgtcctagttatgccgttcattcaagatgtgcaacaagatacgaagtgtgggatggtttagagctcgaagatgtgcccgaagaagaagaagaaatcgaagatccattcaaggtaattaatgataagggagatatcattcattttagtcatgaagagcatcttctcagattggacgagatttatgtaacggatgatgctaacatgcgctgtcggtgttgcgttcttgctatcaacggtgacccatgctacagatgcgttgaatgtgatttcatccttcacaaagcgtgtgcgaatcttcctcgcaagaagcggcatttattgcacaaccataaactcactctacaggttgacgaggctgcctcttcagataatgcgtgtacagcttgggaaacgtattctaatggtttcaggtacaagagtttctatagttgccaaaatgatgttgtgtatgaagttcggtgtaggtccgtatcggaaccatctgagcatgatctgcatgcacatcccttatattggacattggaaagttccaaacgatgtcaagcttgtggcacggaaactgatgctaatctcttaaattgtacggtttgtgatgattacgcattatgcatgaagtgtgccactttaccaagaaaggtaaaacataggtgtgatgatcattttctgtcattatgtcaaggtgtgggaaacgcaagcggcaacttgtggtgtgatatttgtgagaccaagacacatccaaatgtatgttactatacatgtgaagaatgtgggctcagtctccatcttaattgtgttcttggtgatttttattatacgaaggtaggactcgtctatcctggtcttgaagtacttcccaacaatggtgctactcgacctttctgcaacagctgtaaagttcgttgcaagttcagcttccttatgaagcaaactctaggagaccttgttcgttacttttgttcaatacgttgtattcctagagcaaggtaactataatcatccaaattcgtatttacattctcagtctaaattgtaaacagtgtgttttaaaagtcttgtagcagttttttgttaagaactattttacagttttccttttgttttgcatggctattattgagaatatgttcattttttacaatattgttttgggtaagatgtcaacaatttcatacttgttcacttttcatgtgtgaggtaaaacagaatgatctgagaatttaaacgaaaaagcgaatcttggacacatgtctatggtctaagatttataaaacactaaagcagcaaccacttacctcagccaaagggttttgaatcgaaggaaaaaaaagaaaaacagtgtgaaacatatggtctcattaaaaacatatgttt

SEQ ID NO: 16357 - DNA, 3054 bp, Arabidopsis thaliana landsberg
tcgcagaaacccgattttcacacaaattatcatcatctggattttcgcacgaaagataagttctctttcatatttttataaaaataaagatttaatgcttctttgaaagttaacctttaatagttgatgcactattagttatacgttaatagagttgatcatgaatattgtttaccctaaattggcacgaaaaaatttgtttaaaagatgtgtattaatcttttctaaaaaaaaaaaaaaaaaaaaaacctcgaatatttcaagagtatatttggcttaaccggattggtcatcctggtttaatgatgatgcgaaagtattgagaattatgtggacattaggtgaaaaaccagaagattctccctaatgattgatcaattgttacttgctcagaaagcaatatgataatgggatttttaacgagtcaaaataatttggattttatctattcgtgggtatatacaaggagatgattatgggttgatcacccactgtatgacatttagatacctaatggctataaaagatgcatcgatttcattggacgcattgactcgattgttgcatcgacaacaaggtcatatttatccttgctataaacccgcaacatagaaccttgcgagattactcccttgattaaagtacaagagtatttcagtgtttatttattataaccattattggatatccgttgggataagggtttaacattttgaaattcatgttcatacacaaaatgccttagtaacatcgatacgcatcaagccaatgaataattaatagttttccccattattattggttttgggtcagaaaccaaatagttttcatctaaaagctttgaatgtgaaaagtgctccaccacagcacgcagagatgaaccctcaaaggaggataagtatacatgttggatatgaatgataactaagccatcctagaaggatttatataccgctcgttttgaagactatcatattatatagtcagctattccaacataagggggagaatgtatacagctggtgaaaaagataaatagaaatgaattatcaatgatcctcggagtaaagaatgtatattaagagtctaaaagataattcaattacagaatttagcgttgtaattgccagacgcatttgctgacccaaataaagtgatgaagtcacttataccagttgtaaattaaatgctccagaatataatgaatgtcctgtaaggaccaatttcaaactgctattgagtcttaagatcgcatgaagcgtaatagactttggttccaaatataaatatcctcgtaaaagtgaaggagcacaaaattaaaaatgaccaaattgaggaaataaatattttgatgatctcttgaagagagtgaatgatctctaaaagagacataaacatgacaaatgaaacattcaagtacttgacaatgaagagatctagctagctatgtcatgtcaaaatataatggaatcaaaagcaaatcgacgtcgtaatatatttgcatgctatgagcagttgatattatagacaaaaaggaggatcatgaaagaaagtctattgaaaagtgtacacaaagtaatgattagccaaaaatggaaaagaagaaatagacatataattataatctctagtagagatatttggactagtagtctatgcacatgatgtgtaaaaccagtggaaaataaatgagtctttatgtgaaagaatagtgaaattaatgagattttcacaaagataagaaatgtattatgaagagatatattctcttgtggtggatgtaatatttttttttaagtatctaaagtctgacaataaaagacggaacactggatatgacatttatatgaaattcttgaaagatataatctctgaaggattaattatatgagaattatgttctctagaactctactcgatcgaataaaaagaaatatgtaacatgacatataatcatataaatgtatatttatgttgagtttgtcaaaatatattgatcaaactaatatttgttttgaaaatcattaaaactcctacagaattatcataagtaatacgatgacaataatctatgataaaatatcactagataatgatatttataagtctatatgaaaaccatataattttgatcattaagattatggttattaattccaacgagatattgtatttgattgaaaatcatctcctgaagaagatgtttccgagggggagattgaatgatatgcgtggatgtaccctttttccttatcatagtttttatcccacatgatttttctatgacaaggtttttaacgagacattaaagaacacgcaaataatacacttgatgaatattaagaaattctatcaatcatccaaatgaatattatacactaatgatatttagagaaataaataagatggtcaagatgaatcatctaaaagattcatgagcagaagaatggcgttgtactttatccagaaatttgttcaagagaaaattaggcaaacttattctcaaatactgtttattctttgccacatcttctaatcatgcagagattttaccaattcatgaagctagtcgcgagtgtgtatggctaagatccatagtttaccatatacaagaagattgtggtatgtatgcagggaaaaagactccaacaattatgtacgaagacaatgcagcatgcatcgcacaactcaaagacggatacatcaaaggcgatagaacaaagcacatcctaccaaaattcttcttcacacacgatctacaaaaaagcggcgatgtacgagttctacagatcttttaaacaaatttttcgtgcaaatttagggtaaacaatattcatggtcaactctattaatgtaaaactaatagtgcatcaactatgaaagtttaattttcaaagaagcattagatctttatctttataaaagtatggaagagaacttatctttcgtgcgaaaatccagatgctgatcattcgtgcaaaaatagggtttctgagatataaagcataaaatagttcagaatcaataacatataatccgtgcataaatcgtaca

SEQ ID NO: 16358 - DNA, 1823 bp, Arabidopsis thaliana landsberg
ctacagctaggatttttgaagcagtcatggcatctacatacaaattagaataacacagatctcgttctaggtattgcctcgaattggtttcctgatactaaaaccttcgttttcctttggggtggaacaactataacccttaaagacgtaatgttgcttttccgtttatctgttttggattcatcggtttttgctacactgaatagctcattcgagattatcaggataagctagagacaaaatgacgaacgattaaacctaaaggtaaagcagttttgtaacacaagtggcatggatggatagattcatgaactgaagatgagcttgagtatgtggctttccttgtcttgtgggttagcaaatttgtgtatccatcacgctttctttatctctatgtttccaattgctattcatctttcaagtggtactaggattgctcttgctcctgatgttcttgctcatttgtatacagagctaagtctcttgaaaaaccatagtatcaatgtcagaggagatgagaatggtcataatttggctcccttaggacttggtaagaacgaccatcacgacagttctatgcgccggtggccgtatttccggttttgtgttaagcattatcgttttattaaagttctgccattgtcaccaaatggccaataatatacatatacataaacactgtaacattttaaagatgaaacaaacagaaaaaggcttcacgagtcttccttttgaagcagaagagacgaaatatcattaccaccaccattattcggcgtcggagtgtgttcattccgacgccggcgcttcccataaccactgttaactgccacctcttgccatcccccaaacgtcaaactattagcgaatgtatctttcacactctccatcacttctctctccgctggagataatctctctagtgcaatccctgaagcagcttcctcaaattccctcatacaagcaatctacaccaaaccaaagtaaacttattttgccggtttcaaatataagatgttttaaaaacagaaatgatagagattaaacttattttaccatattcatgacttgggactcgagaaacgcttctcggtatagtttggtgatactgatcctagcataccattccatgtaagctccatcatccaccacattgccacctccaggactgtccacgatgtgatccccacgttcagcccattcctcacacgctagactcattgacgtgtccaagtcatcaagccgacggttctttctgtcgcggcgttttactttcagaggtatcggctggcgtttcccaaactgcctcagacacctatctggaaaatgtaactctattttctcaaagcatacaagagtcgttttcgatcttcctagaatcagcttggctttaatgtgtggtggaatcaagttctcaaatctttcatatggacaccaagtgatctgcattttcacaaccatcaattattaacatttagagcaatacaaaattcataaggatgaactgaagggtttaccttgctaggatcaagatcgtccagttctctgcggtactcagataggtcggttttggatctgctgcctttacctttccacaaaagagcaagcgggaaacacgcttcggatttctcgggtctaccgatatccagatgaaaataactccaacactatatacatgagacaatcatatgttacatttcctaaagatattgaaatctcaaatggacagaaaaccaaaactaacatagaagccaacctgtagcaaagtcaaacaaccgcaaatgttgctctgagatttaagcgacgcattccgagcatcggtc

SEQ ID NO: 16359 - DNA, 1343 bp, Arabidopsis thaliana landsberg
gcttgttcgcttttgtttattcgtatacgtgttgtgaaatcgcattttcactgaatcagtattctgattcaatttctttgtttcttcagcgtgttgattggtacaaaggtttaatcaaatggttggaggaggagttatccagcaaattcttaggaggaagcttcactcccaatcacttgtgagattttttccagtcttaattttacattctcttcatttctattttgatttacgatttcagcttgggatctgtttttaagacatttttttcggttctgtggttaaagatttgtgttttgtgacactgatgctcattagctaatgatttctttgtgaaatttttcattttttggaacataagacaggagacaatgatttatgtatagcttctgcttcaatctcaaatcctagtagaatagtagaatgcagcaatcttttgaaagtccatttggttagcatataactgagttggtttgcggcgaagttttgactgagcattggttttgtgttatcctgcaggcaactccggttttgtcttggttttcttcgaagaaagctcatgaggatgctggttcttctggtgtaagagcacttgccttgttgggtgctggtgttacaggactgttgagtttttctacagtagcatctgctgatgaggctgaacatggattggagagtccagagtacccttggcctcatgatggcattcttagctcatatgaccatgcttcgtgagtattgtcaccactctctcatcttcttgtctggttaatagcatcattttatcattttcttatagatttttttttgcttttataagttaacgtcctttcaagcaatttttcaatgaaaaaggaaattttcttagaattgtaaatttctttgaatcaaaaagtctatcatgcgtgaatcaagcgtttgtatgagtctttgtatagaaagaacagaaatcataaacaaaataaggggcttgttgctgcccttttttaataaaacgattcaagatcaccgaagtcatgtctaaacctaaagattcaaagtaaggataaagaatcttgaaaaaaggaaatcctgttttcaattgtttgaaaaactagatcaaactgaagaatcaaaattgattctaaaatttgcaatgagacaaacaaaaaaagggctagagactactcaataaaaaaagtacttaaggattctccggtgagatatttgagagttgtttaacttgagttacgagagtacgaatgttatgaatgctttttatggaaaaaatatttagggttttaatactggctaattgatttaatgtttttatttctctatttaatatttgaatttactatttg

SEQ ID NO: 16360 - DNA, 3289 bp, Arabidopsis thaliana landsberg
  unsure (1)..(3289): unsure at all n locations
gttagtcaaatcccaacataaaagagattggaaacgtcatttaaaaagttgtagtctccatatcacattctttgctcatatgagatcgttcagaacacttaatatatgatttcacatgagacgaaaaatgacattacagtgatgttcgcaagatgcaaatcattattacagttgagaacagctcttttgtcatttctattgtttggttgtggattccatttaacacgaaattgccaagaaaagtggagttcttggccattttacaacttgcccttgaacattcaataattgctcagggaaattgaagtctgtaccagcattagaaatcgcacggctttgtgtacgaaggtaaggtagagacagaacttgacctctctagaaaaaatgaagaatgttttacatattcaaactttcttctcaacgtcatgtcatgcaaacggacgattcaacatcatgcatcacgcaattggtcggtgaaagtgtggaaaaggttacaaagataatcggtgacgttgttctttcatatttgttgatgttgtacaaagaaaataatttactctttcaaaaaaggagaaaataaatgttattttcttctcttcactcacatgatgaattgaaacacagataaaatcaaacccattatttaacaacaatcaaaagactaacaagagaggatgagaaaactcatcaggtgctggaaggaacaccgagatcgtctgaagagtaaggatgaataaaagcattgttcatttgccagaccgtaaacgacgtcgtaacggtcgcatcaatggcgttattgaacaagaagagctttgtagctccatagatagcttttgtgggatatactcttgaggtaatacatgatcttccaccttgtgcgaatccttctactatcgaatgatcaacctaataataaacatttaaattaataacaacggaaagaaattatatcattttacgaaaactaaatgaataaggttattgatatattaccaagattctcattgtcaatttctctccttttaagaccggtacaaagcttccatagatcggtttcaccacatcgtttgccaaagtcgacctataaaaaatgattttgattaattaataattacttgatttgtataatagaagaatctattaatatatgggtatagattgattaccttgaggtgtcagtgcagaagacagtattgagttttgaatgttttcccttagtcacatagaagtaaaccggagtttgttctgacaagttctcgtcagcgagaaccgagaatccaaaaggccctaaagcaccacgcgctgtggagcctccgtttgtttcgcagctgaatttattgtcggcctccacagagtcatcatcaaagaataacttgagatcatcggtcttgatctcgaactcagcctctatgtctagctgagtgcggaacccacatcgaccggaaccacagtccctggtccaatcgtcatgtcaaatttcttgctgcttagtctcaatgatttgatttcctcaactggccactggactaagtttttatgcgtccttgtgtccaagacaacagttcttgggatgccctgatcatggttacaaaaaaaagttaagccctaactcgggtaacaagtaactcaaagacctaacgttcatagcacgctacgtgaagaaaacgtacctgaacagaagaccaacccttttgtacatcagcagcttcactgtcagattcaccgatccaaccccataagattctccgtcccttattttgatcgtaaaacgtctttgacgcataatatttcccgtaatcgtatctcaaaccggtactgattccgacatcgatagaaggattatcggggacccatgtagcgtttgaatcatcgtacgtcccaatggcataatggtcaattctagtatcgtccatgctagccttgatgacatgcttgacgtctggtccgttgaccgatgtatcgagcccattgacttgagtcttcgacaccgggtaaaaatcaacgcactcccacattccggtgttggggacttggtgcaacaaggtatcgtgtttctcgtaggttttgaaatcggtagtgtcataaatgagagatattccggttctattgatctttgagccgatggtgattcgccattttccagaagatgtcttccaggctgttgttgggtcacggaagtcctttgcaccaatacctggaggcggtacgaggacagggttaccggagaacttgacccatttcaacaaaagtgggtcgcttgggtcttcaggataggcaaggttttgaacctaaaataatcaaaatgatatcagccattgatttgtcagaccaaccttagattgaaaagatttgtaaccaattatgatgttttttagtgtgctagatacgaattcggcaacaatacaatacttattatatagttacttattactgtaaatccatcaaaagcactttcaaaaactgatggaaaattcaatattaaaaattagttaacaaaacgaacaaagattttaagaaactcagtacctgtacgaattcgtcagtggaaccggtgtagagcatgacaatggagccatcatctagaaaagtggctgaaccggtccagacaccgtttgcatcgtaccattggtcaggaaccatggctattgggagataaagccagtggataaggtcttttgacacggcgtgaccccaaacaatgtcaccccacacagctgcatttgggttgtattgatagaagaaatggtaccatcccttatagaacaatggacctggacacgtttaacatttcatttgttcggattaacatttcactggtaaaataatcacaaattgagtattagcattcaaaaagtataattatgacttcaaatttactaatgtaaattcgaaatgatagcataatatattcatcctctgttctgaaatgctgagatagtgttttaaaaacaataaaaaacaatagaagaaacacgtttacttaataaaacaccacaataaagtacgacgtttcataacttcaataagctgttattactgtatatttgtgacttttaaggaagaaaataaataaaatatgacgtttcagttacaattgggttaatagaatgagtcaaatggggactgtccaaacacaataatannnnnnnnnnnnnnnnnnnnnnnnnnnnnnnnntcacgtggtgtatatacanaccaggcaaaancnnagtnggctantaggcttataagnctctttctgtacagattttgtctgtttactttacagtgataaacaaaaaaacttttt

SEQ ID NO: 16361 - DNA, 2780 bp, Arabidopsis thaliana landsberg
ggacacttaattgtcttttcctacatcacttggccccaaccgccttctcgtcttcttcctttccaatctcagtcaagccatcgagtttctccaacttaattggtttcaagcatgtcttcttggtagtagaacatctctccaaagatgtatcttccacagttctcttggaagatggagtagtcatgccagaaactgacattttactaccttcactactgttagtgagtagatacattgcctggaataattaaaagtttcagttcatagttataatgtgtagtagaaaacaaaatcgatatagatttcaacctcactgcctgagatgagatgatcaggattgattgtcccctctgagtcattaggatcctcaatcttcacattggcaacacctgaccagaccttaccaatcctgtaagtgtcattacttccagacaaattgtcattctcgacacacacaagtagctgaaacgtttttccaaccaagttcttgataaaaggaggcggttttgcaggatcctgcaactgaattataaatgacacgatataagaacttaatgataaaattttgatttgttaatcttattctgaattgttattactcacatcatcatcatacacgccatcaagcagatcaaatgttgtatcaccaatcatctcggtggcagctccatcaaacagaatacatttgatatctcctgtatgatccatgactccaacatgcaacttgaacctataaccaaatattttcttatttattttactaatcaatatatataaagtgtaggaatatattatatatatagtaatgagaacacgaaccttggaaacacttgtgttatgttaaggttgcatttaggacaccaaaatgtgagttctttaggcttaacagaaatggaggtgtcgttatttttcaactcaactttcttgctacatttcttgcacccaacataaaaccaacccatgtcaccatctattttaaaaatggtgcacatgatcttgcatttctgagcttgaataggtgcaagagtattagtccatcatttaataggatatcagttccagagtagcgaaccaatattcaataatgattagcctttatacctcagtgacatcaagtaagcaggctattgattttttaggatactggtcaaagtaaccatcacttccgaatgacaattcacgtcttggattagtctcggaaatggtgagagcaagaccatcttttggcaaactgtagttaccaatcagccaataaaccccaaacttaatatccatgatttattagcaatcaaaacacctacaatatagtatttgattacctgtttttgaaatgttccacttctgggaactctggattgatggtaacaactgaagcatcaaaagcatttgtgatttggttctcccctaacataaacgaaaacaaaaagtaaatcgtttcagagataatgtgtacactatcatagtaatagcaacttcagagttaaaataacggtttaggattttacctctgaaggtattgattttggcaaacctaataaggcacacaacaatctctccagttgagttctcacactcctgaattacctgatcagcaaacttcccccacaaagtgcatggcaggcgatcattccttaaaacacaaaccattttacaattattaatcaatatagtttatatatactaccattattctaaaaaagtaatgatacatttcgtttcgaagctcaaattccagcttcttggttgattcgttgttgacaactatgtcttcaactttgccaacattgacaacttggccaaagacttctgcaataagtagtgttgtgttaggttcacttcatatagatgacagaaatcaaaatactcaaaaataatatcgtttgttactactcaccaaccaaatagaatagattcaattcaccaacaataatggattcaaacgttggtaatgacaggtaggcatcattagtcacggtaggacatggtgaaacaaatgtactgttaacaaatgccattttgaactgatgatttgtcacacggaattgtcccctgacttgacccaaagagaagttctcaatgattctccactgatcaagggcaatgtgcctttcatactttttcaccagtgcctttttcacacttgcatggatcttgcatccctggaaagttcttatataacattagaaaacgaaattctataaatcagctcgacacataatttgtaaaaaatgtttagattgaacgtaccctctgatcagctagtaccatttcgagtgtttctcctgactgagctgtgtattgttttcaggtatggaggattttcacttgcacacgccagctggttttgaagggcttcacgtcagcaaggtaagtcgtagccattgcaccattcattttgtttataacttgttgctatttaattgcagtagggtgatgtgtttagggttgtaagttatgtgagtatttatagttttcaatcatacattgtttaggttagaaaaatggtataatcaaaatagaatttaagaatattctggaaccaaatctgcataactcgaagatatgaaatcaaaactgttatgatatataatgtataaatcccgtgtatatggccaagtacatcaagctgatttatgataatgaagatagatatatgatttggtagtttataagattttaggaaatagtagcttgtataatcgtcatagaatttaagaatattcaaaaacaaatcttgcataactggaatctatggaatcgaaactgctttaagatataat

SEQ ID NO: 16362 - DNA, 1215 bp, Arabidopsis thaliana landsberg
taattaacatcaatttcactgtgagttattaaacaaacgggcattacttagtcgaaaaatcgcatcaaatttttagaaaatgattaaagactagtctcctgtacgatttagtgaagttttcgatgttaaaaaaataaaatattcgcaagttttgtattcatgacacactcatcgaagagacaaattaattaagacagactgcctttgagaaattaaaaagggactttaagcacatggccggtccttagtttgacaaaatgagtcccttaatttgtcttattattataccttgagattcgcatcattgtagctgtttacatgaggcctttttttaatatttaaaatttataaattatcctaacttatttaagatagatgagggtttattttgcaaataactcttaagagtacttgctattattacagaggcatatacataaaacacaatacatagcgacatcttctcctgcttcacttgaacccgatcaaaaagatggacactacagaaggaaagctactacctacttatgagcattctctttttccttcagctcgatctataatgcgcgaatgtgctggctgccatgtaaatggtctcctgtacggcggctatttttgcaatgaaccttactgccatatttggttccataaggagtgcggcgaggctccattggagatcatcaaccatagtttccaccctcaacatcctctccttctcaccaatgagtcaagagatggtctatgcgatttgtgtggacaacaactattgtctccctcttatagttgttccacatgtgagttcaagttggatttgacttgtgggattaaaccatcaccgcctgctatcgaacatccgttgtgtcataaccatccagtcgtcttcttgaagatacgagaggagaaggttccttgtgacttatgcaaggagtctattgatggaccatcgtattcatgtcttgaatgcgatgtgtacttccacgtgaactgcgtaaatacctcggaagaggtaaatcatccttgtcatcctattcaccctctcaagttagtcgcatctgggacacgtacgaatgatttcgagaccagttgttggttatgtggagaaataccaaaaagcgtgttttaccattgtttcatttgcaatttcacatcgtgccttcgttgtaccaaaaacccaccacctcttgttattgatcatatcaagacccacaaacatcc

SEQ ID NO: 16363 - DNA, 634 bp, Arabidopsis thaliana landsberg
  unsure (1)..(634): unsure at all n locations
ttccctataatttctggttcgcatatctctctcgacaactcgtacttaacataattatagcaacaaatcaccacaaaatatactgaatttagaagattttccataaaattcaataacgtctatacattttttttgccgatcaatgcaggtttacaaacttcagttaattatgttagttaacatttttaagttttaaaaattttctatattaagatctttatgaaaaggaaaaaaaaaaaatgaaaataaaaatatgtataactcaatcattataatatagagaatagaaaaattaatgtcattgttaatctcattatgttagcttctaaataaattaagaaaaaatccttaattctaaaataaaataaataattagaattaaaaaaaaaatcaaatataagaagaagttttctaaaaaattaacaaatagtaataaacaaccgagagcgagttttcattcattaactcgctctcggttgcttattcaagatttatttgaatggatggtacgaatgtaacatgtgcagtaaatattagatttaatgtcttagtgagcattttgcaataaaaatctgtggatttcatgtttattacaaacagtntcttataaaacatttctcattattattaagaa

SEQ ID NO: 16364 - DNA, 1576 bp, Arabidopsis thaliana landsberg
gcagctccacaaagagataacagctcaaagctatggtaataaacgtcggaaaccacttcatttcttcaacacaaattgcaattctctaaatcaaaatctgtaatcatcagtttaaaggaaacacgccggctcataagcatcaaagcgacaaatcgcttaaactaatttaaccaacacatcctaaaacttattaaaaggaaataaacgaaagatgctgaaggtagttgtacttatatgatgtagagttcaaaaaacagaacaaaacaattaaaatgttatatactcttcaaaaaagaagagatgggtaatgtgattgtcgagtagcagtttcgaaatttagagagagcgtagagggtacaatcgtcatgttagtataaaagtgaaactcggaattaaaaactacgaaacgctgcgtattgaatgggtctgttacttctgcagggacttagaatttcaaatttagtttatctccgctctctttctctctcgaacttcctctgaaaactaaggctcttgctcttgctttctcgccgtcgtctgagtcgttagcagtacggtgatcggaaaaatgagtaagaaatcgacagaatctgacgctggcaatactgagaagcaatggtccctggcagatttcgagatcgggagaccacttggaaaaggcaaatttggcagagtctatctcgcccgagaagccaaggtactcgtttcctttcgattatgttgtaattgttagattggggtagaaatttcgttcagtttgagcttttactgtcatcgaaaccctaattttatgaatcaattgctgttttggttgaatttgggatatagagcaagtacatagtggcgctgaaagtcatattcaaggaacagatagagaagtataaaattcatcatcagcttaggagagaaatggagatccaaacgagtttaaggcacccaaatatcttgcgtctttttggttggttccatgacaatgagaggattttcttgattctcgagtatgctcatggtggtgagctctatggtgtgctcaaacagaatggtcatcttactgaacaacaagccgccactgtgagtctctctctcgctccctctccccttttaatcctaattttgcctgaaatgttcactttgttgcaatgttggttgtgcaatgcttctcaattgattcttgtgatgaaactgatggcttttcctttatttcagtacattgcaagtctcagtcaggcactggcctattgtcatggcaaatgtgtgattcatagagacatcaaacctgaaaatttgttgctcgatcatgaggtatgtgtgtatggttatagtttttgcattgagaactcaggatatgcatcattggtattgtcatatactcgcagggcgatcctcaaccatcatcatctcttccctcaggaaatgcattctcttctctaaccaccccaaagtctccccgtttacactgtactcgtcgtacctctcatgatactccacttgcccccctcctccttttttcagtagcaccactatcgtcacctgtccacacttccacctattgttagcttttttttttctctatctc

SEQ ID NO: 16365 - DNA, 1753 bp, Arabidopsis thaliana landsberg
tgtaagcatgttgctgtaatatacacgaactcttttatgtcagaagcgagagaaagaactatactacatcctttattcattatatatataatatatccaatcaaaaaatatatatatagatatatctatatatatatatatctatatatatatccaaataataaaactgtattcattggtgaacttactaaaatcgcttagtaaaagcgtgcaacacatataacaatgatttctaatgtaaaaagattactaaattttattgtgtaaaaatgatttcgcagactaagcaaagacattagccttggaaaaaaaaaaaaaagacattagccttgactcttgagcattagaatgtgactctgatcttggaaattgattagagtttgataatatctcgtgattgttaccttattagtttctcatacgtttttaatatggaccaaaattgaagtagttgtatcatccaccaattagaactacctaattatatgttttgatgaatgatgatgagaagttttttttttctttttctaaagtcatgaatatgaaaatgtgtcggatcatattatatatattgtgaatttgtcaattagggtgtgattgtttttttctagagttgtaaaaggtgttctctctgacaatattaaaaacagaaaaaatagcatgtctaattctaagtaaaataataaaattgccgacaaaaccgccggttctttcaataatcagctagttgaatatttgtatcattactctaaagattagtctaatcacatcttcttactatatagctcataaacgtcattgcttctcaaatgtgttgttgttaataaaaagaaaacgtcattttagtagttttgagtaatgggagttccctaataataatagttaattaaacaaagtgtacatgaataaacgagtcaaccaaataacaaataaaaacaagcgaatcgaaaccgtccatataactcaaaaagtacacgagggtataactgtcatttcataaatattcatgtattattcatcgattcgtttggcctttccagcgtccttcttctgactcttaccaaaattttatcaatctctccctcgccgcgccttttcgccggaaggacataacttttaccgggatttgttgtctacaagggaacctcgagcgcaaggctgtttaatcggaagaatctggagtcacggagaagcaaaaatgaacaaaaagagagaccctttatgctgagacggtttaattttgtatctgtggttatagaaaggaatcgtttgcgatgaaatggagccttatagggttattctgatcggtggttgaagcgttgtcatttgcatttcgtgtcattctggttatagactctgtttcaattgcttctcgtcgtaaaggcgtttgcttttgtgagtaatttatctcgattcttctgaaagacgtagaaagagagaaggttgtgtatagatattggaaatggggaaggttttggtgatgttgacggcagctgcggctgtggtggcttgttcagtggcgactgtgatggtgagaaggaggatgaaagggaggaggaaatggaggagggtggtgggtttacttaaggatttggaggaagcttgtgagacgcctttaggaaggttgaggcagatggttgatgccatagctgtggagatgcaagctggtttggtttctgaaggagggtcaaagcttaaaatgttgctcacttttgttgatgatcttcccaatgggtgagatttagagatatct

SEQ ID NO: 16366 - DNA, 1124 bp, Arabidopsis thaliana landsberg
taccccgagcgcgtcgaacaaacagtgtgctgctaaggccattgtcactctcacggcttccttgctcgttgccgatttatttctccggtatgatacgattactggtgactccggttcaattaaagctgttgttaaagctaaataagttaaagattgattagtgtttaatgttatgtaatcaatcttcaacggtttcatttgttcggagtgtataaattatatgtaaactaacataatccgaattgaaactcaaattgttatgttagatggtgttgctatgttagagagattttaactgctttttacattttattaaggatatatgactctaatttttatgatagcaagatattacatataataccagaaaataaatacaaagctcagtagtataatcataaccacaaagctcagtagtataatcataaccacaaagctcagtagtatttagggttaccaagcaatataataaatgtaataaatttgtgcgatggctctaaaaaaatgtaactttgtgtgatcagcagtataataaatttctgatctaaaaaactgtaactttgagagttgtctcaaaaccaactctctttcttaacatttatgaactattaattaatcaaaatcgatttaggtcttagtggcaatctaatttttttcctttcttacatttcaatctcttttggatttactttcaagtaagccatcttttatgttgaaacaaaatcttatggatgagcttcttttaaatgttttagccatttatcaagaatgtattgcttaaagagtggtgtagttctaataataataaatatatatatatatatatccagatatttttgttagtctaaaataatccttcttgaaacacaaattgccatgtcggtaggattcgtaattattttaaataatttcttgaaattgccataataagagaagacaaatgtggtcatgttgggggtcctagaataaagtagtttgcctcgattaacaccgaaagtaaaaacattgtataatcaattcctcttttttgttttctatttactcgataagattctcctaaaaccaaaaaggaaaaaaaaattcacccactcttgagattgtgtcaagaaacctcaaaaatcaaa

SEQ ID NO: 16367 - DNA, 2885 bp, Arabidopsis thaliana landsberg
  unsure (1)..(2885): unsure at all n locations
tttgattgttaattttaggatttcatccatagtatatcatcccatattaatatcgatccaaactcttcccactatataacctcgtcccgtgaaattaaacattattttatcattttcttatgaagttcgaatatttataatattggaaacttcaaacaaaaattaatatggaccaaacttcataattgtatattgattgttacatacatgatttcacccgtaatatatcgttcagtattaatatctttttaatatttataatatttatttcttataaagttcataaaattttaaaatcattaatatttaaatttattttatagagttttaacttttaaaaaagtttaaaaaattgtaatatttaacttttaataaagtttaaatagatataatatttaaaaacttttaagtttttagttatttaaaataaagaaccggagtaaaccgaataacacttttaattttggatgtctgatatatcaatgttcctgctcattcatattcacaattatgttggtcttttttatattatgactctaaacgatttcctaattttaaacaatgtgagatcttgtacacttatttttttcatcgattaagtattatatgtctgtttttaaaaatttgaattacatcagatgcagaaaaattaaatattttattaactatatgtattttataaataaagttaaaataaattagatataagaacaaatatagtaacataaaattatatatttatatttaatgtcgatatatagattttatgaaattagccttaatcgaatatagtttaataaaaaaagatttaattaaggataaaaatttaggaaagagttagttgaagtatttaatgaaaattaacaatttgtaagtttttagacataaagtatttggttgagattaaatttgtaaggactaatattgacaatagtaaataggtgatagatttttggccaaaaaccctgtcaaaaatgtatatgtagattgaaaattatttgtgcatgaaaagctaaaaaaatcacattgaatggagacttcttgatgcatgtggtcaaaccaaccctctntcatccgtttgtttcgtggttctagactcattgtttcttttccttttcatatcaacttgcattcaaacattctggtttatgagaaactggctggtatctagctcatgtatgttgagtatcatttgaaaattcatatagacagatactatcccaagttatgctgctagtatagttttcaataataatgtggtgagttcagcacctaaaagatgcgccctaaggtgaccataattgtttgctaactttcattttaggagtgcccgcgtgaacatcactcagaggtggaagatctcaaaagtcggattcagttgctgaccaatgagaatgacagtcttcaggttagtttttattggtgtcgttgactgtttaagtcaaagtgccctttcagcataaatcgaacttttttatcaagatttcctgaaactaaaagaaagatataattgtttttccttccttgttatcttcataatttacctttccttctngtattttttattgcacttgataagctggataccgagactggtttggagttttaatgatcatttaccttccaattatgtactgccaggtaaaatttaatgaacaagtactcctgagcaacaatctgatgcaagagatgtctgagctcaaacaagaaacgcttactgtgaaagaaattccgaataggttatctgagtcagttgctaattgcaaagatgtctacaaggatgtcatagtcactatgaaggtgaacagcttactttttcttgtgtaaatcataattttgaaatttttattaaaaggacatctcagctcactagtgtttctcttgcaatttgttagagcttaatcactgacaaggaatctccaacggcaaacctgctcctgggtacaactgaaatcacaacgagcctactggcaactctagaaacacaattctcaatgataatggatggtcagaaaacgggtagtagcatagatcatcctttatctgaccattgggaaacacttcgtgtgaatctgaagaacacaacgacgttgttgctgtcagacgcacaagcaaaagatgaatttttgaactcccacaacaaggtagcttccttgccactattgtcaagatatggatcaattttattaatctttttagtagttttgttaggatactttgtctctcttggtaggactttagtccagtgaaacctctgcatatgttgacctgcaaataaatctaataaatggcgttctttttacgggtttttttctcgtaatctacgatttcgtatcatacctataagtgtttcattttcctttgtctccggcataagaagtctcatcaatctaagtcaccgttttacagtacactgtcatttaagaagttaaaagtcaaaaccacatatgcaagattgagtacctcatttgggctaaacacattctttcgacattggaacttcacttgaatctctcccagagtcatgtttggttagttagatgttgtggtcagactactatttcacctttctctaagacaggttttgaatgtgattttaaagggacaagaaacagctgctttggaggagaagaaactgaagtctgagctcatcatcatcaaggaaagatacaacgagctcgagaaagagttgtgtttggataaacagcttctagaagcttcaagagaaagtcatgagaagctgataaaagaggtacagttcctgaaggaagaaagagattctttagatagaaaaatctctcaatcaactcagagattgagagtgatttcngtgataaagagaatgctttgaaagatcttaatgtgaagtgaaaggaggaaagata

SEQ ID NO: 16368 - DNA, 1127 bp, Arabidopsis thaliana landsberg
caagtggcgattatccggacctttaatgacatgcgtggaaagagaagcggtttgcaagatcatgaaagaaattcacggtggctcgtgcggaaatcattccgggggaagaactttagccattaaaataaaacgccacggattcttctggccgacaatgatcaaagactgcgaaaaattttcaaagtgatgcgaaaactgtcaaaggcacgcgccaataatccatcagccagccgagctcttgtcatcaatcgtctcgccgtattcattcatgcgatggtcaatgaatataattggacctatgcatccctcgaagcagaaaaaattagttctcgtcttgaccgattatttctctaagtggatagaggctgaatcttacgccagcataaaggacgctcaagtcgagaacttcgtgtggaaacatatcctatgtcgccacaggataccttatgagatcgttacggataacggctcgcagtttatatcaacccgcttccaaggcttctgtgataaatggggaattcgacttagcaagtcaacaccacgatatccccaaggaaacgaccaagccgaggccgctaacaaaacaatcctcgacagattgaaaaaccggctcgatgctaaaaagggctcgtggtccgacgaactcgaaggtgttctatggtcgcatcggacaactcctcgccgagccacaggagaaaccccattcgccttagtctacgggacgaaatgcgtaattccagccaaaatgatagtaccgagcctacgccgaagtctatttcccgagaacaaccctgataatactcagaggctcctcgacaaactcgatctgatcgatgaacgaagagattcagccttggttcgcatacaaaattattagaatgaaacggctcgtcattataactcaaacgttcgacagcgaagattccatgaaggagatccggttctccgaaacgttttttagaacaccgctgaaccgaacgctcgaaaactcgggacaaactgggaagggccataccgcatctctaatgtcgttcgacccggagtatatgagctcgccgacttaaacggctaagccgttccaaaatcttggaacgcaatgcaactaaggaaatactacaactaaatcc

SEQ ID NO: 16369 - DNA, 1491 bp, Arabidopsis thaliana landsberg
cctagaatttttactcttaattgaattcaatcgttgttctgttttggttttgtatcttctttattcataattacagaggcgaatgaaaagatttaggtgttttcggtgagacatagtggcttcacattattgtaagtcttgtaatttttaattatgtatgtgttcatgtgtgcatacatacatgccttatttgtttgaatttagaatgcaggttttgtatgtgttcatgtgtgcatacatacatgccttatgtgtttgaatttagaatgcaggttttgactggttagcgtcataaaggtaatagtcttggtcatcgtgatatgccattagaatttgatgcttctctgaggtatgtcatttgtttaactgttactagttaaaatgcatgactgaggtttgttaattggtattattattatgtttttgctttgcatggactttaggtatagaatacttggtgaaaaactctcgcggttgttttttattatgttagcattcagtgtttcaagagtacactgatgaagtttgcgccggaatgggaagaataatttctcacatccaatgtgtgatggctgctatagttatgagacaaggtacgaaatttatttttttggtctcaagattttttccgatcaattttgcagtcaccctcttagcaaacttagaatctttcttgatctcttagaatcatggagactaataaagctacttattccttctttttttcaaaagttcttacacagaccgtaaaagaagggaatgcatcaacgaccttttagcatgaatagttagtctccccggggataaggattgatcatagtagaggtatatcgttactctgaaaatatttcacaactcatttgtttttttgcataaacataactccaaatttcagaagatatgagaagtttgatgttccaatggcctacactatagagcaacaattatttatgttggaatagcttggtctgcaagtttttaccactaccatttgttcttgacttctttcatgggttttggttagtatatgcaggtaacaattacttttctttttgttgagctcaaatatataccactcatcataaatactgatttatggttttttccttccacgttcggtgttgagggatttgttcttcggttggtttacaagagggaactttactatgaaaaaggtaagaaatattggcaatcgactcttgatatctatcaaattcgttttccttatcattcattgtggttttgttttcttttcttgtgttgtattgagggcactaaatcttttaaaggtaagaaatcgagtctagatttgacaatacttgtctattttttttatttctattagaattcaatcatcactctgattttggttctactttctttattcgttaaggaaaacatgaatgcagatgtatgggtaatgaacttagctaacaaatgtgtattttctaacagggaagaagcttggaaaaaaagaacaagaaaagatca

SEQ ID NO: 16370 - DNA, 1703 bp, Arabidopsis thaliana landsberg
gtaaaacggtgaccacaaaactggcgcaagccagaaccatgcagtagagacagagctcgacctttgactttgataatggcagtttcttcgaaacatttccaggttccttcatctttcacgcttcctccatcttctttcttcagctccttaatcccttcttctccaatctctgttactgcttcaacgattcgagcctccacaaaatttagctccatacgcgtccgtttcagtcgaagatcaatcgtcagatacaacgaccacgccggagaagacgaagaggatagtgacgaggataaggaagaatattggagctttgaggaagcagtgactctcttcaacaagagggattattacaaaagtcatgacgcgcttgaagctctttggattcaagcagaggaaccaactcgtaccttaatccatggaattcttcaatgtgctgttggatttcaccatctattcaacaacgtaaatctactctccttttaactccatctattgctcgttttcgttcacgtttgaggtaattttagtgagtgttttgggatttgaagaaccataaaggagcgatgatggagttaggagaaggagtatgtaagctaaggaagatgaatttcgaagacggaccgtttcatgaattcgagcgagatgtctccgcagttcttgaattcgtttatcaaactcagcttgaacttgctgcctgtaagttttgaattttgaatttttgattgaggaaaccatttagcaaattgaacctaattgtgacactcaagaaatctgaattgattgatgataggttcagaagatatgtgtttgacgatggatcaatcagacagatcgtatcaactcttaggtggttatgcagctggagagagtatttacagcttagagactgtgcttgacttcaacaatggaatgtctgagacaacttctatactcttctctcctttacattcatcgtctgagccaactcgggttaagctccctacccttaccgcaaccgataagcatcttcttgcttctacatacgacgacagattctaaagagaatgatcaatacgaagataatagaagaagatctcattactgttatatttcaagaatcaggtcctgaacctgtcaataacatgaacaatgagtcatttagacaaaaggtaaaaacacataacattcctgtctttttaaccagcaaaaaccagccatgaatgaaattttagaacaaagcgaaggaacattctttatgaaattacataagaaggtagtcaaaaaaaaaagaggagaaagccgaagaagttgtttcaatcctcacttagccatcataaccttcacaaactcttcgtagttgatctgaccatcaccatcaacatcagcttccttaatcatctcatcaacttcttcatcagtaagcttctcgccgaggttagtcatcacatgtctcaattcagcagctgagatgaaaccgttctggtctttgtcgaaaactctgaaagcttccttgagttcttcctcagagtcagtgtccttcattttcctagccattaggttcaagaactccgggaaatcaatggttccgttaccatccgcatcaacttcgttgatcatgtcctgaagctcagcttcggttgggttttgaccgagggaacgcatcacggtaccaagctcctttgtggtaatgcaacctacacaaagtaatcaaagattggtgt

SEQ ID NO: 16371 - DNA, 1995 bp, Arabidopsis thaliana landsberg
attccattagagtagctaacacatacaaagataaaaggactctaagatcccaaaatttagaacaacataataaagggtataccccaaaattactaacatgaaaataagagagtagatagagttaatcgacaaattatcttttgagagctttgaaccaaaagctaaagggctttgtagaacatgtaaggtcaaggtttgtcgaagtttcttccaagagcgagtcattgggtgaacgaattgttaatgtcgagagatgaaatatcgttgatgagggggctaaagataagcttctcgccgacacgaggagaactacacaaaatagtgatttagcaactgttcgggcaatggtggtggtgtcgcagtgagggtttaagggcatttgaccaatgttgagcaagtaaacaaactcgcaacttacggtatttggtgaagctattataagggttcgcacatggaaagagtgtaaagccgtaacataataggtggatcctctctcatattgattatgacttcgataatgctaaatcacaatttggtattgtgcatccgttcacaaaagttaattaaatcattcgaattgtatgttctttggcgacccgtacgatacttgtttgttgataatccacacacatgggctgaggaaagttttaacctacggcctaagtactaatcacattctttaatcgaacttaaggcccaagtgctaaatcacgacacatttttttaatttcatcagagagacaataaccgtaacagcgcaacaaataacaaactttaaagacaaaatgtatttccaaagagcaaacgtgaaacagaaagatcgtggtcataaagacaacatcgtgggttcaagatgactagataaacatgagttatggaccttacggttttccaaaaatccattttttaaccattcattattggattctaagaatttttactaatttcttaacaaaatccaaaatctcatttcaatggttttttttcaatttcctctacgagatccttttttctttcaattttccatttgattttttttttttttttacttttgttacaaaatccaaaaaccaaaaactaaggccatgaatgtttgtaattttaaaaatggtttttggattttggtttttggtttttagtttttgattttcttggtttttgtttttggtgtagattttagtttcttaaaaacttgaatggtagtttgtttagattttggtttttatgttaatggataatatttttgaacaaaaaaatctaaaaataaaataaaagaatgtaatggatggttttatgattttggtttggtttgaaaaattgttaaaacactcaaaaactagatttcctatattttaggaaaacttgttttttcaaaatcttgaatggctacaaaatagattttagaaaaaattaaaaccaaaaactagtttaaaaaccacacccattcaaggccataatatcaaaaatcaaaaaccaaaagccaaaagccaaaatttagaatccaaaaacccaccaaaatcaacaaaacattcatggccttaatctgtaagaactttaaagcttggataattaggaacagaatatatcatatttgagagttaaatatatcatgctttttttccgccgtctttcattgaatcttgcatgaaaaacgtagaaatgtcaacagttttgagcaaacataatcaataattaatatatgatttcatataactactctaattaattcaggagagtggtgtgtgtctgtgtgtgtgtggtgggggggggggagggaaacaaatttttgtaagataatattaaataattatgtttactactgtacttaaactagctattattttaacggttagaccaaacagatcttaattataactttcttatgcttgtgaaataccacattaccatacaaccttccaccatgtctacttgccataagacatatctttcatggttaaaactttcttatgcttttgaattttctatgggtaagtt

SEQ ID NO: 16372 - DNA, 1438 bp, Arabidopsis thaliana landsberg
gttgcgatacacaattgtttcaattgcggctggtaattacataatcaattctaccttcacgtacttgttccacttgaatccatccatgtctccaatccttcttgcccattatataccctttgatcacaagatcaataacatgtaacaaatccttgtatttaagattattttgtgaaactaagtagtcatattcatgagaattaacaccaactattggtttcacttaaacctgcaaatatatccctcgcaaaattgcgaggtacttgcgaggaatttgcgaaccgaaaaccctagatattcctataatagagaagagattcgacaaaaagaaataaaatcgaacgaacccaaatatcaaaattttgtatcatcaattttttaacttcaattgattcctttactggagaaacgaaattccttcaaattgttctaaggaagaaaacacaatgagagagacgacactttctctaatttgtttttgctttttgtaactttcacagtttccttttccttttttttgttttggttttgattgaattttagctttagtgaatttttactaaaacggtttgctttttcgtaaataagaggtctatgcccaataactaacagttaaagtgttaacattataataactttttcaatgctttaaaaaccttttatcactacaagaaaacaagcgatttgcgaggaacatttgctctggaaaaggtccctcaaaaatttgctgcagaattgcgaggactttgcaaggagataagagaacctcgctaattcgtcgcaaaattatcttcttcctctttttttttcttcttctttagtagaactggcaggaactctatcgatccctaaatagtcctccatccttccactttgtacctaagatcttcacagttttcatagacaagtcctattttctcactaaaggacattgatttcctttttctactgcgatacacaagtgtttcaattgcatgtttcattacataatcaattctactttgatgtaattgttccacttcaatccatccctgtctccagtcatttttgctcattatataccctttaatgacaagatcaaaaacatgtaacagattcttgtctttaagattcttttttgaaaccaagtggtcatattcatgagaattaacaccaactatgggtttcacttcaaccttcaaatataggccaagttccaaactgtgtaagagtcatgcacaatttttatttaatcttttaaaatctcttgtaaattgtttaaattgcctttaaccctgtgaaaatccttaaaacttgattgtaaaaactattgtaaaacatactctttatttataaacagtgtttaaaacaaaagaaacagtgtttaaaacaaaaaaaaaaagccatatctaagaggatgtaccggggcaccatctgcaattattgccatagcttttgc

SEQ ID NO: 16373 - DNA, 2424 bp, Arabidopsis thaliana landsberg
attgatgatgaggaagtagagtcttttttgttctctggcatcttctgttgtttctcaatcatcatctgaagataccgaccttgttcttcgatttgtaactgcagtgatctttggatctgcattgtattaagaccaatataagatcaaaatcaccagctaaaaccaaaaactaagaaatcagacaaatgaagaggaaaggacactgttttgttttataaaagcttcttttaggcagtttgaattattatacctcaagttgctcgtggagttgtttttgaactttcatctgtaaccggagagcttcagtgatttcaatgctcctgaagaagaataaaaaaaaaaaatcttagatatgaagaaatattatcctaggtgatactgagtctgttctgacagagaagtaaaatgttccttacgtcttcaagtcaagagatttgatatcttcaatggttttcaaattctttactagaggttcttctgtccaagaagaaaagctgattatgtataaagacgtgtttcatcacacaagagtcttttaaatgccattatgtttccaaagtataataagcttatgtgaaatattgagaagacagtttgaatccttagatgcctcaagtacctgtatctttggaaagctctggtttataccttgcagttctgtatttctggacaagccaataatataaagacgtttaagatgagctgtaagcatacaaaccgaaaacatagatggagaatagtaacctgcaaatggcttttgacatgataaacggtcaacccagggctattgatgagcttcaaaacagccttaggggtggctcctgtggtttgaaattataagccaagagaataataataagttgttcagctaaactttgcaggcatgagaaggaaaaaaaaagggcatacgcacgttcactaccaccgagctgattgatagcttcgacaaatgcttcatgaagttctggtgtccaacgcattctttgcttagatgtcattgaactagctggtgggcttttggcattaaacggctccattgatggatccacctgatgctgatttctaaagacgatctcttgccttgctatatcagaagactgtgtttctatctgtaagacattatcagagtcagtcttaatagaagaatcatatttagctgaaataagcgtagagattcatatttagctgaaagaaacgaacctttgaatatagattgagtacattaggatcacctagaagctccgaccaatttggttcaagactatcatcagagatcaactgatccgcccagtctggccattcgcattttgaaagcacttccttggatgaaaccatagttctgctgctcgctgcttgtggatctggaacaggaaaatcgaagaagccccgaatctggtctgaagaccaagtcataattttctgttcttgaggttgattgatcaattgcaaggaatgtgtttccacagggcattcctgcctctgcccttcaccagagacgtgagcaacagtaattctgtctcttggcacggtagaaacagatggccgtgcctgggaggaagatgaaacatagacaccattgcagaatccggaagaagatgaaaacaaattcccaccagaactaccaccagagaccagaggaaacacctgacagggtacggggttgttattcatcgattcctgtcctgatgaaacacacaaagtgttaggaaagttattgtggtatctctcttctagaattgtaaaagatgaagatatagcggatggaaaaccaaaatcgctagcaagtgtcattgaacaagtgcagtattgagaagataacaatagatatcagagacttagcacaaaagggctatttagctttacaaggagtgttacatagaagcaatatgagaactcacaatcactaagttatatatacagaaaatgactctgtatgagtgaaaaaattccattcgcctagttaatatcctatatgtatttccctttcaaaactttccaaaggaatattcttcactttttgttttgcctttggtcataaaaaaaactcttagctttcattcactttgtttccctaaagttcttcaacatataccgcaagaggaaagatacaaacgaacaagaagagactctttgattctctatccaaaactaaacttgtttcagccattaaccaagagaaactatcatggaggtgacagatgcataaaaatcaaacagaaataagatatagaatcaaatgcaacgggaaggatattaacacgcaatttggctaaagaggaaagcaatatggcttttcataaaccacagggacgtgcaaggatgagagtcaccatgagcacattatatcattctaatcaactcttatctaatagaaacctcatcacttcaaggaacaagaatcttacagagaaaccaagtcgaaaa

SEQ ID NO: 16374 - DNA, 2065 bp, Arabidopsis thaliana landsberg
ggcataagtaaaagaatctgcttaagctataagcaaatcaaaaagcatttatcatccattcattcacctgaagatataaagcaaccttctctttttctaagtggctcaagttaaatttctcttttgtgtttcttcgtcttcttcatacaaagtcaagcatcaaaatcaagtgagatttaatctttaaaggtcttaagaagatttcagattcaatcaaaccatggttggtatattttcaagattctctgttggtagaagcactcatcgacgaacacaaagtgcaatcgtaagctctctgtttcatctttttacagcttctatgttcgatgagaaaatccaattttagatcgatttcttatgaaagttcaatctttagatctttctttggttcaaaacagtggaaaaatctctcctttagctcggatttgaaatacccagattagattctacactactgttcatgatatgcttgaattcgtttagcttgccctaaaagctttggcctttttcaattgtacgaattgggttttgttagattaatcttagttattgaaaaatgtcttactttgaccaggatgataaggaagtattggctccaaattctgatgttattgcagcaaccaccacaactgcaactactgctactcatgggattgaagtagctacagagtttaaaccggtggaacatccggtcgagccgttagacaacgatctaccgattcagtgtccattacctgaaccatccattctaaatgtaacatccacgaaaaagatggttctttgttgttctgtttatagaaagctcttagttttgagtttgtaaacgtttttgggaatttttgatgaaacaggatgggagaatctggaaggagagagtatcagcgtctatgaggagaaaaggtgatttgcagattgtgaaagatgaggctgcttctgagtctgatggctcagcaccgaaaccgcctcgcccgcctcagccaaatcgttcgatcttgccatcacttagtgcccctgaacacaacttgctaaatctactagaagaatgcaatgcgatgccaccggtaacatctaagaatggatgaacaaagttgcttaaactcgatatttatcacaccgatacaagattgttccttacaaccactctcgaatctttgtttttcgttgtttacgatttttacttatgtgtgtgccagaacaaaaccaaatcatagtgtattttatatagattatacaggcaactaaaattcattaagcttctgctctatgtacctcaacaacaccaatattctacaatggaagtaagagccaggttcgtctaagctgtaaatagagaactttaaacactttaactgatgttactttttataggaactttgctctttaggctttaacttttgcagtgtattattatgtattgagttcttctcaagtaaatttcactatcagcattatatatggtaagagagaaaagtactttgcaaactcaaagaaactttgtttatccactttgggtttgtacttcaacattaagaaaatacataagagactttactccttatattgcttgcaacaactgatctttgtatagttaaatcttcaattcaaactgaagattcaggaactgtgtaaacatctaccactgtgggattcactagatgttttcgtggcccacgatagctcccgtggttaatccttgctctttgattgaatcctccagcctgatttccttcggtggcttcacggttcatcgcataattgactcgagttcttgtaaaatctgcagaaaccataagaaagtgaaggatcaagagaacaataagaagagttggtgtagaagatgagagcttcaagtgacccattactcttttgtttttctaaaattggcaatatggatgtgaaagagagttgaaatgatgacaataaatagaatgcaaaaagaaagaataaaaggagataagatggaaattaaaaacctttgctttgaattgaagttactctcatgactcacatgactctgtttgtgcagttcaccaaacttcctactctttgctacttctaaacatat

SEQ ID NO: 16375 - DNA, 2392 bp, Arabidopsis thaliana landsberg
tcagctcattatgacaaccaagtctgtgaactatgtgccaagtatgtcacgctagtcattgattactttcaggagtacgacagccagaatgaactcgttaggccccttcatatcagctgctctcagattcctcctctcaaaaaacaggtcttcattgagtccttggttgtttttgctttctctattccttttctcagacgtggttatatgttaactatgcccaactcatgtgtttgttgcagtgtctttcaatggtagatcattacacccaacttttcttcacacaagtctctactatcaaatcagaccaaatctgcaaacggcttaacctctgtcaagctgtgacaccggcctttgcctctcaagtccatcaaggaaactgcgaggcttgccgcgagactgtctctgaggttgtcaccaaactcaaggatcctgagactaaggtttgctcaaccttcattccttctattatcacatacctattctgtgtcgcaaaccttaggcttagcactaagaattatatcagttagagatatttattattgctgctgaagattgacttttgccttgtgaatgttgcagctgaagataattcggttacttctcaaggaatgcaagtcgcttaacaattaccaggacaaggtagctaactaataaagaatgcccgcaaagctctctctatttaagctgagttttgtgatacttttatggatcatcatcagataataacaatgtgtttgtttatgatggtgaatagtgcaagaagatggtattcgagtacgggcctctgatgcttacggatttgcagaagtttctggagaagaaagacgtgtgcactatcctccacgtctgtccaggtccagccacccaccgtgactacgttcctgcggtggagtcattggcagattcgtaaattcggccaccttggtttcgtcgtcattcacactaataccatgccatgatcgtgatgctaatttaatttggtaacccggtgctcatgtaaatactgattgatatattaaaaacataactacacgattgatgattcttgtgtgatttgaaaagaacgctgtctaaaggcccattgtccatcgatgggcctttttgctaatttctacattgcccatgttgtgtagtctgattttcgctaaaacgttacgttgatgcgtgtactcaatcactcgcccaccattttcttctgtgaaacagttggcaaaagttaggggccgccaagctggtttaaactgacccacaagcgaataaatgtcagacgcgtgtaaaggacaaagagagcaagtgtcaccgtatctataaaagctaacattagaggatattcttgcttacgtgtgacatcgtcactggtacatatcatctaaaggaatctttgatcaacactactctggaaaacaaattgtatactatttataaatctgttgactgtatgtatattcagaattatgtgattgattgactaaaagcgactgatttttaaccttttataatacaaacagaacagtgtacatatccgatgtggggaaacaaatccttttattgggaaataaaatatattttgtaaatgaaaatttcgttaaaacaaaccttaatgcttatcgtatatttatttagcttgaaaactaaagaaaagatgtaaaaaaaaaaaaaaagtttggttagtgtgtgtaatgacgatgaaagatgatgagaagtgataacttattttaagggctaagaacaacaacaaagttgattattagaagaaagaaataattaaaaagcaaattgcaaacagcgaaaagagagatgatgacaaaaaatggttagtaacggccaaaaggataaacaggttggctgctctttgtttccattaaaattagtaaaaattccgagaatggcattttcgcaattcatagatatcatcaacttgtgtgtttgttggccgattataatataaaggaagggaaactcttcttctctttcttctcattttctctctatttgtcgcagctgaagctattttgcatatacttgtcttcgcttttcgtagctctttcgcccataataataattgaggtaattgttcgattctggttcgcagcggattttttcgatgctattgaggaatctagatttctgtgatggatagatataatacatatcttatttctctgttccgattcgatctgtttgtttcgttcctagttcgatctacttagatttcgtccatgtttatagctctcaatcgctttgaatcttgtctttagtgttcgattttctggtgtttaattaggagcaaactaataggccttctttgttgatcctgtcatttatggtttgctctctatgtttcaggcttgttgtttaatcgagaagagtatgggatctaaaaggcagg

SEQ ID NO: 16376 - DNA, 2646 bp, Arabidopsis thaliana landsberg
  unsure (1)..(2646): unsure at all n locations
agctcatgcatgcactgctgattgaagtctatgactacctcagccacctctgtatgctttcaaatcttaacttattaaaataagttgaatattatcagctaaactgtgtttttttttttgttggttaaaaggatgggattgaagaatgtcgtaagttatgtggtggacatggatacttgtggtgtagtgggcttcctgaattgtttgctgtatatgttcctgcnnnnnnnnnnnnnnnnnnnnnnnnnnnnnnnnnnnnnnnngtattcttaaacttatcttcttgaatatcacttttaagaatcatttcaagcccctactctttataatggcaaatgaaatggtcttaaaattttgttatatatgttttaaaacaatggatcttcaggttgctagatttctgatgaagacagtttcacagttgggttctggaaaggctccttctgggacaactgcttatatgggcagagcaaaacaccttttgcaatgcagttccggagttcgaaactggtgattttttcatggatactaccataatatttatactctttatatctacctgttttctgaatttatcttggttgagaatgtagctagggactggttaaaccctggtatggtgttggaagcttttgaagcaagagctttgaaaatggctgttacttgtgctaacaatctaagcaagtttgagaatcaagaacaaggattctcagaactcttggctgatcttgttgaggctgctactgctcattgccagttaattgttgtttctaagtaagtaaataagcttcttcactaaaattttacaaactaatcaacagactcaaatcataacttacgtgaaaattcacaggtttatagcccaaagtagagggagatattgaaggaaaaggagtgaagaaacagctcaagaatctatgctacatctacgcactctatctccttcacaaacaccttggtgatttcctcagtacaaactctgttactcctgaacaagcctcacttgcgaaccagcagcttcgatcactctactctcaggttcgaccaaacgcagtggccctagtggacgccttcgactacacggaccagtatcttggctctgtcttaggccgctatgacggaaacgtttatccaaagcttttcgaggaagcgttgaaggatccactcaatgactcggtggttcctgacggctaccgtgagtacatccgaccgttgattaagcaacgcttccgctctgccaaactctaactctttctttgtgcggctaaaagggacaacactgttttatttatgttatattttattcatgtttttaacaaatgtgaagtaaactacaaatatcttaagttatatgggtgataaattaatatttgtaaaatatcacatttatttatctatgaagaaataaaacagattaattgcatatacaattttgtggttgtactattgcatttgcatgtcagcagattttacgatcacatttagttttatgtgttgcccttttgctttaccttctattaattggcttttttcgatccataaagtttccttacgtttttagttattaattgagcaattaataaccgaattagttagttgaatatgtatttatcatacaatttgtggttgtactattgctattagccaactgttgtcgtctatctaaatcctccaacattgaaaaaaacaaactaaaacaaataatacattcgtattaaaaaagaaaacttgttagttggttagtagtgaaggtagttacgacaccatccttaaattaattttgacagcttatgtctttaatcttgtttaacccaagagtctaaattaaagacgaaaaccaagtttgactgactcttccgatatatgcatgtacactatatcacatatctatatgtgcatgtatatatgagtatgatctatatgactatagatgtatgtatatgtgtgtacgaagcctacgagatcatataattggcttatgtaacatctcatgtaggttgtcctttcctttgtagtgtcgtgtcttatcgtcaactgtctttgattgttaatttgtatagtacattttaagtaccttgtactaacgtgtgctaatgcggtttcttacatgtgcgtctctatgatcaatggtgtattcaaattgttcacttaaacacacctttcttcaaattcttaatgggattgcacatttgcaaacctaactcactaaacttcgatcatttctttatatgctagttctttatatgctagatacgtataacggctttcagaagatttatccaaatggaaaacttttatcatttgcgaatcaacaccaacattttttttggcttttttgttttctatgcttcccaacaattatgtgataggtaaatcaagtagatgaatatttaccgtttaaagtatagttttatatgctctatttttttgtttctcggtgtggatcaatggaaaattggaaatcttctactattttttcaaaccctactttttttactaaagtagctatagctaaaagaaacaccttagtaattcactaattcttaagctatgtattcactattatattcaccatcaatgtatactacaaaagagtggctaaactgtaccaactcgagaaagtccgataaagtaatataccccaaa

SEQ ID NO: 16377 - DNA, 2082 bp, Arabidopsis thaliana landsberg
  unsure (1)..(2082): unsure at all n locations
ataacagaaatttcaaacagttcaaaatgagaaaacaaataaaaggcactaaacaggaagaatgtgtgtgtagatccgccacctccgatcaagaacccaattacgagaacaacgctctgacggggagaaaacgaaacaagaacacagacacgcgaccaaataccaaactattgtaataaaactaacactgtcctttgattcacctgcggcagatagagttttgaggatggttcacttcgcacccttcttgacggcagccttggtaaccttggctccggttgggtccttcttgtcaacactcttgataacaccgactgcaacagtctgcctcatgtccctcacagcgaaacgtccaagtggtgggtactcagagaaggtctccacaaccatgggcttggttggagtcatcttcaccataccagcatcaccattcttcaagaacttgggctccttctcaatctccttaccagaacgcctgtcaatcttggtcaagatctcagagaacttgactgcaatgtgagaggtgtggcaatccaggactggggcgtaaccgttaccaatctgaccagggtggttcatgatgatgacctgggaggtgaagttagcagcacccttggcagggtcatccttggagttggatgcgacgtaccctctcttaagatccttgacagcaacattcttaacattgaacccaacgttgtcacctggaagtgcctcaagaagagactcgtggtgcatctcaacagacttgacctcagtggtcaatcctgtgggagcaaaggtcacaaccataccaggcttgatcataccagtctcaacacgtcccactggcaccgttccaataccaccaatcttgtagacatcctgaagtgggagacgaaggggcttgtctgacggcctcttgggctcgttgatctggtcaagagcctcaaggagagttggtcccttgtaccagtcaaggttggtggacctctcaatcatgttgtcaccctcaaatccagagatgggcacaaatgggattttgtcggggttgtaaccaaccttcttcaagtaggaagacacctccttgatgatttcatcgtacctggccttggagtacttgggggtagtggcatccatctacaaacaacatgaaagaaaaatccaattaatgagactgaacacaaacaatttgaagcaataatcacataagagataaaagaagcttttgttaccttgttacaacagcagatcatctgcttgacaccaagggtgaaagcaaggagagcgtgctcacgggtctgaccatccttggagataccagcctcaaaaccaccagtggtggagtcgatgataaggacagcacaatcagcctgggaggtaccagtgatcatgttcttgatgaaatcacgatggccaggagcatcaatgacagtgcagtagtacttggtggtctcgaacttccagagagcaatgtcaatggtgataccacgctcacgctcagccttaagtttgtccaaaacccatgcgtacttgaaggacctcttgttcatctcagcagcctccttctcgaacctctcaatgacacgcttgtcaataccacccaacttgtagatcaagtgtccagtggtggtcgactttccagaatcgacgtggccaatgaccacaatgttgatgtgaaacttctctttacccatggttagagactgtcaaacaaatctgcaataaaaagaacaatcaaatattgaatcaagaaaaacagtagacttatgaacacaaaaaacaatnnnnnnnnnnnnnnnnnnnnnnnnnnnnnnnnnnnnnnnnnnnnnaaaatgtggtgctctatcaactgagctaagcgacctaaattcaatcaaaacagcaattctggagatatacagcaaacaatcctagagtttccacaacttggtatcaagaagaatgaatcaattgattgtttatgctgctccagaattacctaatcacaattcaaatcgacaattaatatcacatacatcaaaacatccaatcaacaatccattgaacaatacaaaaaattcagaaccagatcgatcatatagtttatcatcaggtggcatg

SEQ ID NO: 16378 - DNA, 2404 bp, Arabidopsis thaliana landsberg
gttcagcccatagctcatatgattgttgaggctgtttagttcccttgatattacggagcttacaggtttctttcggttattctttttttggagcttcctcttttcctaagcacgcttatctttctgacccgtaagagctgttatgaaagccatcgtgatcttttggtctctatccaaaagtcccttgatcagtgcacattgagttcggattagggacctgaagaagccacgaggtggagaaggccctcttccaggcacgtttgggatgtcttcgtccatcatcccgaccctcgaaaagtatggcatggattttaaacatcgaaggttaaactccatagctgcaaaaagaaaagaaagtttagatgaaaaataaagagaacttaagagttgaaatttatagggattttaagatcgcaattccattcgagatctgagtgattcgtggaaagactcacgccttcaagtcttcccagcatttataacatatctccaaaacaaatattttgaaatcaagaaaataggaaagtttccatgaattaaaaatgggccggagcccatagcaagttcaaaaggaaataaataaaaaacaataaagtaagtagcgagttcaaaggacatttatggaagaggctcacgaacaggctccttcaacgccggttcggggttcgaagtggacgcttcatttttgtcgtccgcctcgaagtcattcttgacacgcttccaggggttgctatcctcctcctcgtcgtcgtcctcctcactgtcggatgggatcacctcgacaggagcatttacgggaccggaaacttgaccacaagcgcggaggtacatccggagcatagtcgggatcatggctacgcagtcgaagttcctccactcccattgaaagggatcactctccatggccctcaccttcctttctactcgagcgatgcgagcctcagcgtttgcctcttaaggcctaaacgctgcctctcattgcacaaacggcgatgtttgtcgacgacctagcacaagaatcgtttagtatgagaagaaaagagagatttttaagagaaagaaggataaatcactaccttatacatgaagtcctacgtctctttcttatccttcagaggaaaatgaaaggcggcgtgcggaaagaaaatgtcggccggttcgaaaccgtcaccgaataaaaacaataggctgtcaggatcgagaggacaaacggtggaagctccttcgttttccatccttgaagtgtttaccaagtaaatctctgagatcatgcttgaaaaaatttaatggcaaattgtactcttatttatagtgaattagggttttccttggaaccacaaatttaataattgtggcgtgtccgaatggtttaaaccattttttgaaatccagaaaaagcaattatagcctcaaaggcgtgaagctttttcctgtttttcgagaaaggaaatggcaaccgtcgcattaaagacaaaagactcattaaatacaaagaagaatagttgaggcccaagcccagtaaaaagccaaattgattaaacccgagttgggaaattcgcaactaaaaacgagctcggttctcgcgttttaagagaaaggtctgatcaacccaaaaatcttgaaacttagccacatggccataatatacttaaaagaacggactttgtaaatccgctttctatataaaataatcccctcgggatcatagtcataaaggtttaaaagcctcttcaggcaaatacttgttcgaaaataagaagcctcctatgaatagcgataaacaaattagttcaaaaaataacttcaaagtttttgggacaacccacattaagtggatacagccactatgagtcttcagtcaactcggacccaacgtgaactagctcaggattgatggtcgatggaagcatgctcgggctcggtcggttcgtcggcaagaggttgctcggtggaggcccccggctcgggaccatattcattcttgtcatccggaatgaccaccgtctcattgtttatagacgacgggacctcaggtagagtggtgactagctcggttgtttttatcggtgtggcaaacacctcgggttctgtgggttcgctagaacctgaagcgagttttgcaaattagcaaacgtgattacaataataataggtaataaggtttaagatataaaagcttaacatcccaatctaagcctgattcactcaaaggaggagattcggtaaagaactcttcaaagtgctggggattgaaggatgaagttggaagggcagctaagcgagttcgtttttcctttaaagcagcttccagttcggacctctccttctactccgataaatcttcttcgtgggtttgatcaagtaagagtaaattgctttcatgttccttgacgtcttattctag

SEQ ID NO: 16379 - DNA, 671 bp, Arabidopsis thaliana landsberg
agacaatgttaataacagatatgagaatatctttcattaccccccctcaagctggagcatggaggttcatgatcccaagcttgtcccgaaagtcgtcaaactccttttgtcccaatgccttagtgaaaatgtctgcaagttgtatcttggttgagaggtgagctgtgacgctgttcccggatttaatctcgtcacgaacaaagtgacaatctttctctatatgtttggttctttcgtgaaagacaggatttgcactgatatgtaatgccgccatgttatcacaataaagccgcattggttgtgagtgtgatacacctagatcgagaagaagtgcctttaaccattttagttcctttgctgtccaagacatagctttgtactctgcttcagcagaagagtgactcaccacttgttgtttctttgttttccaggaaatcggagattgaccaagttgtatgaaccaacctgtcgatgatcgtcaattcaacggacagcctgcataatcagagtcgcaccatccataaagattgagatcggaatctgatcgaagtagaatcccttgtccaacggttcctttgagataacggacaactctaagtgcagctttccaatgttcttctcgtggagtttgcatgaattgtgaaggtacgtgcaccgagtaagcaagatca

SEQ ID NO: 16380 - DNA, 4754 bp, Arabidopsis thaliana landsberg
caaagaaacacacatcatagtctgaattggaaataaatagtcaatatatcaagagaaattgttagaaagatcttatctaaaggaagtctccagagggttttgctcccaagaccaaagagataaggagaatagcctctccaacttagatctaaacaatgacctaaaaactttacatatgacttaaaaacgtgataggccttctttagaaataagggaaagttatgagccgaatttagaaattttcaaaacttcaataagttgcgtcttcgagttgtcgtcaggtaatggtgtcgctagacacctacgcgattcagcagcataaaccctttgttttcctccagaatgctctattatctccaaatgaatctcaaacttgtaaagacctgaaaagactagaaaagtgataagcaggttttttatgcctacttatatgctgaatgcgtggttcagttcaattcccctaaaacacaaacatgtcgatgcagctatagggggtgtcaatccagtccactgttattgctagcaatcaagacgtgtatagaaacaactaagtcaagccagattataatgaaggtgagtttctagtaacaatcctaggtcaggattcaaacaagtaaaaatgagaacttaaaagccctactcgatcattaggtcgagtagaaccaacaaacaaaactaaaatgcaatcaacaagagatacaaataggggatacaaataacatgtaaataaaagtgcaatcaacaggggatacaaataaatctaatagtagtcctaaggatgaattcattgataagggcaactctagggttcatcagatggctaatacgtgaaaggtaaatacccttgacgatagattcaaaaaccgggtcaatccactgtcgtgacagagaccctcataactcgactacttcctaatctcaactgtcgttgatgaaacatagcagagcagggtttaagaaacaatctaccaaagccaataagcagacaagccaatatcttggtcgagtctacaaatctctggaattcgtagatcagacatccatttgaacgtcatttggacgttggtatgatcgaatctcacattagccagcgaaaaccgcataggggccaagcgaatccagaagggttttaacctaatcttaaccacctggctaacctagagattaccctaatctaatccatcattaagaaccctaatcactactcaagcaacattctcaaaaacacgaacccataaattactgaaatcatatcaaaatgtagatctaaacaagctaaacaactttacttaaacaactaaatgcaaaaatgaaatagattaagagtaattaagttttgaagattcataaacacaaagaaaaactaaaggataaaagctggatcctaaggacaaaccccaaagtgatctatttatactaaaatgttgaaaaccctagattcactagaggactagagacttgaggcggtttgggcaaatgctcgatcttggggatcgagtaatgagggtgctgcaaagtcggcgcctttgtgtctatgctctgagtgatcaatttgatcgagtagatgcttcttcctctcctatccgtatgctcaaatgtctggttgagtggggaatgaggaggatccgaagacgctttgatagatcaacaagtcttgtagagttggtcacccttggtcgagtaaatgggtcgagtagaggatcgagtaagaagggcgactagagtctactgcctcctctttagcagcctggatcgagtaaactggtcgactagaatgctctactgctaccctcctcttgtttccctctggggcaatgaataactggtcgagtagctactctgctgcttaccctctggggcaattaataactggtcgagtagctgctcctctggttgccctctggagcatacattaactgaattcagcagttaatgatttttgactataaaatcaaaaattcagttaatgtataaaatcaaaaattcagttaatgtattcgagtaaagagtataaaacattcagttaatgtatttgagtttttgactatttactagtatttgatttttggccgttgatataactctctttttattgcttttaactatattttaggtataggttttagagtttatttgttatttctagagtcttttctagtccttttcaggtctttacatgtttgggactcatttgaagattatggagcattctggagatcaacatacaacttcagctgcagaagcaatgcggagacgaaaatgcacgtaggtgtcgaacgacacaatccctggtgtcgagcgacaccaatacctgacggcaatttcgagacgcaacttattgatgttttgaagatttccaaagtcggcccagaactttctcctatgtttaatgaaggcctagcacgtgttttagacatataattaggtttttagggtcattgtttagacctaagctttagagaggctaatctccttttctcgtttgtaatttgggagcaaaaccctttgaaaactccctttggatctttcttactctattctcttcttgttctattcattgatttctattctaatgatgttgtttgcttcattcatcatgcttgagtagttttcttgttaggtttagggtttctcattaagattatagatgatttagtagattgcccccttgctaggttatttgtaggattcttcatcttgattgttcttaatgctagttctagagtagctaactagaacttgatattagataataggtatgccccccataggtacttgttatttgatccgtcatagatgagcctaggcatttaagaaagaacatgtagggtcatagaagggctctggtttagatactaggtgaactaatcagacttgataataatgcatgttttagtataggatttctcggcttctccggttatcttagctctaagtatagagagtttcatggaatgccactggttactctaaaatcatagattgagtttaagaatggttgataacaacttagctatttctagatctactatcatatatttcctgagaataccttaagcctgacgcttttaatatcttattttacttccatccaatcgattgctattgcttacttttgtttctctttattttatttactattttacttagcttaattcaaaaccttagtctattgcgtgatccgagagctttgtgaatttgatccctaagtgctgcaactgacctctttatatgagagagtggtcttaggattaatttgacctatatcattacacataatcgttcgaagagacggtctatgaaaataagtagaagtttagctacatgaagaaacaagattaacatccaaagcactagacggcttgatcaggggattcaacaaaagtgacatatgtgtccatcgcatacactttcctaaagctcgagacaccatcatcagtaaacagagccatgttagaaaaccctaaaccatgagcatgcatttccaaaaacttgcagctaaccggtccacaatccatcaccattgttgtcatataatgaagatgctagggtccaagagaaggggtcgggtgttcagtgagagctggcattgcaaatcttttaagcagccaaggaagcaactcagtaataggtatgatcatcaccgaaacttgttcgtccggaaagggggcactaaaagggtcaagaatcagcacattacggagctggagattgattaccaagccaacccaatgacaggacccccagttcataggaacatagacaacatcaacattccttagaaattcagacttcataagaattccggttgatttgccagttacataagccttcattgatgaaccccactcgtagtttcccttgtcttgacgttgcatgaaatcttcatgatgtgtcatcagaagagcgataaaccaagtgtcaattatggtaatccgtttaaaggcatatgatttggcgcggcgtctcaacaacattcccatgataagttgcatatgctgtttgagaagtaacaatatgctttaattttggcagaaggcatgagtaacattgtatggaaacattcaagtatgaattacctcagttgtcacccacttgtccttggttgcaatgtccaaaaagtgtgcattagaaagcttgtggccagtgcagatggtgaataacctgcaaattgatagtaggattagtaatttgtaaagcaaggaagagtgtgttttataacttactggtctgtatcttcttgaagaagagatttaaaattctcaaattcaagctcatccaaagacccaagggggctgtaggcaggcttcttggttcggcttttaaacaaagcacttatcctagcgtccacactatattgagcagggtcaaggtaccgagaccgtattggaacacgcttttgaagaactggctgtcgaatgttaatcgtctcgtgaagaaaatatgcaggagctacagggacaatggctgacgaattgcagtcaacttcatctccatccccaaatacctataaaacaagacacaaaatttatttcctcaattccatatgttatgactgaatcttaaccagcaaaatggatagaggaatacctgatctgaaggtgccgaaggagttttgggtgaagacaaaggagatgaaggccagggcaggattattggggtcgtcccctacttgatcctaaatatgatttcaaaagaatgaagaattacatttatatggtttggagggcccctagaaaataaaatattgaaag

SEQ ID NO: 16381 - DNA, 2620 bp, Arabidopsis thaliana landsberg
  unsure (1)..(2620): unsure at all n locations
cttgcttggcgcagactcgacatcgtatggtatatctccagtaataatcttattcttcatttttttcgttttttgattgtgcggtttacgtggcctcttcacttacaagtaaaaaccttcctttattctcacaaattgttcatcataaatcaatatgggaataatttatgtctgattcttgacgtcgcaaagattcgatctcatgccatgaggataaggctcaatgggacgaaacaatatttttgtttatgttaaaactcgatttgtcgatggaatgtggcccaactgtgatccggagagtcgtttattcatatactacaaattacaaagtaatcgtagtccatacatgtcttatgtaaaaacacatattatcgaatcacatcgcatccaatcccagaactatttcacaccatcctgtaactttaattatatacgtccagcaattttgggtaaatctcacttttctcctaaaaacttgttggtgctttgaacactttataaatttcgtcaaagtaagtgagcttattttttccctacaatttgtattaattaatttatgagtttcactaaggttatatgcttcactaaggttatatgtatatatatatatatatatatatatatatatatttttttttaatgtatataagtgttagaatattatccgtaacatagagaaatggatgaacgtcttgcatttttgttgtgagcactcaatgtgacatcataattaatagtgttgatagcttgtgtcgaagtctacttccctttattcaaaggttaagcggcgagtttcttggtgattatggtataagattgttttgctggaagaacagccaagggtatgcggtccttagtagtttgagggagagagtgtggcaatatcattctaattaggatataattatttgtttttataatatattttattaagaagaaatggtttggaacatgttatgcattaagcgcattggggcttaaagttagtaatgagtacgtattttaattagaatatttatatccgcacatacgatatttttaaatgcatgcatgatatttttgatcaaaaatacttcatactagccgatttggtgacatggaaattcctaaaccaaacacaactatatagtaacaaaattcttgtttagagacgcccaaatctatatagtaacatccataaacggatatattccgattaagagttagagtttctttcatcaaatgtgacatcttttgtaactcacactttctggtccttcatttttaacatgtgtaaatttccaatacccatggcatacacttttcttaaatgcatgtttgtattcataaaaactgaaaatagaaatacaacactaagtataccaagaacgttacgaaatcagtaccctgcctcataatctatcctttcaaaacttagatagacacaaaacattcatatgtatatgattggtttcaatacattattattaccaatctacaatcaataagtaactatttctttatattttgtcaaagccataacgccccaacgcgtttaagcattggaatgagagaacggttgagatggagactcatgacttgattggctccaccgacaagctgccctcctatgaacaccactggcacggtcgggctgcagccaagctgagccaatgcttgctctatctcttttcctctgttgatctcatctagctcataaatcgtcggatttacgccaaggtctaagaagagagtcttgattgtgtgcgacatgcagcatgagtttttgctaaatatcactaacgacttctccgaggtcatcttctgtagcttctccatttttgttaatttgaaagtgtgtttgaaaagtgacttgaggaggatgaaataggttatgttttgattacaagatgcgagattagggatgaaaatggggtactagagaaccgttaaagagattgtgatatctttgggtgaagatgagaagtgactttgacttttatgtgtttgatcagtttgatgaagagaagtgtctacaagggtactatatataacattctacgtaaggatatgatattatgggttcgatgtaactcttcattatagagaataaacttatagcatcaaataaagagcacattttatttgcggctatgatcggttcacaccttcttgactctttgcctcttgcagctaaagaataaaactaattcggtaaaacgtacaaaaaacaaaatctctaagttgtgaagaatatttgatacggacgaatttatgtccatgtctctatggtacggccatatatgttcattgtcaaaagatatattactttatcacttttcagggaatttaatagtgttgatgcttcataactggtagatagttttcataattttttaaattagaaagtttaatagtaagtaagcctacactcattgacaaaacataataatttataagatttgtttttaaaaagataaacaaaaccttacaccatgtggaaataaaagtcaattaatgaacgttttatgagccaaaagtagtctacatacagtatacacatgaacatgatagaaattacaagctctacttcttgaagactcgagattgtataattccagaataatctttnatctttttt

SEQ ID NO: 16382 - DNA, 1654 bp, Arabidopsis thaliana landsberg
aattaatatagtatccagttttaattttctcaaccttggctcgaataaggaatgtagccaaccccacatttttttcggagtaagaaaattttattactttaatacttagtttttctcgtttttttttattttctatttttttattcaaacaatgtatgtacgggttgtcttgccaaaaaagcaaaaacactaggttttatctttttccttgtaaggtcatctttaatggggagttttaagatgatgagctcttaagaaaaataatacaaaaaataaaaacatgaaaaaagaagaaagagaatggaaaaaatctcttagataagagcttgaagaaaggtttttaacactcaaataaaccaccaaagccacatgtctttcatacattagtttacattttttataaaattaaaatttaattatataataatattataataaaataatcatttttgttattgtttagaggtttttataagaatttattgttgaggatgctctaagtttctctactccggactaggtttctctaatagaaaacagctcattctaaccgatgaatttattttgccataaaaaagcaaaaaggaatatagccaatattgataagattaatgtgtattcttcatatattcttgaaaaaaagagaaacgtacttactacttagtacttattttattacacgcgatgcataatggaaaaaacaaacaaacatgcaaattaacaacaacagaggagaataatacagattcatacagcacagccaactttgacagagcgatagtgaagctagacatggatggtcactcagtgatgggaatgacatggatcccaatctgatgaagcatgctactagattttccatggaacccattgatcttgtgaccttccttctctaggacgaagttgaaaccagctttaagtccaaaggatggagagatgcgaatgtttgtcttgaacctaagcatcgttaatactccaggttcagctcccataaccttatcttggcaagcctccaccgatgttatgtattcactcggataatccagttcgaactatggagtgtataagagatctttgttaggagtactctcacgttgagaagtgtaaaaatatgtaactttagttggttttgatattaacaaaaaaaaaactcaagaattttatagtagagatatacaagacgcccgtattctcctgcattttattttgtatgtaaacaatgtttctccgatttagctttaggagcctttctcgttctaataatatataagttgttgacaaaaaaaaagaaatagagaaaacatgtaaaggagtaatcatcacctcttcatatccaagtaatgtagcctttccatgttcatctcccacaaccacctcactagcgtcgttctcgtactcaaacttaacggagacaataccaaactggccttgtcctatacaaaccttcttcacatttaggaaagcaccatcgtcccaagagtctgctccatctacaccttgtccctctagtttctcagtagggggagggtaaggagaaaatggagcataatatttcccgatactattaacacaagaccctacccgttcatggaacccaacaatagcattgcctttgctctcaagcaaaacgttggacccgtttttttcaaatact

SEQ ID NO: 16383 - DNA, 905 bp, Arabidopsis thaliana landsberg
gaattcaagcctactttagattatgtcgtcctttatttggtacaaagacaactttcattttccaaactagataacttatcaccataaaccgtttttatttctattttttcatataagttacatttaaaatttgtaaatcatagtatccttttttgtgcaacaatcacatagtaatattttattccttaaatttctagaaaaaaaatccacactattaactattttaatacaatttaaatatgtgaaatgaagaaaaaactctttaccaaaatttgaatattcgtgatgctattacactcaatctatgataactttttatatcttttttctgtctttacttctttatttatgaattttctccaatcatgataattgaagtatctattcacataatactttattttatgtatgattcgatttagtagttttatttgaatatgaattgactgaactccctagttccatcattatatattaactagttgtgagtgctgacataattgcaatgatagatttcagaaaatatttattaaaaatataaacatattttatagtatcatttggtttatgtctccaaaatatccggttttgcaagtacaataataggtaaagtaaaatctttaatttattgaatgactatatacttcgtcttacacaattttcttttcgaaatatcataaaataaatactacactcaaatttttagaatgtagattgtatgaattagaaagaaagctcaatatcacgacaacaaggggattttattttatttatggatgatggaaacaaaagtacataatacaaacgcatgcaacaacaaataagagaaaaataaaaatagatcaagacaccagtaacattttcgacccctttttattacatatgttttgattcttaattcaact

SEQ ID NO: 16384 - DNA, 1525 bp, Arabidopsis thaliana landsberg
cctacattggagcttcaagaaacaccacatggagccgatacaatcacactcacacaaagaagcaatctatgtgatcaatgagagtagttctagttttttattgatttacattgtcattggaacaatcctcaaccttttttgtctattttggatgatgtattttcggaagttgattctctttaagatgatattatttaggttgactgattgatttggagtcttatctatccttataattaggagttttatctagttcgatttgtcattttccttaccaattaacacaacacataacatatatagatagattcacattataaaacaaagacaaaacgacgtcgtttcttaacgggtgtgggattagtcgggtaaatcaaaatagcggtataataaacgcggatttgtggttaatctcggtttaatgaccggttcaattggaatcatatttttaaggatgaatctgaaagtacatgttgcaattttaagaattatcaaagtttatggtggaaatttcaggaataaaaagtggggggggggggggaaatctgagaatgcaattagtttatggttataaaatcagccaacccttttcttaacgaatataggtgattaatcgggtaaatcgcaatcgcggtacagtaaacgcggatttgtggttaatcccggtttcatgaccggttcaattggaaatgtatttttaaggatgaatccgaaagtacatgttgtaatttaaagaattatcaaagtttatggtgaaaatttcaggagcaaaaagtataaggggaaaagctgagaatgcaattagtttatgactataaaatcaggcaacccctaatataatgatgcttcatactttcttttacatagtctaattctctttgaatcaggaaccaaggaatatcatgtttggccaaggacaaacatgggacggatctcaagcctcgcaaggatcacaggcctctcagtcatcgcatatgcaaccaccgcagacacacgcaccacaaacacagaggaggcaagcaccaaggaggcgagcaccacacacgcaaccacagacacaagcacaacagacacacgcaccacaatgggaacagactcaagcacagccgaggcaacaaggattaggagggtggcggtcatggtttgaatgctcaagataagaagaatgaaagtgatgttttaagtttctaaccaagactatgatgcggcttattttggtttctaaacacaagactatgatgcggcttattttggttgctaaacttgttttaagtttgtttcaaaacatgtcggcttattttggtttataaacgaaacttgttgtaagtttgtttcaaaacatgtttttcttaacaagaatgttgaaatgcggcttatgttgacttgttttagaatgatttgtgttgttaacaagagtgttgaaatgcaaaagagttaaaccattgctaacaaaattaaagaaaaacaagacaaatgcttatgactagcacaatccatcattcatttccaaacatagaatccaaca

SEQ ID NO: 16385 - DNA, 799 bp, Arabidopsis thaliana landsberg
  unsure (1)..(799): unsure at all n locations
caagggtattgaagaagatgctgactctttttctattttagcggaaatgtattacaagaagcggcctgaggtttatttactggccgaggacccccatccaccatatcgtgctttggctgaaagatnnnnnnnnnnnnnnnnnnnnnnnngtcatgctcagcagactatggctgaagccttcccaaaccaagaccctatgatgtttggtgaggagtcacctctcggttcttccaccgatggttttgatccacaaacgcctgacagttatccacctatccgagctcctgtttacccagatgatttacgaaaaggtgcttttgggatttcttcctctcatttgagtaccgctaagcgcaatatagccttcatggaagaccctcagtctgtgagtagcgggaaaggttttaaaactgcaaaggcaaggaaaggactgaatttcaataatgttgatggaaaattaataaatgctaaggttctttcagaatctgaacgcgcaagcaaagctgaggctgaaattgtggctttaaaagatgctctttctaaagtgcaggctgaaaaggaagctagcttagctcagtttgatcagaatttggagaaactgtctaatttggagtctgaggtatctcgtgcacaagaggactctagggtgcttattgaacgagccacaagagccgaagctgaggtcgaaacgctcagagaatccctcagcaaagtagaggttgaaaaggagtccagccttcttcagtatcagcaatgtctgcaaaacatagctgatttggaggatctcatttctctagcc

SEQ ID NO: 16386 - DNA, 1518 bp, Arabidopsis thaliana landsberg
aaaccctgcaaaacacacaatcaaactcgcaatactctactacatcgattaactaatccacgacatgtatttgtgtttgcacttaaaagttaaaaatatattaacacgtcctatagtaaagcggtggatgcctcgtccacggattctaaagtttacacatattttaagtttaacaccttaaaaccatctaaactctactttttaaaagggttttatgcaaaaaaatcctcaaactcgtctatttttacaactttactcttcacatccaaaaaatgcaaaatatcatatgaatttcaaaataatacacaatatagattttttcgttactatcaaattttaaaattttgataaataatatattaaatcggaacctcgagatgaagagttcaagtatatctttaaaagttttaaaaacaaatgtatgtaatcgtgaaaacatttacaatatatataaaattgcaaaataggctattttagatttcataagattattttgtattttttaaaacaacaaactccagtctacataattaatatattcaactcaaaactccaaactgaaagcttaaaaagcccaacaattgtaagcccaattaaaaagcccagtaagtgaacgcgtaaacaaaaaaagtaaagactctcatggaacaatcaaaaacgccgaaacaatgcttcgtctccgattattccacgaaacaccgcgtttttgtttacatttcttctctttctctctctctcttctctcatatctctctcttcgccgtcaggttttgcccaaatttctcggtcttcttcactcccgcgagatttttttctcgggaaaattttccaatcccaagctccattgaagccaagtaagaggtgcgattctcttcaattttgacttggaacttgtaaatagcgtatggatttgagctggttatggacagaattctagctcgtatgaagaaatcagctggacgaagaggaggagataagaatattactccggtacggcggttagagcgtcgcgatgcggcgaggaatatcaattacgacgcagcttcatgttctagttcgtcagctgaagatctttccgtttcgacttcttcgttgatgactcgctctttggagtttccggagcctactagtttccgaatcggtggtggtgttggagagatggatcggatttatcggtctcttggtgtttctggtcctgatgatttggctatttcttttgatgcttgggaagcttgtaagaaacgttcttcttcagatgttgttaataggtttaagtcttttgatcttgataaggttcgtgatcaggatttgagtgaagaaggtcctagtggtgttgttgttggttctgattcaatgaatcataaggttcagggtcaggatttgagtgaagcaggtcctagtggtggaattgttactgagttgagtgagattgggaatttaatcactcctgtggataggttagtagctgatggtgtggtagagaatatgcgtgttatggaaagaacaccaactattgtg

SEQ ID NO: 16387 - DNA, 2071 bp, Arabidopsis thaliana landsberg
attttcaaagtgtttccataaatggtgtctttcactttgacaaggatgaccatacacacaagacaagtagaaattgatattattagtagagatatgtacatcgatatggcgttcatcctgacaaactttggataaacacacataatccttccacaacaaggccaagccaccactatgaccttgtgggggttgtgttattacattagaaaatcctaatacacatgctagattactaacaaagtcacgcttatttagagtttcaataagaaataaaacatcaaacttaagtaatttacataggctactaagacgtgattgagtcatcggcgcaccgaggccctgacagttccaagagccgattctcatggaggctgtggggataccaggccccccgcgcctccgtccattgaaagtggagatgtagtagatgttgcaaagctgactttcttttctttcttgcggatgtgacccaaaaccgccgattcctctgctgcctccgcttgattgtataaagtttcaaagctgactctctttctcttaacaaaagcaaactcattcatagcattgttagagacttcctccaacagccctgcttctctctataccattaaggattcacgtagatgttttgcatgaagatacctgagtctttcagcagtgagttctgtgtcttcaaatgcactaaccaaatctgatggaacagaacttgaagacccctcttatttaatgtttgtagcggcatgactctgtagatccggaatcaatgtggtgaaatcaacactaggcagcgactcatctcctgtcatctcttgttcatcagggttattctcatggtggtcatcgtcatttccatcattcacatttgccggttcagcctcctcaaacgccaatgcacattccttaacatcatgcttaagagaaccacacttggtacagaagttcctcaatctttcaaatctgtatttgatggtggtgttctcattcggttggaattgaatattcctctaaaaccaagcggacccatccatgttccaagatagtttgactcttacaaaacccatttggtttgtgttctcatcaaaactaacatctaaaacataccccaaacggttccctaccgccctagctgatatagctcaaattgtcttaagcttactccctcaaataagagatcgtcgttagcacttaagggtcgaattcaactgagctctcaatgttcacacaatagacttatgatgtattcaaataagctagacaaagtaaattaatgtaaagacaataaagcaagtaaacgagttgtagactcaagcgattaaagcatcgggtctaaggaattgtctcgagagatagataaatcgtagatctagctaatatgagggttgttatcgtaccgttctcaaactcaaactatgattttagagtaactagtggtgttccgcgaaactctctatacttagagctaagataaccggagaagccgagaaaccataaaaataaagcatgcattattatcaagtttgataagttcacctagtatctaaaccagagccctcctatgagcctacctgttctttcttaaatgcctaggctcatctatgagggattaaatagcaagtacctatggtgggcatacctattagcctaaaatcaagttctagttagctactctaacactaacataaagaacagtcaagatgaagaactctacagataacctagcaagggggcaatctactaaatcatctataaccctaatgagaaaccctaaacctaacaagaaaactactcaagcatgatgaatgaagcaaacaacatgattgaataagaaatcaatgaataaaacaagaagagattaaggtttagaaggatcttctctaaagggagtctccacagggttttgctcccaaagtacaaaagagataaagagaatagcctctccaagcttaggtctaaacaatgacctttaaaactatatatatgacctaaaacacgtgatgggcaatctttaaacataggagaaagttttgggccgaattggaaatctcaaaacatcaataagtggtcttgaatc

SEQ ID NO: 16388 - DNA, 2179 bp, Arabidopsis thaliana landsberg
ctcccctacacatgcaatattccccacccaaaaacccaaaataacaatcaattgctatgcaatcaacaaacaatcatgcaacagacaatcaatgcaacattcgagtatactcgattgagtatactcgacaagaaatcaaccaattacactttgaaaagtgtaatgaacacaatcaatactaagcatgcatgcataactaaactatccgagctcacacagtgttactactctaaaggcctttctcttttcagcaattctgatttcccacaaggcaatgtctccgatccttagccacaaaggctaaaaggatcacatctcttcccctttaccgtctacaagagaccaactcccttacggtataatttgtactgccccgtcgggtagcctcgattggtaacgagccagtccgagctattgggacaatcacgacatcgcttcaaaactagtcgggaaagggactaatcacgtttacttactacgagcctattgaatctctataacactcgtaacaagatctacctcacaacctaacctctcaattactacctagcatgcaaagctaattacaaacaagttaaccaagcaaatgcgagattaacaaacaactatcaaacaatcaaacaacaatcaatcaatgataactaacaagcgatcaatcaatactactctatcatgtcaataactaaccacttattgactacccgactaataacaagcaatcaatcgttgcgaggtcatctagagcataacgttaacactaacgtctagccaacctcacatctaacgcctagaaatgaaacgattataacttgccggcatcccctggtaaccttgcaatcataacctttaccaaaatagtttagcatttgctccacacggacacaatgcaacctcctaggcgtctctcacaacattgtataactacttaagcaagtagttaaaactaaaagcaatccttcatagatctattcctatattctacacttagctaatagaaccaatctaaaagctaaactatgcaacctaatcaatcaacaattctagatctatgaacggaaagtaaacaaacaacaatcaatctggttcacacgagttctatgaactacatgtaaacacatgcaacacacataacctagactcaccttggcttggatgaccaggaaaattctacccttgaccgcctatatctcgatccgacttaagctttctccaatgcgtactaacgatggatctaagccgcggaccgaaaataaaacttagaaaaatattctaaaaagaataaaagactaagggcggaactacttacctattacccgagtaactcgactctcgactacctgaccaatgctcctgacgaccacggcttctccaagaagctttacgacctaactagtctaaatgtgattttttcgtggtttagagagcaaatggcgagatgggcaatttatacgggtgggaaaacgtggggagcaagcaacggaagcacgaggtggtggataaacattatccaaaaccttatccttatctgatttcaagcttatccttctctaaactcatctctatccactcgtggtcctatccttatccgaagcgtgtgccaacacacgcacaacacacgccaagcttgggacagagctacttccaccacaagcacctccatgacatggccgcaaaatcccgcaaacacctatacagccaaatcggaaccatacaagtttctgattaattttacgaccaaaattcaagtaaggtgacatgtcctcggccacttactctattgaaccgctcctataaaccttgataatttttcatacgactccgcttgatcaccactagcttttttcggttcaaaaatattttctcggcaaaatctagttttctccgataaaaaacttgtcttcagcactttctttatttttcttcggcagccttgatcttttcctcgaccaaattcctaaaataaattttcttattaaaatcttgatttctatcgttaatagtttgatcgggtcctttgatcaaacgagcgataacttcctcgatagcattttgaccaaattgccatcatttcttaataattgttcgatcatgtcctctggatcgaactaccaatgtcctttatagcctaactgctcaatgcctgtaatacccgatccttaactttttgactcttagcgat

SEQ ID NO: 16389 - DNA, 804 bp, Arabidopsis thaliana landsberg
atgatactaatgggactatataattacacaagattttcaaacaaattattatcttattatttttgtgaattatgttaaatatattacattggtccgactcgagactagacaaaattattaatctatagtgattatgaatttatagagcattaatttatgaattgtttttgtacaaactattcacaagttaaacttcaatttacaattgtactcacttcttacttttaccatatctatttgaatgtagtataattgctaaattatgttcataataagagtaaatctactaaattagatttaacttaagtgaaatatgcatataggcaattacagatttcaaattgatttttaatatttaaatttatcatgttgtattgtaatttcttttctacggattgaaaacatgtattttatgagatgattgctcctgagtattgtaatctgtgtcttgagtactcgaaatcccaagaagaattcactgattttgtgagaagaacgttgagtactcagactggttcattccatggtttggtcgtagagactgtttcagaatgttgagacttttattgctaggaacctgatctttatcacaaatggcatgtatgtcacacaatcatatcatcaataaacatgcattcattttctgttcccattttaatactagttcggttggtacatagttatatacatatccacatataaagaagttagggctggagcctgagttggtgttgatgtcctagagtagcgaaactacaagtgaaggagcgctcgaaatagctatatttgctccgttcccttctt

SEQ ID NO: 16390 - DNA, 1754 bp, Arabidopsis thaliana landsberg
tgaaaaaccgaattggtttattttgacaacgcaacaaaactttgcaaatgatataatttgaaaacgcgaactggtcgcagctgggaagacttttggacatcacgggtactcgtcgggtcattgatttgggaatacctcttgaagcaaatttggaaactgtcctgcaaactcatcgaacccgtcgacaccgggctgaaatctacaacagaatcgaagaagaaatccaaagactacagcagcgagaaagggacgcgggtcatgacatctcactttggcgatccacgagaaatgagttcaacaagcggtttacatctaaggttacttggaacaacatccgaatgcatcagccacaaacgaattggtacaagggcgtatggttcccctactcaacgcccaagtactcttttcttttgtggctcacaatccaaaacagactatccacaggggatcacatcaaagcatggaactctgggcaacaagtcacctgcacactctgcggcaatgctgaagaaacacggaatcacctattcttctcatgccattacacctccgaagtttggagaacccttacgcagcggctcctgtccaacgactactctcgtgactggaaccgtctccttcctctgctctgcaatacaaatatgccaacggatcttctctttttgtttcggtatgtcttccaagcctctgtttaccacatatggcgagaaagaaatgcccgacgacacggagaaatcagctcaccaccaaaccggctcataaagttcatagacaagaatgttcgcaatagaatcagctcaattcgagatactggagatcataactacaacgcttgcctgcagctatggttctccacgaggcctctttcatccacacactctctctgaattttcctttcagctttgtaatttcagttttctctctaaaacactaaactaaccgttgcagtcattgtacaatggttttgatggaataaaattttacattctttcaaaaaaaaaagaaaacgcgaaccggccggtaatcaccaaataacattaaaataactaaaccggtttggcattcactctcttcctctctgagagtctcagactcacacacagtggtggttcgtttagggtatttgttgaatttttcagagcttccgaatcagagagattgagaagaaatcaaatagagaaaatgatgttatcgtttgcgattgcatatacagcgaagagatttgttcatcggagtcttgtggtgagaggtaatgctgcaactgtttctccctctttttcctttttctggagacgagctttctctggtaagactagttattattacagagagaaactgagtagaaatgggctgagtgaattaaagttagatgacgctgttgctctgttcggtgaaatggtcaagtctcgtcccttcccttccatcattgagttcagcaaactgttgagtgcaattgctaagatgaacaagttcgatgtcgtcatctctctgggcgagcagatgcaaaacttgggaatgcctcataatcactatacttacagtattttgattaactgtttttgtcgacgctctcaactccctcttgctttagctgttcttggcaagatgatgaaactcggctatgagcccgatattgtcacgcttaactcgctgctcaatggtttctgtcacgggaataggatttctgatgcagtagcattggttgatcaaatggtcgaaatgggatataaacccgataccggcacatgtaacac

SEQ ID NO: 16391 - DNA, 1570 bp, Arabidopsis thaliana landsberg
tttatatctttcttttaaaaactaggcacgctacgtaccacaaaggtcgcattatcattgataatgcaaacacttattttcaagttgttatgttgtttcattcaaagaggctaaatttatttgcactcgattctaacatcttttagatgctaacagctagatagcgctgagaaaattcatctagctagttacatgtgatccgatgttaatattgtctaaaacattaccaatggtctataccacagctgttagcgtgcatgacggaagttgggcggatcagaattgttgttcaattaattgagaactaactgatatatatactttattcatgtgaaattttggaagtgatattctgatgttcaatttacatgacatcttctttttttttttttggtctaaaacatgacatctttaaatttgttattaatttagcgattgactaacaacgttaaaaactttcgcttcgtacaaagtatatatacttggaaatgtgtgtagcttgaagccattacataaaatgaaacaaaaagaactaactatatattatgaaaaaaattatgttatatagtgcgtgtagaaatcaactctctaacatgtgttatacaaaacaaaccacaaacaaacaagaaaagcaaaattcgtgttctctcaaaacatttattcaaacacaacacatacgtaacacacacacgcatatacatgaactctcatcaaacagttggtttaataaaagggtaaagctcatacctatagttacaactggtactgaaaactctccctcctagtttaccatcgcagcagtccgattccttgaggataatccattccaagcacgcatagcaagtcttcaaccataagtctttcgtacactgtaccatcgcataaagcttctttgtcccaactctttcctcccccatcgcatacatcaccgcctggttgtacttgtccatgttgtcttcactggtagctttcaaccccaaatttagtaggaaatcgaccattttctgtttgaactccagaggcgatccgctggcattcttcgtgttggacattcagaagttgttgttgtaatcgagctttccttcattgcggatggaagaaatctccataagacattggtcgtaccatattattccccctttgtttctcgaacatctcttacgaagctatcatagaaaaatttgcatattgacaccacaattaattacaacattgcacgtaataattaacgtataacatatattttttctataatatgtacttctacgatgtaacgaaaatttacatgtgtatgtgtgcttctgcattcatacgtaaatgtgtgataggtaataaataatattagagtgacgttaccgccgagagggcggtggtgtagcagaagcggcaccttgacccgtaggagtcgccacggcattggtacattaatgtaacgaaattggaacctttaccacggaaaaccaaatcgaaaccactgcgaaaatcgccggctgatgaggcacggatgattatattgaggtttttctcgtatacccccttcagctgatactttccttcacttacaatgcat

SEQ ID NO: 16392 - DNA, 2183 bp, Arabidopsis thaliana landsberg
aaccgtttgaactaaccagttgaacacatttgaaccatttgaactaatcagtcgaaccaaagtgaaccatttgaactaataagtcaaaccagataatcctagtgttgagctatctgaactatccgttgtgacttagtaacattccagttgaaccatagtagatgaaccaaaataaacagttgaaccatagtagaggaaccaaaataaacagttgaacctaaaagaccaattacaagccaaatgtttaaaaattcacaaaagtagacatcattacaatgcaaatcaagccaaacgtttttaaataaaccaattgttccacaactaccattgactcgatcaatctgccttccgcattctcttacgcttcttatcatccgccacaaacggtgatttaataaggcgggatgctccccttgtttgcttctttccggtttctattacaggtggcacctcctacttcttcttgcccccgccattcttcttcgcttttcctttcagctctttctccgtcgtgtttgtctctttattacctacacacattttaaaacaaaacctaagtcatatattcacatttttatacccaattgacattaattattgtacttactattttctgcaacctctggagaaggttctctataaaccactatatctagtggttgttgcctttctatggtcacacaaccctctggcgacgcataaaacacttcctcctctgtttgcttcccatgttgactttcctcctctgtttgctttccatgttttctttccttcagatctgccacaaataactcaatagacttcactctcccatcaatggcatcaatcttatctcttgtttcctcaaagcctttggtcatcatctgcgttagtgagtttatagatgccacaactgcatctaattcagggactcgaggagggacagcagtcggaggaacatctttctcggggacatcagtcggaaggacatctttctcggggacctcattctcaatctcatggacaacatcatcatcaagatcattaacaatacatcaagaagaaatgtccagctcacacattcctttccaccatatcttcttcttctctacaaatagtcgccctttccaattgtcaataacaatatctataagatcgaggtcatcatcaatatcatcttctaagagactgtccaacagatatttctcatgatactcaggtaccaaatggctagcaatatcctgtgaaaagaaactcatttagcaatcaagcaatctcatgatatacacacaatcaagtaaatacagaaactctaacctcactattcccaagctctttatatataacttccaacgggacacctttcatgctacattctttaaacttatgcttgcacatccttggacagtccttctctgcacgtacagggactctaaatttcagttgaagctgtagaatagcctcataagccagaatctacaaataacaaaacaatgtttaatatcataaaacctgtacattacaccttatactcatataatgatcataaattacttatctcaagaggcacaatgaatccactgtagcaaggttgagcttttggtttcacgaaaccatccaggttcttcatcattttccttatcccatccaaacattccaagaagtattaacggccccacagaaacgtctcgtactcatccaaaccgccaacaatccttaaaagaatctcttctatgtttccatcattctttgagtttgcttttactaccttgaccaggaagtacaacagcactaacttcaacctatctgtaccgctgcgtatcttctcgtacttagtaagaacttttgaaacctttatcccagtttcttttttgaagatcctcttcacaaactaagtattccccattgtcttgagttattttgggtaactacggcaatcaaactcacttaacaacgcatgctctttaatggaatacctaataggtactctatttacgacaaaccaagccttctagagcaaatctgtcttcactgtgcgaagcataagcacccacatgccttgcatctggtggttaggctcctgagacatgtggaatatacgctcgaactgtgggtgttttcgaaatcatcttgcttttatttaaaccttctatctatcattgccactatctgcgtgacttgcacctactgcttatcttgcacac

SEQ ID NO: 16393 - DNA, 1505 bp, Arabidopsis thaliana landsberg
tagaggatgctatggacgcatggcaaaccatacttgcagccccttctcgagtcgaagatcccctttctttttgattgtcgatagctggtttctaatagtcttgtctatctgtcggatgaggtttgaagctgaacgtgacgtctctccgtgacggcgagaatttctctccctccaaatggaatgaatagagacttggaatgtgtacctggataagaaactttggatgcgatcaggctgagaatcagatatgtaattcaccacagcagaccattctgtggaaaatctatctttgtacacattctttgcgattgatgtccagatttcagaagaatagcagcattggaaaaacagatggtctcgtgtttccatagggctagagcaaaaaacacaggtcgtgggagtcccattgttccacgtcatcatacgatcacccgtggaaagacgattccgaattgcgagccaagcacaaaaggagaattttggcgttgcgtgagcgaaccaaactccttaccataaatcaagtttttctcgttgattccatttcgcatatttggtcattttaccatagatatcatctataccaactagtcttacattgtatatgtaatgtggtggttgtattacaggttccggggtacattgccgctcaacttctcggatcgaccttagcggctgcagctctacggcttgtgttccatctagacgacgatgtttgtagcctcaaaggcgatgtttatgtgggaacatatccgtcaaactcaaatacgacctcgttcgtaatggagttcatcgctactttcaatctaatgtttgttatatctgctgtcgcaaccgataaacgggccaccgggtcattcgctggaatcgctattggcgcaaccatagtactcgacatccttttctccgggtaactattctaagtctcttttgaaaaatttccatggtgattttgttaaaacataagctaacaatgttttattttcaaggccaatttcgggagcatctatgaatccagcaagaagcttagggcctgcacttatatggggatgttataaggatttatggttatacatagtttcacccgtgatcggggcattatcaggtgcatggacttatggtttgttacgatcgacaaagaaatcatatagtgagattattcgtccaaattgcaataaagtatcttcgagagatcgccaagaagcttcccaagatgagatttgtgttctacgagtggttgatccggctaatcaaaactattttatatgttcatcacctactgatatcaatggcaaatgtaatgttacatgtaagttggcgtgaattatatcgatgtactactcaccacactagttcaatatccatgtattttgttttctcgtttcatattactgtgtatatttttattttatatgcgataagtgataaaaaacaaaaaaacagtattaacacgaaatgttttctcatgctcaactttatatagtgatacaataataaaaaaaaaaatc

SEQ ID NO: 16394 - DNA, 2768 bp, Arabidopsis thaliana landsberg
attgtcgaagggtctctagccagctatctaatttagtactcatattttcgttgttgttcttgtgtttatctactcatatttacacaagatagatttgaaaacactaaataaataacccttttaaaaaaaaaactaaataaatacattgtcaataagaaaaatgtcttcaaataaaaacaaaaatattgataacttttattaaatcgtatgaaatttatttatgaacttactaataagtcttttatttccacattagttttgtttgtttacaaaaaaaagagaagtaaaacaaataaaaaaggtgagacattgagaagggacatgatgtcctatcacactctcacacttcttttcacatcaatttattcatcaaagtaagaaaaaataaaaaaatcataaagacagaaaggctcgtgatccaacaaatatcatcaacaagtacactttcatctgtctgtaaattaattatatactgcaagggtagataaattgcaacttatgaatagtagtagtagttgcccaaataacgcaactcacaacgatttattattttctttcttttttctagcaaacaataaggaaaaaggaaaacgaatcataaccaacatagcagcacaacagcttgttctttttattacagagttcccaatggttggttcctcaagagcagaaatggagaatttattgaagggaaattataaaatccgcagaggaagaagacaactctaccggaaaattggaaagacaaacattaacctaaagtttagtccaaaatcaatagtttcaagatgcaaaaactcattggttggcaaatttgatgcccttctcgatagaggatttgagttctgccttgagggcttctaagccttccttttcaaagtctgagagtggccctagatctagcacttcctccactccgttctttcccagtcttacctgccaaatcacaaagagacaaggggttaaatgaacatcatgacttatataatcttggtgattttgatatggttaatagtttttggtactcttacctttgaggcgaagaaaggaagctcggtgatggtagattggacgaatgagcattccaccacatttggaacaccgttgagtccctttaagcatgcatcagcaaagagtgctcccgcatagcttccacagaaagcagatttcataagagaacaatcaaaagacataactcaaagaataccagaaagaggagatagcacaaaacaatttgtgatgtgacaatatcagaaagtgtgtaatggcggtatctttcaaccattgcggaaaccaaaaagtgacatttatgaacttacgccattgacaatgtagctgaaccctttccagcttttgcctccacgacttctgtccctccgtcctgggtacgctttgtgagggccctgattaaatcatccgacaagttggcttgagggctagcctatacatacattaaacaaaacactttgagaacaaaaacagaccaaaatgataagcagtatacaagaaagagaaaaggcgataggtaacctgagaaaagagaggaagaatcgtgatgccagcatgaccaccaacaactggaacattaacctctgcatatgcaagcattcgaatctaaacatcagaagctataacaacacataccattaatatcttgtttgaagcagatagataactaagtggtaagtattcagccaaagatcctaggaaaaggccaagaaaagacaataagaggaacctgcaacattgacatccgattttccagcatagaaagtcctagccctgacaacatcaagagtggtgacaccgaataatttcttctcatcataggtaccagccttcttaaaaatctcagctgcaattggaacagtggagttcacagggttgctgatcatgttgacaatagcattaggacaacattttgctacaccttcacatagtgttttaacaatcccagcattgattttaaacagatcatcgcgggtcatccctggtttcctcggtataccggctggtatgatcacaagatccatacccgttagcgcgtcctcaagctgcttcgctcccaagaacccgcggacctaatcaatcaagagtggtcattactcattcattagcaagtagaagtaatcttatgtgaagttttcaaagtttaagagagatacttacaacagctccagtgtccatatgactgacgtcagcagtgacgccaggagcattgacaacatcgtagagatgtagtaaagagacaagagggttcatcttcatcagcaaagataaagattgtccaattccacctgcagctccaagaattgctactttgaatcctggattaccacctttagctctgcagttttcccgtccgattacagagttcttggcctccatctaatggttgatcaatcatgaataagaagaagaaatttcactatcagtcctagatgacttcaacggagtcataaacagattggtctctctaatggcatcagaaatcttcagttactaatttcaagaaatggaaatatacacttgtagaagcgaatgtcaagttcatggttgaactataaatattcagaacgttgatgagtctagacaaatcagttttgtttgagagtgaatacaaactattctggttttagtagaacaaccatcgaatttaagaatataaaaaaagataacttgagttaacagcaaaggtaaagaaaacctgaggagtgagatgaagctgaattctagccatcctctggttggcatctccacgaaactcc

SEQ ID NO: 16395 - DNA, 2520 bp, Arabidopsis thaliana landsberg
tttgtgcaaatgacaaacatggtctggttttgtaggatcaacaaatccagcaggttgtgtcatatagacagtttctgtgaggtcaccgtgcaagaaggcgttcttaacgtccatttgcttaatgtcccaacccattattgtggcaacatgaaggacagttctcacagtggctgttcgaaccacagggctgtaggtttccaggtaatcgattctttcctcttgatcgaatccttttgccactaaccttgctttgagtttgtctagggaaccatctgcatttagctttgtcctgaagacccacttgcagcccagaacatgcatgtcacgtgtataaggtattaatgaccatgtttcagcttcttgacaattatcatattcttcattcattgctttgttccatcctggatcttttaaagcagttgtcactgtctttggttcaggatattgaattcgggatgtgagaagagcatacttgggatttggtttcctgattcccacctaagatcgagtgaccatgtgatgaccttgtgactgttgtactggtgctgttacactttctggtgagtttacagcttctaagaatccatctaagtttctctgttctgttgactgatctgatgttgttgtagttgttgtagaaggcacgacactatcctgactatctaatgatgctaaagagctgttgcctataggatcaggatcgaagcctgccgtacacccagaactctcagcatcatttccagttggaagtgcagtggtgaccgttgttgttgtcttaggagaagtaatactgattggaataggtaagatctctacttcttcttctaacatgactgttgtagtttgtgtatcttgactaacatgctgatgttgataacttttatgccaacctagcattcctggagtagacaaggttcctgaggagaagactctgtgaaatgggaagtcttcttcatcaaaaatcacatgtcgactgatgtagacacgacctgttgccaacagtaagcacctataccctttatatttctcattatatcccagaaaaacacatttaagagaccttggatcaaacttgtttcttgcatagtctcttaatgtagggtaacagctgcatccaaaaactctaagagaagtatattcaggtttctgaccatatagtacctcgtaaggacttctgttgtctgacaggactgaggaaggcagaagattgatgagaaagttggcggaagaatccatcaacccaatacttcaaaggcatgcgactgtgacacatcattgccaagcctagctctataagatgcctatgctttctctctgtcaaaccattctgctgaggtgtataaggacatgagataagttgctgaatcccatgttgttgtagatgttttaggaagttagcacttgtaaactctcctcctccatcacattgaaagctcccaattttggtttgaaattgattttctactagggcttgataggtaacaaagactgataggaaatctgatttattctttagaggatatgaccaactaaatcgagagtagttgtctacaaagataacataatagctaaagccttgtactgacttaataggagcaggtccccacagatcacagtgaatcttctgaagaggccttgaactaactgagcaggaacttgagaaaggtagtcttgaacttttgccaaactgacaagcttcacagattctctttgaactcttgtttatattgacagccttaatcttttgtaggtactgaaggacttgttgatttgggtgtccaagcctcatatgccagatgtcttcagatgttgtctgttgacgagaggagtagaaagcatgaactgttgaatccttcaggacatacagaccattactgttgtttccctgagccagaagcctctttgttgccttatcagttacacggataaaatcacagtcaaagttaacagagcatggatagtccctggtaagttttgaaactgataataaagatttgccaatgttaggacatactaaaacatctttaagaggtaaattacctgaggttcctggcagaatagttgaaccagtatgagtgataggtaagaagtctccatttcccaccataactgcatctgatcctccatatggttgtgactgttgcaggttgtgatgagagcttgtaatgtgagctgttgctccactgtctccaacccactcatttccattgtgatcagtgacgtctgtgattcgcatagctgtcagagctgcaggaaattcttcatactgatagctattattcaatcgatgccagcatttcaaagcaggatgacctggttttccacatatctgacacaccactttgttttctgtgttgtaggtgcttgaggaatttgagcttgaactggaagtaatctgttgtgggaacctctgccttttgttgtgtagtatcgacttcctcttccttgtgaataaccagatctgcagatgagtttcctctaacttttccagaatagttcgagtagaaagccatgtgtggt

SEQ ID NO: 16396 - DNA, 1078 bp, Arabidopsis thaliana landsberg
gaatcctctttaccaatttgatgagtaaaaaatcttttatggtttttcatttatatttgcatatatgtattgttatttttgtagcaaatccattggttcttgatgatgatgttaagacagctctcgaggttgctagagatgaaggttacagtaatgtcgtacgcgcaatcgaggtatatgcttgtaacacttatttgatatttactgctattagacgagtcatgagctttttataacttttagactgttgattcttgtagagtcatatctgcttgttctctggttgtatgcgtgagtattctggctccaggttgcttaatttatttgctcctcagcttctttcaagaaaagtgtgagtatttaccatttaaccaaattttttcaatctgtagcacctaattactttcttgtagtgcacatgaatatgaatcttttttggaacatgttttgcagatgggtagttgtcgtaccaactggttcaagaaaccctacaaagcctttaaagttggagctggttctgtatgatagtattcaggtactaaaaaattatcctttagtctcttgaggaatttttcattatctagttcactggtttgggaatcttgttggatagtgtcattgtttctaagttttgagatgtttaccactaggatgcacaaccaagaatggtgatacctttgtggaaagcaaacttagaggaaccaaaatcatttcggtgtgatgattcagtgatgattattgatgactccagaagtaattcctcacacttttcatgcattttataaagaatctgcttgttccttgttgattgaactttattatcatggataggtccaaagtccatgaggcagagaagagaaagcggattcatttctcaggcgaggcgttgggctcaagtcgatagacgtaagtcactctttattattttttaagattcagtaaccatacaaattgatatgtctcgtgaattaaaaacatgagtttcttttgtttttttccagaaatacgtcttaagctagcagctgagatcaaaggcgacatgaaacagatgaattggttttctgaggcatgtaaagga

SEQ ID NO: 16397 - DNA, 2822 bp, Arabidopsis thaliana landsberg
  unsure (1)..(2822): unsure at all n locations
tcttgaacaacaacaaaaagactattcaagatcattggtttttcttatacactaatatagctggactttttaaaaataattacaagtcatatttacgtttagcaaataatgttttcaaatttactttatatgaaaagatattaaatacaaaaattttaaaatggtaacacataaacccgcacgtaatgcgggtattcatctagtaatagtaaaactcgatgttgatagtttaacgggttacatgtgtactaagtaaccacccaaaggaaaaaagttttgatttcatcaaaagatcgattaaatataaaataaaaaagtggattctagatcaaaaaaaaaattgttacaagaatttttttttaatgaattactaattattattggatgatgatggagctccttacgtattttttaccatcagtgatttattatataaatatcaatttaagaaaataacctactcaaatcattaactaatccacgattattatatactcatactttgagtttggattacaaaaaaaatcttcgagtatgaaaaagctattaaaataaaatattaaaataaatttattgaaaaagttattgaaaaatcatgtaatatttaaataaatttagtaatagatcattaaatatgtaaaataaaatcatatataaaattaaataatatataaaataaaataataaatgtattattaacctataaattagaatttgaagagcttacattaattatttaatagacaaatgctaaaatgatgatatgacaatcatatcgaagagagaattgaccaacttttatatatatatatatatatatatatatatatataaatattattttaatattattttattacaatttccttttctggttttgtaatgtaaaaatggaaatataattagacttacgtggaaaacgaaaattgtattttattttaaaaaagccgggaacgaccatctttctttcgtcggcgatttttcagagattaccagagagacagcgagaaacatttctttcggcgatggaagcatttcttaaggaattcggagattattatggatacccagatggtcccaagaacattcaagagatccgcgacaccgaattcaagagattagataaaggtctgtttttttttgttcttttttgaatcatgtatgagttgttcttctcttggatctaatagggttcgaaacttaagctttttgagctgaaatttctatgagtcaaaaaattattgggttgggtcagtggtggatcagctccactctcactacttgagaatttcgaattgaattaaaattgagttactgtgtttctcgatggaacagtataacttatgtttatgtatgtaattgaagagatttaattgatccagtactcatatgaacaattccgttattgctaggaatggaatcatagtgtgttaattatgttctatgtagtgattttgtggaaacaatgcttagtatccagacggatttaatcattttccttccagtacaatattcgaatttgatacttataagatttttgtggtatgtgcaggtgctgtatacttggatcatgctggctctactttgtattctgagttgcagatggaatatatttttaaggacttcacatgcaatgtttntggaaatccacgtatcctcatcttttgatcctcataggataggctttacattatattttattaggctttcaatttcagattttaatgacttgaaagatgtgaaactttcatgttgattggtgaaaacaacgtagctaagctctttttagatataatgccttttttttgtgagcttatgttgttgaaagaggttccttaatagtgatttagatagtcaaagtgatatcagttcggccaccagtgaccttatagcggatgctcgacatcaggtaccacattctttacatttcttcaactggtattattggtcttcatcttataagttggttccatatgtttcaatcaatcttcattgcacactggagttaggtgcttgaatacttcaatgcatctcctgaagattacagttgcatattcacctccggagccacagcagcgctgaagcttgtcggagagacttttccgtggacccaagacagtaattttttgtataccatggagaatcacaacagtgtacttggtattagggaatatgcattagctcaaggtgcttcaggatgtgcagtggatattgaagaggcagctaaccaaccaggccagcttacaaattcaggaccatctatcaaggtaaagcatcgtgctgtgcagatgagaaacacttctaaactccaaaaggaagagtcaagaggtctgttagcttgatagtcttttctttcttctttcatcctgaaaagaatctgttcaagatgtatcacatgttatattcttgtacgctgcgtatctaatcgacttttctggtttgcttatcctgtgtttcactctattgtatgtttacaggaaatgcctataatctatttgctttcccctcggagtgcaatttttctggcctgaggtttaatctagatctggtgaagttgatgaaagaaaatactgagaccgtgctacaaggctctccctttagcaagtaggtttcacattctctctattcagctctcattttcctcagtttcttacattggtatactgctgaatgtctgcttggattcatattgctgaggtttggcgatgctatgcctagaattcaactccgtgagctcagtgtttttttccgcaaagaaatttttgaaggaactactttgaattgatttgatacttatttctttgttgattctaagtgatgaa

SEQ ID NO: 16398 - DNA, 1331 bp, Arabidopsis thaliana landsberg
tgtcggctggagttccataccatcataatccttcgggttaagaataacctgatcaaattattatgttcagtttagaaacacagttgtacaagtatagcctaaagtacaatcaaaatgatatacatccgcgtctgttacctatgatcactaattacatactcacagttataataagaactataaactaaaatagaaataatttcaaactagtttcagattaatcaaagacctgaaggaaacataaccggggattttcgagcttatcaagcctggatcacaatatatgcgggaacatatttaaagttacagtataacatccatcattgctattgatatatgatatgtttgtcattgtattcacaacaatcaaaacagtaggaaggatcccgaaagtatacctctggagccatccaaaatagagtttccttgcaggacttaatgtcgtttaactttgacacctaaataaaaaaaatgacatatatattgagtaagggggataaacgatggaccaagcaaaaaatttagagtaaaagctataaacatctattaatggaaaagaacctttgccaatccaaaatctgcaagtttgacggtgccattggcgtcaaccaatatagttgcacatttaatgtccctttgtcgcatcaaatgagaaaagtaagtaacctaggatgtggaggaaatcagaggcttggaaattacagctgtgacaagatagtttagtagtctaacctgtgtatgaaacctttatggtgaagatatttcaaaccgtccaggatttgttttgtgtacaaggagactagcgagtcccgaagctggtatcttcggtagagttctagaagggacccttgtgttacaagctcaagaaaaatatacaaatttgactcgtcctgcaaacaacgaaataagttattaattgcagaacgaaatgcataggcaactgtaactcagaacaagaaagggagaacagtgccataccttgtctgtgccacgatatcgcagaatattctgatgcttaagctgactcagtagtgcaatttcctgtagaaaaatgaaaaaatgtggctaaggtatggagggatggcaacctacttttgactgatcaatgagacatatgtcgcagagcatatctgaaacttccataccccctcaagttgttgtatgcattcttgtgcctgacttccctgatcaagaagtgaaacttccttgacagcaaagaagtccccatctctacatttaacaaaactatccatcagccaaaggcataattgaaagctcgctttgaccgcataggtcaactgactaccgcattgaaagctacttttttttaa

SEQ ID NO: 16399 - DNA, 747 bp, Arabidopsis thaliana landsberg
  unsure (1)..(747): unsure at all n locations
tttttaaaagctgctatttaaccggtttaaaaagcgaaactcctattaaatacggtaaaatttcgaaggcgtttcaatacacaattaataccatagctcaatttcttcccctataaaaacagccaaggatcttactattattcatcattcaaagacaaactcgagagaaataaactttgaaacttttttttttgtgttttcatcatggctatcaaaaacttgatttttattatagcggttatgtgcgtttttgtctccgtaaatgctcaactaccacaattttcttttccattttcattctaaccgatttctggtatgccaggattacctgacataacaaaatgtttgtcatccgtgatggatattccgggatgcattgcagagatttctcaatctattttcaccagaaaatttggtaacttaggtccggcttgttnnnnnnnnnnnnnnnnnnnnnnnnnnnnnnnnntgccaaaaattccattcattccattgttttcgccgatgctaaaagaacaatgttcaagaattgccggtgctactcctcttacaccaaaatagagtcttagtttatttttaaaacatataaaatatgaattttttgtcttttcaacttctttcttaaattttataattctcagattactcaacatgttttacttaaaaaaaaacgatgatacattaataacatttgagaagtcgtatttgtgtttaacttttagtcgttctttatttctaatgaataat

SEQ ID NO: 16400 - DNA, 899 bp, Arabidopsis thaliana landsberg
ttgtcttacgaattcagattactttttgaatggtacgtgtcttattatataattgctctcttattattacccattttctattaatgatttgcggtatcaaatcgcttcaaacacaacaatagatatggatggttgagtggagaacaatatatggatttagatctttgagtaaatatttccaaagaacatttgttttcaacacggacagtaatttgacgtgatacatttaccaaatactacctattatattctgccaattcgttacaaacagataaataattcgattagtatatacatatctatcgtttaattgtgataactttattattatattaacactaaagttgattaaaatcgtcttgatttcgattagatgttttattttataacattaaacacacatatttaaaagatgagaaattaaattgtatgtatatggaattttaacattaaaaaaaaaatccaaatgaccaatccggtttatgtcggtccggtttgtattaaccaatcttaatttcaatttttaccatataaacctaaccagactattacaatgaagaagaagaagaaagaaagtgacacaaatcggactctccgttcatcgccggtaagtttctcctctttatctccggcggttttgggctgatttttttagattctgtctaaaactgctctaatgattcaattccttcacgagtttacggattctatgccgtgaatttgaaccctaggtttgcgaaagcaatcgcgagttttgcaatttcgttaaatttctgtctcaaagatgtaatctttttgatcatttagcttccattgctaccgtagcatcttattctttccctgaggttttgagttctctcattctatgtgtagcgctaacgagaacgaattaagatttt

SEQ ID NO: 16401 - DNA, 539 bp, Arabidopsis thaliana landsberg
ttacgtgatcaatcatatatctcactcctaaaaatttataggtattactagtagtattatatgtacgacaccattttgcaaaacaattaatacgtaggttaggtgtgtacatagattagaagccatattggtgcataggttaggtgcgtacatgggaaaacaaagaaaaatgtaatcgtgccttgctcgaaaaattgcaggtgggattaaagtaatagcgaaagaatcaaataagtgaaagaatgacaatttctacgtcaagatgagaggaaccaaaatatttaatgacgacttaagcatacattagcaacatggtcgaaaaagtataaacgaagactcaaatgaaagttgacaaacagaaaacaaagactgcgaaagtccgtgtatagtgccaaaggttacgttccgtgtatgacgatatgccactcgatctttttaatactatagttttgagatttattttttaatattcttttgtggttcgttaggccggatgattaaaacaaaaatccgatcaattccagaaattctgaaaatcc

SEQ ID NO: 16402 - DNA, 869 bp, Arabidopsis thaliana landsberg
aatctgggctcacttgacttcctgggttgttttattttttattttatctacttgcgtgtactaaagctgctattttgtcacaatccagttttaattaaatttaaaacatcgtgtgtgagttgacaaaatcaaattacaagctatcttgcagttttacgtattacctcttttaattaaacacaaggcaacaatgttttttcttatataaacaatttaccatctgaaataaacatactttaccaatcgacgagagatcacaagtataaggagagtactactccctctaatcatgcacccctaaaccataaaccacttacatcttcgaaatagttgaaattgaagaaagaaataagttgatatggtagaagtttatgagttattaactgtgatggtttcactcattgtggtgaagctatttcattggatatatcagtcgaagaatccgaaacctaatgaaaaactacctccagggtcgatgggttttccgatcattggagagacttttgagttcatgaagcctatgacgcttttcagtttccaacattcatcaaggagagaatcatcaggttcatttggtaattttctctagcatgcagtgactcataacttacttaagtaacgttgtcttttttttcgatatggaaaaaataatagatatggaccaatttttcggacaagtctatttggagccaaaggtatcatctcgacggatgttgaattaaatatggagatagccaagacaacccatgtttctggacataacagagagcatatcactactttttggtaaacaccacatgaataccttgattcaggaatcttatttctttgtcttcacatttctatttcttgtattatgtttattaagc

SEQ ID NO: 16403 - DNA, 2122 bp, Arabidopsis thaliana landsberg
agttgttttggatatgggtattaaaactttgctctcatgtattctttttagcacatatgttgcagtcagagggaagaggctacatactattttttgtactactttatctataactgttattattttatagataaaatattttttcacgcgcatgttagccacgtcattcacttttactatttttccacgcgcatgttcacttgctgattcgtctaagagggagtttgacgatatatccccaccctcatctgttactttcttaatttccccaacaataatactatatttattagaatgtcccacattgattggaattaatgtctttgggtattatataaagaatgtggcgatccttaacttttgagctagcttttgggttaagttacgccacatttctaatatggtatcaaagcaaggttggctcaacaagcaaattcccacaaaaatggtttcccacttatgtggcccatacaagtggcatgttttgttatatttccgagttgttgggcttggactgtttcccgttaaaccgtttcccacccacatctcgaaaagacctattagaatgttccacatcgattgggattaaaatctttaagtattatataaagaatgtagcaatcctttaactcttgagctaaattttaggttaagttaagccacatttctaataatatttaattcaatcatccaaaagtttcagtttaccaaaaataaaacactcgtgaaaaaaaaataaaaagattcgtaaaatgaaacaaggtgattttgcgacacctttacgacgcctaaaatgggatctctaacaaacgaccaaagagaaacgttgccatgcctacgagatgatatcattttactaaatcgtaacacccatgactttggttatcatactcacataaactgcaattaaaaatgcaaaactggaaaaacggaacagaaagaaagactctctcttttctctttcaatttttcagagagagaagtcttctccgatttggctccggcaatggccagcttcttcagtggtgttggtcggctctcttctagcgtcgttggctctcttcgcaacgccggctagcttttctccgacatcgatggttttgtttatcaccgttggtcggcaaaattccagcaccgattgacttctttcgcaacggtggctggctctgtatcgtctagctcttccgccgtccgtttctccggcgatttggtttgagtaagacaataggatggttcttcttcttcttatgtattttgttgacgatgaaaagggaagaagcagagatccttgtgtagtggttagatttaggtggctagggtttcagttgattggtggaggcacaactggctattatcgttggttttgtttaaacctcaaatgaagatgaagatggagttcaagaagatttgcagattaattaaattggagtcatatactcattaagcttaaattggaatctcgccattgaattctttgggcgaagattgagttccgttacactagggcaattttccggcgactttggtcggaattgaagctttccggcgtcacaactctgccggttctcggaggctccctcctcttcgacttcccacgtgtcacccatcatgtttccctcttgccacgtgatcatgtgctgtgttcaactctttatttttcttcagtataaggtttcttatttgggctttcttttattttgtttttgttttgtaaaccttaggctttgggctactggctttgtaatatttggcctctcagttggctttataaaataaataaaacaattgtgacaaaaataaataaatgcaaaactgaaatcgagaagggaaaagccagtgtttgatcgaaactatgataacaccattcaagttaacaatgtctaagaaacaaccagtactctgtgaccaaataatactttttaggtgactaaacgatgcctgaacaacagacttgcgaacatcatactaaaaatcaaccaaaataagatgggagcaaagaatcgcaaagaacaaaacaactgatacgggtatgagtaccactggcaatataatcgggatgtgctctttaatcaggagaaaaatcaatccaatgtagaaaaaaaaaacccacactgttggaagt

SEQ ID NO: 16404 - DNA, 1031 bp, Arabidopsis thaliana landsberg
  unsure (1)..(1031): unsure at all n locations
caacctggtttggacttgtttaatggtgtgaacagggggtatgttctgatggatgttgcggctgacagaggtaaatgcaagagggacgacactatggaagcagctaaagaccaggaacaaagcaagatggtgattcgtgagatgggagaaagcagtggctgctctggatcacaggaccagccgaacaacgtggggagaggtgcggtgggcccagaaccacctctacctccatgaggacagccgcttggaactgtagaggactaggcaatgacctcgcagttcgacgtctcaaggagatcaagaagaaattctctccaaacatcattgttcttatggaaaccaagcagcggaatgacatcgtcaaagatgtgtgtagtgaagttgggtatgatagggttgtaacagttcctccagatggtttaagtggaggaattgctttaatgtggaaaagtaatgtttctgtttctgttctttatcaatccccaaaccttgtagatacttatgttaatattaatggatttgggttctatttaccttgtgtatatggtcacccaaatcaaacctatcgacacttggtttgggaaagattagaaagaacagcgactcaaagaacaggtccttggatggctataggagacttcaatgaaatacgtgggaacgatgaaaaaagaggaggaaacccaagaccagagagctctttcattgacttcaggaaaatgcttcaagtatgtgatttccaagacctcaaacacttaagtgatcccttctcttgggttggaaagcgacattcacatgatgttgcttgctgcttggaccgctccttgttcaatacagaatggttaacccaatttcctgcatcacatatggagtttcttgaccttatcgaatctgaccattgtccgattataacgacnnnnnnnnnnnnnnnnnaacaacaacataaccaattctgtttcgacggaagagtggtcgaccgggacggatttagtgatgcaatcgccggacctggaccaagagatttgacaacacga

SEQ ID NO: 16405 - DNA, 1389 bp, Arabidopsis thaliana landsberg
cagttaactcatcgcgaagtcaaataattaccaaaaaaaccatacagagcccctttaaataaaaaatttccaaacccaaacaaaccaaaacaaaatacatattgccttttgtttttttttcctcgtaatagctctactcttcttttttcagtcaagtaatctataattcatagatttttatgttgattagttgttagagcatacattctgtcatgaaattttcgtatattcataggttttttttgttaattaatagtaattttctctcttatggactaattcacaacacttttgtcataacttttgaatcacagtgagagggttgcaccgagccaaagttgtaaattaaattgaaattttgaattgtcaaagcactagagatggatggtagaaagtagaaacgaattttttatttgacttcttatacaaacgcattattcaaaaatcaaaattaagttgaattataatcttctttttttcttgtatggtgtgtgtaactaagaaaagtacaaaaccacacatgacacaacagtactacactctcaattatgtgtacatgagctataaaactgcccctttgtttactaactagatatataacgagtactgtttaatttaatggtttgatataactaaaaattaggagaaagagaagaaggagcgtttggcaggaggacgtccaagggctctcatgagattagcaacttcaactacttttgcaacctctgtccctctctttgcctctgccgtcgctcttctctcctccgctttcctctgcgctttcgccacattgttttgcgttttctccatcgcttttgcttttctctcctctagcttcctctgcatgcatcgatcccaaattgttagcttaacttatacatacatatctctatgtatacattatgaacccgtcatgaatgatcaccatttagacgattgttgaatgaacctacattatactgaatatttttcactatattaattattatgaatcctggaaaggtaattcaacaatgtttgtataattggaaatgacgatgccatgcacgatggtaaataaatactactatttaaaagactaaaaacattaattagaagctagaaatgtgagagaactaaccatctcacacctaattacagacaaattatgccaccacaccattcctactatagtttacaatttttcagatgagaagattacgtttgacattccaaatggcgataaacccaaaaaaaatgtttatactgccaagtgctaactaagtccacttaattatactatcacatggtctaattctatattaaccagcttactaccccaatacttaatccatagctcaaatcaaatctgacgcatgttactaaattaacatcgtacgtgggacggaa

SEQ ID NO: 16406 - DNA, 1941 bp, Arabidopsis thaliana landsberg
aattagggttttagtttttttttcttgttcggtggaaattaaaccgttgattaacttattaatttgaaaatttcggtttttattggtttgcttggtccgttttggtgatattaccatcgtcatcaaaaaacaaataattggcaaacttactaacctatgttttcgatttttgtcctaaattttgaattgtttgtaaggtaacaatttcaactgaactatattaatattttgcaaaaatgttggaggctaataggattctgctctcgacctccaacttgaacagttagcgagagaatcaaacaacttgttttttttttttttatcaaacaacttgttagttgtcatgagtccagtactcttcatcttgcattgtagtctgtttatcatttgaaattcctttaggaaaaaccacaaaggctgttcaccaaacacaaactagaaaaaaagtatgtttatctttgcagaccttgaacactttttctttctctttatgatcacccacagtgctccaatgacaagttaacattgactagactaatgtgagaagagtgtaagctggagacaaaatggaaaacatgttttcaaagtacagtttgccaatgagttatttcttttatttggtatgtagatccagaatctaacaagtaatcagttatttgttcctatcaaaccctgcaattgcgctagatctaaagaagaagctaacaaatttgttgtcatgtcatcatgacatgtcttgaactctaggcaggcttggtacatctgtcttgaattcttttcatgagctcatgtctcttcttacatgtttttatttgttgattttgctatctctactatgtatttgcatagtattgtattgctttcgttttggttctatatatatagaagtaacatgtaacaataacattgcaaatttttaatgtttaacaaaatcattgaaagatcaagaatagaggtacaatatcattaaataagtgaaaacttaattattaagcagcggcataaagataaaatttttgccgagtctcattatcgatctgctatgcctttaggttactaatctaaaatcattgaaagaaaaagaaacaaaccaaaacaaataactaaaagttgatcacgcagacgcagtagacgtataggtagacgtagacgcagtagcagtagcaggcgaatcttcctctccgccacaacatttgagtaatcgtttggcgcaatagaaacacgccacaaaagccgagatgaggatgagaccaacaaacacgatggttaaaatgtaaccaatattcatcatattgctcttcgaattcactacaccaaaaattttcttctttttaactttgtttcgtgacttcttcttctccggtatagattatgcttatatacacgtcctgtcaaacacacaaatgacaagtttaacatttgtgaaaaatacatatttacctttttcactaaggaacattggaagtttaacattttacggtactttcttgatcatcatgccatcaaatatgtacatgtgtatttagtgaatcaaatctattaaactatttttaacattttattccaaaaccgtaatatatagggcatcttgcttacatatgtgtttccttttttaacaattttttttttgtgagatccttttttattacaaatatttattgtcacaactcacaatgattattacattgtttctttctgtaatttatctattattttagttaatttctttttcataatatatctaaaggctgcaattggctagtgatgaaaaatgtcttgaatactgtatccattttaatctcttttttttaaaagataatatcatttagtaatctcataaaagccttccctatgtaattcccacaggccacaaccgtgctcaatatacttttacatctctcttcaaatgatgattaggaattcagaatcataccttaattt

SEQ ID NO: 16407 - DNA, 2637 bp, Arabidopsis thaliana landsberg
tctagaggatcgaggatcatcacgtgtatcaaagacaaacaactcgccgtcacgaccagctaccgagtccgacccgaacccgattacatcatcaacccgacccgctatcactctacaaatcatcatcgccttccttcctccgccacctccactactcacgtacgcttcaccactacccgaaaacgtacacacagcctgacctttcccaccggcaaaaacacacgcgccaccgttaaacccatcaagaaccggataaaacctcatcatctcattaccatcagccaaacaccgtgcatcctcttcttcacacgtgcctccgttaaaacccgcacgtgacttcacaacctctctatactcctcgaaccgggtcacagtccttgacccgtgttccactttgaaaatcatctcgatccgacccggaaactcgtcggagctccagcttgaatgaaatataatctccactacgtttcttgacgggtgaccatcgggcagctcggtcagtgcgtctgatgttcgggcagatttgcttcgtcgggtccggtttggcgggttaagtaactctgtttcggttcgacaagacttgaaacgccttagattcgggtcgggtttctggtttttcttgcttaaccgggtatcgatcacgtctttgacgcaatgtgagctctttcgactacaattgtaactcgacgacgacattagtgatttactgttgaaattgtagacatcatcgaaagcttttgatttgcattgcaatgatttgatccacccgtttggcatgtttcggttacaggatccggatctttattattcttgtatctgtaactctcttcaacaagttatgtatgatgtatcttatgaacaaaaaaatacccgcgagcgttttatcatatgatcatagatattacgcttttaccctctaatttttctcctgggcctggcccatatggtttacataatcaatacttagaaaatatgatactatttggtttgatgtggtgactcaaattgtataatagattgattataagtttctaaacaaatattttgtgaaatgcgaaattattattcgtatctgacttttttttgtgtgtgttttttgtgtgtgtagcgactgattttgttgataaggatttttatttattttttcttgaaactaaagttattgaagaatgaatttatgattaaaagaggcagagtgataagagagaagttaggtgaagaaagcaagaattttctttacatttaatgaggaaagcaaattgacgcagtgtttccttttaacatatcaagaattgaatgatttaagtgttgtgtcgggttttatttattgagatattgacaatcataaataggaatccgagtaactttactgtagtgtaacaataaggtaagggaatcagtaggaccgattcttaagttttatttgaacatacaaactaaaaaagcacccccattattgtcaaaagaaaaggtagagaaaaaggaaaaaaacttgtattaagatgtcatattgtacacttttacaagtatgaaaaacatcggaatgaagcatatagtaacaaattagggatattgattgcaacaactagagtaaccaacgattaagttatgtttgttttgcagttgctagcgacaatgatcgataattatattgtgttggttggttttgtggtcgctaacgaatagtaatattatattgatgatgaaaatttaaaacgttaaaacttgtatttgttggcaaagtggtataaatgaactaacaagaacaaaaataacaagatttagtcgcttttactggtcactaataactacgaaacgaagtggaccttaaaaatctaaggtggttatgttagcgaggaaagtgactgatcttttctctttatgggcttaataaaaaaggcccaagatgcacatatttttctaatggattagtgttcttctcttagaaagcgacgtcgttttgttagactcaacttcacaattattttttttttctttgactaccgtccctttaaacgacgacggttttgtttttgacagagatctgttacgacagttatgtctccgtcgacgacgacgattttcatcggtcccatcttagcggtggacgccgccgtatctcacgcgattcacacggcggcgaaaccattcctcccaccatttgtcctcctcctcctcgaaatctcagctgatttccgattctccttccccgtatccctttccttcctcctctcccctccattacgctctttcctcgtccctttcctcctcggcctcctcttcgatctaatcttcgtcggaatcgtaaaattaatcttccgtcgtgctcgtcccgcttacaatcacccttcaatgtccgccgctgtatcagctgatcactactcgttcccctcaggtcacgcgtctcgcgttttcttcgttgctgcatctgttcacttcttctctgctgctgctgaagcttccatgactggtccaagctactccttcttagatggatgggtcagagatcataacgatggcgatgtgaaggtagaagttgtggtcgttgtatggatctgggcaacagtgactgcaatttcaaggattcttttaggaagacattacgttctcgatgtaactgctggtgctttttaggga

SEQ ID NO: 16408 - DNA, 401 bp, Arabidopsis thaliana landsberg
ttgatcgttaaaaagtttgatctgcagaatcgctttattattacgttttatcaaaatgatatataatatgtcaaattcttttttcattttcgtctgctatgataaattggtaacatgaacttacaatttttttcacttaatggttttgagacgtcagacataacaaataattaaaacatgagattctctcttgtatggctatatgtaagggaggagatctaaaatgctgactaaaattactagcatatcatgatgtggttgacataatagatcatgaaagaatacatgaaataaagaattgttagtcacattgaaatctgataaatcttaaaccacataaataacattactacatacattgtatcaataattatatattgctgttgagtgggtttatgaac

SEQ ID NO: 16409 - DNA, 1419 bp, Arabidopsis thaliana landsberg
ggagtaaagatcctcagctcatggtgacaagtaattacttcatctggacaaaacaaaaatttataccaacctggatttcttcccaaagcttctcgagctggttatctcgcaaattaagttccacaagatattccggcctaaatgtatgaggaagactctttcctggatatacctcccaatgtaataaccttagttgaggtggaaaaaccatgtcctcggatagatgcagtctaacatttgtatcaagtcttgtcttgtaaatgctgagaaaacgaagattacggatccttttaaaagcttctgcgcttatatacacatcgtttaagagtgtggatatatcaaaagatatacccatcacatttctattaccctaaacaaatttcaaaataaaagtaaatgttagcaccattaataagatatgcagagtattttcgaaatgacatggttaaacagatagattttaaaaaaaacgaagatgaacttacagaatcattttcgaggacatcacaaatctcatcagagtctattaggatttggcgtttcccatgatcttgtctttgaaccgcttctttaccaacttgttgtagtaacttatgcatcactatatctcctttgattgatatttgtatgagagatttatatgcgaggggttttcaacccgtatctgacatccaatttactgtcaccaagcattgctttcacatgatcattgtcttggtagttgaagaagaatgcaatcaggagaaaaagaaattgatcgttcttatgtaaattatcgtatccgactctaagtactccctcgatctttctatcaaggctattttcttgcctatgtaatatactttcccagtcatcttctttctttctgcgtaatgatgaacccatgacacggagacccaagggaaggttactgcaaagttttaacactctttcgacaagcttttcaaaaccatatggtgcagaactctgtctaaaagcagatctacaaaagatcttacgagcttcttttatagttgggaaatccacatggtatgtattgttgatatcatgttgctccaaaagctcttgatcttccgtggttacaataatcctgcttccaggaccaaaccaactagtttcattagtcaaagcctcaagttgatctagactctccacatcatcaagaatgataagaacattttggtcatgtagcctttctcgtatcacacctaaatgggctatcctaatgccatcgaggttcaaaatctttgaaagaagttgctcttgtaaccgcaccctcaaaccatactcaacaagaccattcttatagctttcatgaaggttgtccataaagcaattatgctgaaaccgtttagatagttcactatgtggagctctggcaatgagactctatatcaatgcctgcaaatccagagattc

SEQ ID NO: 16410 - DNA, 2646 bp, Arabidopsis thaliana landsberg
tttattgaagaatttgtttatctcaatttcacaaaattcttaaatgatcttagactgttcaagttgttgtaaaactctttataaagacacggagactcaatttaggaagaaaaaaacccaagaaagtgcagtgaggaaaagagaaagtggtctctaaatgagcactaatagatggaacttttatgaccactttatccacagcagtagtactgtttgcgctcagtacattaattaatgtgtgttgactgaaacaggtgagaagaataatggaaggaaatcatcggatgggaatggtgggtattgtgtcctttttcttctttctttcttcattatacattcgtaaaaggttcctaactagtaaggtttgccgttccaatgttcataggtagctcttgattcggcgacaggttctccagtggatgttgcttgcgaagttgaaatcacagagtctgttacttatttctttctgattatatttgttgttcttcagttgatgattttaaattacattaactcacacaaagtctgctgatgttttggaactacacaggtgtgatccactcccggatggacgttttgtcctggaggtgaatatcatgttcactactttatcttaaatccatattacttggatctatttgtctaaatctctgataccgtgacatagtcaacctatagagttcatatttttggggtacttttcaagtgtaagttgtcaaatgattaacttagtatatgcttctgcagctggaaagccatagaaggtgccgcattgtaaaagcttgggatcaagatgggtaagctttgtcattttgattacttgatattattcacatgtctttttaaacaatctctctgttttcgtgtcagatgtgattgatatacattataccaaattacatttttcctttatttttcaacatgtgtgaagatcaaatatttaattttgggtcttcttgtaaacacgattgtctgactttgtttcatatacgttactccatttcagcatattcagacacaaaaacgcttagcttcttattaccatttttttcttttcagatatcgtgttgcagaggttgaatgggtgaaagatataccaccacaaagcgagcaagggaaagcagatgtacgatttttctctgctgttactaaagtgattttatttcctttctcttattttcatatctttctttgtgacttcttaaagctgcgggaactgacgaccagcgcagcatcatttgctcggtcatggctagatagagcaaaggaagcagctagacaaggaggtaagcaactattcattagctgagaaagagaattgaattactcatgacttctggtatttccatccaagctatagcaattgaaacaattcattagatcattagttaagtgctgtttcttttcctggccatgatctttgaatcaactattgtctttatggttgttttagagcaaagaattgagtatatgcacggcagttagaccatactctaatagttaccagctaatgttttatgatcataattgattgatagttgtggcacttgtatactcatgttattttagacatgatcgagtaattccctttttctttgtttttacagacagaagaagacttgaaatacttctaaatgttgaatctatgataccaacgcctcaagatcccgagcgcttcagtttctgggtaaaacacacaactattggcatatttccacttgtgttaaattattgctcaatgagtttatttttggcgccagcttgctacactgacagataggagaccttcagaaagattggaactacttcggcttcaggatactggagaggtacttgattatcggctagtacagattgctcgacaaatctcattgtttcaccagtccctttcttttgattgttgaaactttgttgttgcagagaataaagcgcgggttgatatatctccgatcagtagaaagaggatgcagaatgcaatgaactggcagcatgatggcattgtattgccggttaaactacagagataaacttgggacctgttcataagaaggttgacaaaaacatttattcatgattaaaggaatacataagatagagatccttgtaggatcgctgtcatcctttgtcggatccattgttgtagattttgtttgcgactgtattttatttaattaccatattcttcattatgcaactgtagcaagaagaaacaaaaaaaacaaaacaaaaatatgtaagattcttgacaagataatatcccttttcggacacagttagttaattttggcactgttttatcaaatctggaagcttagaggaagagatagggctgggcacaagtactcgttactcgtcttatactcgctacttgactcgtactcgccttgaaaaaacaagtactcgttgttaacaaggcaagtaacaagtaatataatttagatacttgcaagtacaagtcaagtaacaagtaatgaaaaaaaaactaatacttgactcgtttgactcgttacttgtcattattttaccattttatatacatatattgtattgttttagtgttagacacattttaaaactatattagaagtaaagtaaattttaaataagtaaaaaatatgataaataaaataataagtaattttaagt

SEQ ID NO: 16411 - DNA, 568 bp, Arabidopsis thaliana landsberg
  unsure (1)..(568): unsure at all n locations
accagaatgctggagcatgagagccatgaatgccctattctctgccctatcctgaataagctgctgctgaagtcatcctgcctgtcctgcatgctctgaaacatcgagagcatcctgtcggataactgggcctgctcggctgccaggtgagcctgctgctgggtgagagtctggagaatcgaagcaagagcagggtccatagcctgaggagtagcaggggcagcactaaaactcccagcctcatgatcatgtgagcgtggaggcataggaggcggaggcggaggaggaaccccaaaatnnnnnnnnnnnnnnnnnnnnnnnnnnnnnnnnnnngtgtcaagctgtcgaagagctgcatcctcggcctgagagtcaaacacagaagcagaagctggcactggaatctcaggagcaggacggtaagatccaaacacaaggcgtgaggcctcaagggtgctctgaaatcgaggtggctgaatcacgtgcgcaaagatgtggcataagtagtgagcataaggtaactgccgacgagcacgaatcccatccagaacagtgtcctcgatctcac

SEQ ID NO: 16412 - DNA, 2058 bp, Arabidopsis thaliana landsberg
cttcagctgttgactctctagtattgggtgctttcagccttcttcagagttctaggtaagcttcatcttcttcttttttcagtttgcttccttaaaatgagctttaagctctttaatggtgaatctctttgtagaaagaattaggagttgatctatatcttgttagaaaactctcgtttgtaagaatccaacgccactgacatatcatcaatcggaagtcagagttgatcggaatttgatcggtatatatttgatttttgttgattcatagtcaaatcgggatttatttacgccggttcttaagcttttaaaaccggttctagaatgttctgactatgggcaatactcgtttgaaatctaattttgaattggttgagtctgattttaagcggttagtaatttggtccggttcagcttgttttaaacaggttctgtcaattctgatacttgattaagattgaaattgaaattagcattcagatggtatatagtacttatttttctgatatacggttgaatttaggcaaattaattggtgatttggagcgtgggtagaattgatgtaaacactcgttcggtttttaaagcttttccaggtgagttctaactcccttattagttattatacatttgtataatattttaggagtgtgataaaaagaataaaggaattatttgtatattctcaaaattgatttgtttgctttcataattaatttggttataattataatactaagatacgttattctgttaagatttgatgtatatttgcaaaatatttgggaagaaaatagaaacaaaatttgaattattggaatatgtgaattctgaaatttgattaattatttagggtgataattctgaatatgattttgataataaaatatgtcattctgttaagaccagtattagcatgcgactctaattttgctagctctattgagcaatctgtggcggccggcatcgccaacagatgtattccgtattatgttagtctgttagtggtattgaggtcggttaataccgtggaccgtacttccttatcaccttgataggggccagcatccctatcgagtatattatgtaaatattctgttagtatatggtttagatcgactaatgttggggttgtaccattccgacatgcattgctggatacatggtcgttctgttgtgatgttattattctgtctgatgatattattatgttcttatgatttaattatgtattttgctagcataagttctaatgtgctttactttatataaaattaattgaattaaaactatgtttgttagtaccaacacgtgaacattattctgtgcgggatcagaccgtgttggtacttgttcttcgggtttgtagtttcactgggcgatttttcgctcacataagttctgattccatgcagagggcattgacgaggagcggtatgcagctgaggtttagagtttgttattcgaaacgagacttggtagactttttaaagtttaatttattttgtttttaagatttggagtttacacaaaatttcaactttgtatattttgcaaattttagtatttttattatagtaatgcttcaaagattcttttgaattttcggagtgttacataagtagaagatgaatcagttacaaatcagcttgaacatggagatgttagtaggagaaaaattaggaattagatattttgacaatttgaaagaaattttttgaatccatatatgagaagaaaaaaaaaaaacctgtaaaagaactaattctttagaggtttacctacaaaactatgggcttaccatttgtgatgggctaataatcacatatgtttctttaaaattaagaagcccattttgttttgcttttcatagttagttttgttccaattttttcttttttccatttaaaatcttctgaatttgtgtaacttgcaagtgccgctttcaatgaatatgtcttcaatatatctaggcttatgcaacgaaatgtgtcagtagattgtttcatagatccatagtccatacatgtgtaccagttgttgagggctgccatgtaa

SEQ ID NO: 16413 - DNA, 1495 bp, Arabidopsis thaliana landsberg
  unsure (1)..(1495): unsure at all n locations
gtcgactctagaggatcccctgttttcaagaacattcagccactgaaagacagggcctacccagcttatttgtatcgggggctagccgactcaactcgggttaccaacaggagaatcccttcagcagacttggtgagccgtctagaaatgatccttaggggcaaggtgtccaatgttggagctccagtggcatactcggcctggaacctgcctcctccccaagctttcaccttttttgtgtcaaatccgcctctgactgatagcaatttgggccttagagtgcgaccctctgctgaagaagtcagtactttggttgcttcgctcggggagattcctaatgatgaacggcaggtttattttgaagtgcctctgaaccctagtgatgccgacataaatgatatgcttgatctgttagctgaggattcatttgatgctgctcttgatggtacgttggcagtggtgcccttccagaggttgatacaactttggatgtccaaaacctgacagtactcgcccgagggccctagccggatcagtcacccgagccttctgctaatgaacaaaagaagaagagaagacgcctgcggcnnnnnnnnnnnnnnnnnnnggacattggtacctcggttcctgctgctgaagaagtgtctgtgactgaatttactgacgctgaccccaatgggtgtacccagtctgttgctgatcccaatgtgagtgttccatctgttgctgatcccaatgggggtgctgcctgtgttgctaatgtggacgacgaggaggaagaagatgaagttcctttgactcggaaaaacagtcggcagttcatcgctagcggtgaaagtagtggggttcctctcctactttgtctgctctcattggtctgcaagaactgtccctggccaactttgatcagactcttgaggatatggttccagaggatttgttatcggagccagtggatgatggcgtgatggatgtttgtgttgatgtgctcgatgcggggttgggtcatcccgggcagcgtcccgcgcctcatcgaccttggagcacggtcttgagggtcaggaagctggtttggattgccctactcccatggaagtgactgagggaccttcagccttagaggtggctgctgtagagaactcggccctcaaggatggtgtagcgcttacccagcccccgagggtattgccggtgatgatccggctcggttgggcagcgcgagctatgacccagcccccgagtgtgtccgagcggggtctccttctcatacttccatggatgttcacgtcgggtcttctcctccacattctagttgcatggcagcagcacgagctttgggtcaggagccttagaggctggcacacctgatgatagagttttgatgtctgctggtgacattgaattgctcctgactgatgctctgtagattgcttcggctggtagtcctgcatcaagtcgccaactgaagtcccttgatttggggttccttcggtct

SEQ ID NO: 16414 - DNA, 1166 bp, Arabidopsis thaliana landsberg
tgttgcagaaatatacaaatgcagagagaattatctttgagagaaaacattaacaaagtatcaaagcataatcaactatagacaccagaaagaagctaacaagaagcgttgtcgtaataagaagaggtatcaccaacctgaaagatatcagcaaaactcttctgcttgcctccaatccccaaacccggcaaaccgatcaatccattagcatcccattcagaagaagaagcactagttttctcaacctcaaactcatgctgcttcctctgatcaaaacccggtggcatagagaacaaagattgactatcattaacttttctcctatccccaacaccacctaacacattattactccctttaagcctctgagcaaccctcaaatcctccctagacatcaaaggtggtggcaacctcggattcaacttcatattagcatagtaataagacaagtaagccggatctttcctaaactcctcatcatcaccaccaaacccattacccttattaacaccaccaaactccaaaaaaggagccccacctccgccgctaaaaagccctccggcagcactaacagaaccatcaacagtcggtggagcagagccacttctatacaagttaagctctctctcaagctcatccgcctctacttgccttctctgctgctcaccaagcaatactccaatctctttctcgtaatcatccccaaaagatgaatcttcgttacctctatgcatcggtcttctccctagttccggtatcatcatcacctaaacaacaagaaacccccaaaatcaattacgctaaaaatcctaaagatgacacctttataccccaaaactaaacccaaagatcaaaactttaagctagtactcaaaatccaatctccatgtattactgtcgttttcaattaaaaaaaaaaaaaaccctaaacacaatgatcagatgatgagaaatagaaaaatcgaaactttaagaagaaattgggttttatagagagttagaagaaaaaaatcgacggcgatgtaagaaacccttagggtttttgtgaaattttttttttaaaatttttttactgggaatcattattagggttgttgttgttgatctgacctacgtgattgcataaggaattgaacaattataaaaagcattattaaaaaaaaaaa

SEQ ID NO: 16415 - DNA, 1979 bp, Arabidopsis thaliana landsberg
cttacattctcttattaggcccaacgatgtttaattgggattgtgttttttttaaagagcgagctttaccctcccccctttttttttgactaaaagaaatattttatattcaagactgtaaccaaatatacaaaaagttaggatcaaggacaatcattctagatcaaccacaatgaatattacactaagcaatacttctttctttctcaaaaagatgtttcagccaaaaaggaaacccgcttgctacatacgattggcggcgatcctccattgtcacgctcttggcaataagatgagctccaagattagagcttcttacttcaccacacaatttccaatccaaaaaattacttaattctcccaacaaaaagtgaatctgaaatttatacgaaggccaagacggcagtcgcgtaacagctccaattagatcattgtcttcagaggcaaagatgattttatcaactctgagacttttcatactctccatggcccattgccaacaaagaaaagtagcatcaagcttgctatgaacagatgcaaaagatcttctagcatgaattaggaccttaccgtgttcatctctcaaaaacccgcgcagcacctccaatctcaccaaatctatcccatgacgatctaatattgcattttaaccaatcatggggaggaggagaccacttaaccttaaccgaaatgtgaacagcttgctcattcaccaaatcctgattctcaagaacttgagcaaagaaccattgattggcatcctctttaatcttcgcaacagtttttgagatcgcaaatcttgtccctttattaattacctttttcacagaaaaaaataatattctgaaaatacacttccatggaacacttcatcaatttgaagtaaaaacaaaaaaaatgatgttttttttgtttcacctgatcaatcaaatattttttctcattacacaatcaaaaacctcaaatccattaattttcaaaagatggaaaaaaaatatgaattgactatgcaatattacacattttcttattatttatacatcgaattttttcattccttatgggaaaaagggaatcaggttactttgaccgaatcaataacccaatgttgaccatcggttttgacctttaaccggttaatctctgcgaacagattcacggctctcctcactcctctattatccgccgccgtgaaataatcgtgaccaaatataacaccgccgggtcggagtatccgaaccgcccggtttatatccgcccatgccgaattaaaatcgtgacccgcgtctatctccaccaggtccgccgtcactccccactcacacagcttctccaaagccgaaccggtcgagaaaggaaccggcaatatcgaaccggaaaaatccgagataaccacgttttgcataaactggtacataagcagaacgtcaccgttaaccaaagccatgtccttaaaccggtctcgaaaaccgggccagccacggaagtcgtcgacgcatagaatctgagtctcctcgagcccaagtcggcgcgtgagattcgccatgtgtatcgccgacgcgccgagaaaactcccgacttcgacgatcgtcttaggtttgactcggcggattagattctcgaaaacggccccgtatgatccccaacctttgattctttttggccggagaaacttcttggcgtgcggtggtgggaaatcgatgtacggagaagttccgttaaagatccggtcaataacagtctggcgaatcaattccggcggaacaagattgccgcatggagtcgtaactcggaagttgtcgattgagcaaacttgaggttttgtcgtttccacggctgtcgtagacggtggcagctgctgctgcagcggtctgatgatagtggtacgcggagaagtaaccataggcgtaggcttagactatgacgataacgtacgcagcctcggttttcaagaattggaaggcgtcgcgtatgtgagg

SEQ ID NO: 16416 - DNA, 3309 bp, Arabidopsis thaliana landsberg
taaagcttactctttctgtgcttaatacagaggacgagtatcttgttaacatgcaacatactgttataccatcgtggtatcagcgggagggatatataaaggcaatggcaaatctaatccaaagcgagttgggaaaatttggttctcctaatcaggtaaacaatcttgtgtctgctcactagtggaaagaaagaattttcaagtcttttgtagttttttctagctttgcctattgaactatcctaagacgtgcttcaaaccaaaatatatgttacaggttgtaatatttttcagtgcacatggcgtgcctcttgcatatgtcgaagaagccggtgatccttacaaggcagagatggaagaatgtgttgatctaatcatggaggaattagacaagagaaagataactaatgcttacactcttgcttatcaggtacttcccatttttgtcgaattagttgtttgtcaaaaatttcactcattctgttgttttattatgtttaacagagcagagttggaccagttgaatggctgaaaccatacactgaagaagccattactgaacttggtaaaaaaggtgttgaaaatcttctggctgtacccataaggtaatcatctgtctattctctgccacaaattctctcttctctggttatttgaaactcacgtttgtttctattttaacagttttgtgagcgagcacattgaaactctggaggagatagatgttgagtataaagagttggctttgaagtctgttatcaaaaactgggggcgagtacctgctctaggaacagaacctatgtttatatctgacttggcagatgctgttgtggaaagtcttccatacgttggtgctatggctgtctcaaaccttgaagctcgacaggtaacaaacacttttcatcttacatctagttaaagctccacaaaagaatctgttatcttcacttctaattcttttcttttctggttgggcagtcgttagttccgctcgggagtgtagaagaactattagcaacgtatgattcacagagaagggagttaccagcaccggtgacaatgtgggaatggggatggacaaaaagtgcagaaacatggaacggaagagcagcaatgttagcggtgctagcactcttggtgctcgaagtcaccaccggaaaagggtttctgcatcagtggggcatcttgccttcattataataaagataacgtatagtctttttctctatgaaaacccaatccaagaatccaaatgtgagctttcacatgtggaataaggccagctatgttattatgctctcttcttctctgttgtagaaatgttgacatttaaatacttcatactgtatcttcataaaacattaaatgttgacattttaatcggcatgctttttcgcaacgtgaatgtttgagtcacaatacttttttttccagtttaagccatttctgctgcatagttcatagcagtgtataacaattcaatgaatgaaatcaagtctaaaagctcaactctcaatagaaaaagtattacaatagatactaacatcataactaagacctagacgaactaggaagaaaaacgaaaaattacaagagcaacaacagtcgtgctaagcaaaataggtaattctatccgtctacaaaatttagatatccaagagtctgcatactgaaacccgggtggatatgtcatggtggttttcggatgtcgaagtcggatcatattttcaacaaaaggaaataaaacattgatgtgtttagctacacaacagacttcatgagtctttggattatatttgagcaaccgcttatcgctgtcatggaagtaaacattcccttgtttggaaaccgttattggaatgcaattcatcatcgaatagttggggcaaagatatccagggagtaaacgtattttgtaagttttagacttttagtccacgtctcttcttgtgtatccatggtccatatggctactttccaatgaggagatggctcatagtcacagaccatggctagacgatcttcaaggttggctagtggggcgagtgtaggtgatccatgcggtcttgggacatcacggaactgttcagtgtgaagatccaaagctagaatcttgtaaccagtaactaggtcgtaccagtagatggacccattcacaaaaggccgaatgatgatttggttggacatagtaaggaggcggattcggcattgtccgccattcaccaattgttaaatcatggatttcgaattggttagtatcataaaacatcctcactattttataggttccattaactttgtctttaccaaatcccatggcccaatatccagggtaataagccaaccaagatgctccttcaattacgcgatgattatcatagcgactggtatctactggatttgggccggaagggaatcttaagaattctccggtgcaagggttcaaaacgttgacccagcctggtacggggatgcaaagtagactaaaatcgtatggatttgataaatatggaatttttgcttttttataattttaaatctcttgcgtataaattctaaattatatagtgaatatgtgtttttttttagatcaaataaaagtaaaattatgaaggataattatgacgatttatttataaatacacattcaagtcttcactgaacttgtctacagattttatggagagctcatgtgtgaaaactataaaagattgtatgttttttagtttcacataacgaagaaacttggatttattaactatagaccaaaacttgaatgtgaacaataatacaaaccaaatgatccttgaacaaagaattcttttacttacctacaaaacttgttaaaaagcagagagctctttacatgaaactattgaaataatcaaatctgcagagtgagagtggtgtttttactcttatattttagaaagataaacctgagatttaaatacagaatctccgattttaaaccccggcattgtgacgaactcaacgcttaaatcgcctcttccatcttctttttcatcacccactacagattccatgtagacacctgagaaactggttcctcttctgaccacaaagatctttgctttaagatctaaagaagctgcaaacgatccaagaatccatacccactttgccattttagcaaagatttggtaaaacatcgttcttggatgcttaccaagcaaaactagtcccctcatatccaaattcccaaagaatgaagcctccatcgatggatgaacaactaaaagatacttctgaccgcagaatcttgaaaacgcggaatctgaaaacgct

SEQ ID NO: 16417 - DNA, 1026 bp, Arabidopsis thaliana landsberg
tccagactttgttcccgcgcattcgtttcgttgtgtttgagatttgagctctattcgagtcaaggactccctgtgttgtcatttgagctcaagtcttctcttgtgtgtgtgggtgtgttgcaatttgcgtcttgtgtgtgttgctcatcccaaccttactccgtgctttctttgtgatcatcattgtaagggcgagaggctccaacttgtggagattcctcgcaaatgggaaaaggatataaggaagaaaagtcgtggtattcaagttgatcattggatcacttgaaaggggttgagtgcaaccctcgtccattaggacgccacaacgtggaagtaggcaagtgttacttggccgaaccacaggataaaatcaagtgtctcttgtgattgctctctccttgattgtctgtgttctcaagagctcgtttcaagctacttagccattctaactttcataactaagttttgtggaatttagtgttgaatttcacaggatcacctattcacccccctctaggtgctctcacacccccttaggtgtgtgaccctataggttcacgcatgcatcaacaagacccaaatactcccacttggtccaatagttgatagcagcctctagcaagacatatcaactcctatgcatatgtaattagatgaaccatcacaacattatatacacacaattccctttgtctcatgatatttggtctagcactaagttgacctctctttctcgatgttgtgacttagaatccttttataggttaacgtttgaccctagcatgaccttgtatttcttgattcaataactcaaggggcccaaagatatctctctcaaaaagagaggtacaaaatccattttgactgaccatgcctcacaacttgcttcctgacaaacctaaaactatctttataactatccagttatggagtagcttttgatagtcctaagtagacaattacatcttgagtcatgaaataactcaggtttgaggatcaacgtacatgttgaagaagaggactatg

SEQ ID NO: 16418 - DNA, 1764 bp, Arabidopsis thaliana landsberg
  unsure (1)..(1764): unsure at all n locations
tacctgatcccatagctcatcaactcttggaaatgggtacttatccttattggtctttttgttaagacctcggtagtcaataggtaacgggatacttccatctttcttcttaacaaacaatactggagctccccctggacgaataaatcccttttcaagtagatcctccaattgcttcttaagttctacaagctcggctggcgccatcctatatggtgcccttacaattgtaatcgcccgaggttcaagattaatgggaaacggatgattcctcggtggaggtaatccttccaagggcttgaacacatcttcaaattcgttcaccatcgggatctcttcaatctttgagtcattttcaacttctccaccaaaggcggttaaagtgacaaggtagacttctcctcctcttagcaagttctcgaccttcagtgctgacacgaacaaagcaatcttacttggattgattccacggtaagtgagttgtggtcgattcctccgttcgaacactactctgctccgcccgcaatcctaatgggcaagatatcctgataaccaatccattccaaggataacttcgaacctttccattggcattaccaaaaggtttgccggtaggatcgtatcctggataactactgggactcctaataacacaattcgggtctgcaggggtggctggtttcccgcggtatataccaaaactttcacttctcttttctcatacccgtggccaaacttatcggccacgtcagaactaacaaaactatttatcgctcccgaatcgaataatacatgtttggggttaccaccaacaagtaatgtccctaatgcatataaaaatgatatatgcaatatttaaactagtaaactacgcacacaacaatcaatcactcaaacatacataaacaaataaagtaagaacccatactaacctgttatgggaccttttgcgggtcctgaaggtttggtaggttctacatctaaggcataaacatttgctggagtggcttgcttctttaccggtggtcccttagctttctgaactggcggtgggtatgctgccttatttgcctattcgggcatgcgttagcataataccctaggtctccacaaatgaaacaagctccgactcagttaccctttagtcccccttgcttattcgggcatgcattcgacacatgtcccgactccccataagtataacaagtaacaaatgccagatttggcactttagtctgtacgaccgttgaacaatctcgtgcaaaatgtcccgactttccgcacatataacaggctcttggattgtaagtggtcattacccatcctccttggttacgaaccttaggctttacagggtcattattttggtttcgtcctcccgattgattagtcctcaaaacacaaggctaaaattctcgattattccccttcttgccttcggacttttcgttctcccgtaacttctctcccttttctaactcaatccattcttcaacattcacggccctttcggtcaattcactcacgttggtataagtcacagcctgaagacctccccaaattttaggccttacccctcttagaaaccttcgtaccatcattgcttcagcatcccttccgttgtacaaatatctccgaagtcttgtaaaaatttgctcatacgcccgcacactcttttgctcttgctcccnnctcataacaaagctctaacgatcacgtgcatttggtggaaaatacttagactcaaactcgttctaaacattt

SEQ ID NO: 16419 - DNA, 3269 bp, Arabidopsis thaliana landsberg
taaaaggttttattttctatcctcatatcttcctggaaggaagcgggatccgaccctataaaacatcggcgatccactgctagtgcagctcaatcatagggagcggtaccgcctgaaatccgatttgttatgacttaaaatgttgaggggaaacgtgaaaaatagctatttataggtatgtaacctgccatggtataccgatgaaggaaagcgaaggtgcaaatgctggagggaagacgtctttgtacaatggcccaacacggttatcatctacagtgacaattccattggtatcaagaaacggaaaatgatacttgtacctacgaaaagtaaaagagctttgttaaataaccacaccatgcatgatgtataagaaactaaacagaaactaaactaaagaaagaatgtatacccagtgcaatgcataataatatcaaccgaaatcgtcttcccgttctgataaacaacagagccatcctcatgaacactctcaatctgcatgacatttaagaaaacataaaattgtttctttacgtcgagtattacttaggagctaaagttaacccaccattgaatgcgtccatagattattataaccggtttgtttgataaacgtatcagctggatttgacctacaagccacatgaacctcttttgcaactctagcaatgtccctacttatatcctcagcacttgaagagttcccaataagcacaacaacctaatcgttgccagcacaatccaattatgcaaagaattatatgggacattatcatcaatgaaaacaagtaccttatctctgaatggttcgggaatacggtaattatggctatgcatttctttccctggccaagaacttagacctaaaagtttccaagattaaaacacagtcacacttctcatttattagtcttgactttcatgaaattccaataccaaattcctctcttttttttcaaaattttttttactcaatctttttaaccaaaatattaaattttatcatttgaaattattaataatatgcaacgaaaatgttttttttttaattgtttaatattcaacaaccttttggtaaataagataatttgacaattcaaatttcttttaatgtatacgaattttcaatttgaatcaaaaagaaatatctactaaaaacacaacaaaaaatatcaatatctcacaacatttttgagaatttattaaaaatactttttttaacataaatataaatattttaataatataaaaaatgtactactatatattaccaggaatttcagcgtgacgaggttcaacataatgtccattacaaacaacaacagcatcataaatctcatcacgacgaactttcttctctttctccgtcgattcaatcctccacttcccgattccttcctccgccgccggagaaaccttcacaacctccgtctcaaacctaaccatctcctcaatcccaaactccttagcgaaatctttcaaatacgccaaaacttcgccatgactcggaaacctcctcggatctctagacacaccggaacgaaccacgaacgggaaatctctgtatccggtacactctcgtgtaccgttgattcgtagagatctatagacgcttgaatgaacaacggatcgggtcgggtcaacacttaacggatccgattcgacttcatcggtgtaaatccaggttcctcccacttgtttttgtttctcgaaaacgaccactgagtgaccttctcgtcgaagctctcgtgccgctactagtccggcgggtccagcaccgataaccgccacgtggtgtgatctggttggtgataatgcaggtgccatttgtgtgttctttgattagaatctatgaatcacaatcacacacacttgttacaatttatgattacaatgtttttaataatcaatttggtgtgttagaaacttacacgaatctgttattacagacgtagattgccacgttttggttgatagagagaaatgcttttattatctaacttgtgtcattgtatttcttctccaccgagacagtgaaacatcaatcaatatgagcaatcatcaaactgtgagatttcttttctctcatttaccattttgcccttccactttcttgatgattgtttgttttttttgtggacagaagcaggtattgaagcaattggagccatggtgtgaacttaaagataaagtggttcttgtgacaggtgcttcatctggtatagggagagagatctgtcttgatctatgcaaagctggttgtaagattgtagcagcagctcgtcgtgttgatcgtctcaactctctctgttctgaaatcaacagctttggtgcaatcggagtccaagccgcagctcttgagctagacgtttcatcagacgcagacactattcgaaaagcggttaaagaagcttgggaaatctttggaacgatcgatgttttgattaacaatgctggaatcagaggcaatgtcaagtctagtttggatttatcagaagaagaatgggacaaagtctttagaaccaacttgaccggatcttggttaatatccaaatacgtctgccttttgatgcgtgacgctaagcgcgggggctcggtgattaacgtctcgtcaatctctgggcttcatcgcggtttgttgcgcggtggactagcgtatgcttgttccaaaggtggtgttgacaccatgacaaggatgatggctattgagttagcggtttataatatcagagtgaactcgatcgcaccggggattttcaggtcagagatcacacaagatcttatgcaaaaagagtggctcaagaccgttatcgagaggacagtcccattaaagatgcaacagacagtggatccggggcttacttctctcctacgctacctcgttcacgactcgtctaaatatatctccgggaatacatacattgtcaatgccggagcttcattggttggtctgcccattttttcatctctctaaaccttgaacttcaaactttatgtgttattgcaatgataagtgataacatttacacattctctacatatatttaaagcaaaaaattacattaacatgcttgtatttgaagaatttgaatcaaagctcatcatatttgagttccttgagttccactttaactggaaatctattgttgacccaagcaatgtaaccaccgtccatgtttcttacagtcttgaagccctatcacatgatcaaacaatcccattatatctcaccaataaactcatagatcaaataagaaaacaggtattct

SEQ ID NO: 16420 - DNA, 1354 bp, Arabidopsis thaliana landsberg
cccgacgttaacaacgtcctagtcatgtttccgttaccattacgtttttcgtttactctgctctaactcttcgttataagtatgtttcctcaacatatcaacgatctcagatttcgaatgagaattcaagaaatcgacctcgtcttcgtccatcttcacgtctttgaaatttgtgacggcgtcacggccacggaacctgtgaaccgcgacgtcgtaggcacgagcggcttcgtcttcttcgttgaatgtcccgagccacacgcgctggtgtttctcgtaaatctgagctccccatcttccgtttggttgtggcaccacacctttgtattttgacgacggaagcttcctagattcagcttctacgccgttctctgaatctaatacaacgcttgatccgcttcccatcctgtataagttacctaccgacgactttttcgccggagttatcgccggagtttcacagatggaacctgtacttgtagtactctcatttacgctactcgattccattaaatctgtgttcttttttttaatggtttgaaacaatgaagaaatcagaaatgtgtttgtgttgtgttgtgaattatgttgtgtatatgtatacgtgtgtgtgtataatatatatagaaagaaggagaaagagcttggggggagggaaataagaaacagcaagtgtcacttctgatattattattttatgtttcactttttatttggtaataacaaaaaatatatttgtaagaatgcgtgtttgaggggagtaattatagtatatgggcaggtgcatgggaagtaatatgggtgtgtatgggtcaactcaaagaacacaaaggaagcttcgtggaaacataatgaaatatacggcatttaatttaggttactatattagggtctatttcatgaactgttgatgtaacttatagaagaaaacacacgaagcaataataatccttataataagttagtattttgtttatgtaagaaaaagagaaaagagagtataggaacaaatatagaaatgaatatgttgtgggctgtgtgcatggggaagtgggacccatgtgtgggccatggaatggataaagggtccacgtgagatattgacatcattttagtgaagttcatcccccctgagttttgatgcttaaaattttaattcactataatactatagtaacgataataactatatgaaaaataataaaatagaaagtattagatttgataaccatgttcagatcctaccgatgtaaatggggtctctctttaaatttttttctcttcaaatctgattgtattttcactcttgatgatatattattgaaaagctataatagttggttagcatgaacta

SEQ ID NO: 16421 - DNA, 788 bp, Arabidopsis thaliana landsberg
  unsure (1)..(788): unsure at all n locations
gaacacaatgatgtttctgagtttctattatttttccttgctatatcagcagtgatcccaattgtttccctgatttgcagaggttttggattgtctactaataatgaaattttttatgcttgtaaaggagatgaccatagtataatgatatactaccctagctcagctggtggaggcatgaaagaattgtttcgtaaggtactgcttctttctgcagaacttgacttcctgtgaattgaacttggtctaatattattttaattttcttggtacattactgaagttggctcgttcactacctaatgtctttctgcagatattggttcttctcggattgaacattttagtttcaaatgattgtaataatttgtggcacatttctgtggttagcaatatttctttctgacccaatgtttttgttttaggttgggaatcgatcaagtgagtttcatcctgatgtcagaagagtaaggagagaaggttcttatatatatgaggagtttatgcctactgggggaactgatgtcaaggttgtgatttttgttgctgtctagataagcttattctgttttaatccatgaccaggctacttaacctttcttaaaacattgaatgtgnttttatgctcttgnttatccaggtctcataaattgagatagttgccgtgttaatgtccttatgcttgtttggtggcctgtttgttcctgcaatggatatttttccatgtcgtaaggctatctggaaatagttttttttttggattatgttttggctgaagctttggcttg

SEQ ID NO: 16422 - DNA, 1790 bp, Arabidopsis thaliana landsberg
aattaagtttcggaatgacattttgcggagaattcctttcatggagttaagttaacaaatcatttcctctcgaagcattcaagaacataacaaatttgttaacttgtgtaatttctaagctataagaccaccaacagtaatactatatgaacatgttgtctaaccatacgcgacaaagatgccgcacaagtgaaaagcttttgtagtttaaaagaaaattcatacacaaatccagttaatttccccacagttatgtccagaaagctaagaagcaaaattattccagtaaacacttgaaactgattacctcgaaataaaggagtgggagataggcagaaatttacctttcttaatgcgggttttggtaatgacctttttatacagaattccacaattttttcgagatatcaaattgtaattccactattctctcgactcaaggatgatgaaactgttttaagaaagcatatcgaggaagcttttgtccaatctcccatcatgtaacatattagcgaccaagccaatggttgaagcatctccagcaaacccgcaactcctcatttctttgatgaattcagctgatgctgctttgtcaccatctctaaggtgtgccctaatcagcgtattatagcacccgctatctggaagagtcccatcttctttcatttctctaaacacggcatctgcttcttcctttaaacctttcctacaaaatcctgagatcattgtacagtacattattacatcaggcttcactcctttaagcttgaggctacaaaatagatcccacccatcttccaccttcccagccttggacatcccttcaatcataatattatatgtgtaaatatcaggttccattttactcttttgcagatactcgaataccaccaatgctttctctagcttcccatttttacagagtccatctaacagaatgttgtatgtcatgatatcgggaggcacaccatcagaaaccatctgtttgaaaaccttttgggcattatcacagtcgccatcatgaaaaagcccttggataagagtggtgtaagtgactgtatcgccaaccaatcctctatgagacatctcgcggaagagttccgtaccatcttctactctcttagacttgcaaaatccctttatgagagtattatatgtaactaaatctgggaaacagtccttgctaaccatgaactcaaacatctgcttggccttgtctaaacgatcgtgcatacaaaacccattgatcaatgaactataagtgaaaatatcaggatctatagaccttttgatcatctcgtcgtacaatttctcagcctctacaagcttcccttccttcacaaatgcatcaatcaatgcgctgaaagtgaatacatcagggttgattttcttctcaagcatatcactgagtagtcgagaagcatcactccatcttccgtaattacaaaggcatcttatgagggagttgtaggtaacaacatctggtctaatacctttagtttccattttgttgaataggtcgaatgcatcatccatatgtttgtatgtgcaaagaccatcaatgattgtgttgtagatcacaacatcagcctctattttccctttctccatcttctttaacaaactcaaagccaaatcaatatcacctctcttacataatccgtttactacgggaccataagtaaatagatctggttgacaccctctggcaaccatccgatcaattaaagccactgcttcggaagccttgttgtgaagaaaaagcccatggattatagtggttaatgtga

SEQ ID NO: 16423 - DNA, 289 bp, Arabidopsis thaliana landsberg
gagaatgggtttataccttggtaaaattagcacttttttgttcgctcattccacattaacattggaacccaactcgatcaaattcttatcaccatcataaagctcaatgttttatacaagacaaaatcaacatagtttttcaccgctttatagccaccacttttcagccactattttgtagctaccgcttcgtagcgacaacattgttgccaccactttgtagcaactattttggaaccaccgctttcaaatccccaacatcgtagcaaaaccaccatatataggcttt

SEQ ID NO: 16424 - DNA, 1249 bp, Arabidopsis thaliana landsberg
gtgaaaaagtgaggagataaaggaaaaatcaattgcagggatggtgaagaagatgaagtgaaaaacaaaaaataaacgaaaaaaaaaaataactaaatgggaaagaggcggggttcgaacccgtgaactgatgattatcctacattattgttaccaccagaccaagacaacacgcacatacttttttgcaaattcattgtttataaatatgacaacacgtagggttaaaatttaacgctgttaaatgattccgttacgggcatcaacgcctgttaagtggtaggttcgaaactaccaaaatttaaaagacaatggttttaagagacaaaaaaaaataagtaaggtatttttattccaaatttaaaactataggtattaaacggccaaattaaaaataaatggagattttttcggctttttttcccgttttatatgcactatttattagttattattgatgaattttaaactttaagataaataattgaatattattggcttacaattctaaaaaaatgtaaatcacaaaagttactacatttataatcagtttaaatatttttttttaattatctgtgtgtttttatctagaaaatcaattaaaaatgaacaaaggagtatgtatctgttttttcgacaaacaagttttggtgtacaaaactattttcaagactaacaagttttggtgaattgggtttacatatttgtgtttaacaactccatcacatacatcaaattttgaacatcgtttagactttacttggtccaacacttacagttcatctactctgggcgcatagttaaagaatagataacggaaatgcctcactaacatctttggaacattaattagagaaatatctaacaaaagataagcatgagactacttaaaaagcctcactttttttttttctttcagaaatactgcaacgctcaattcccaattccccgaacatggtttggaccagagaatcacttctcaattccccgaacatggtttggacctctctcgtcttggttgatatattaaagaggaagttgtttagttacatatttggaacaatagttagaaacttagaacgtattattcaatcatcttaaacttaatgtgctatgtttgagaaaagatccaaaacaaagttttttgcccattattacatacttttaaagaaaataaaatactgtattttaccaaaaaaaaaaaagaagaatacggtgagagacagatacatgtattcatatactgtaa

SEQ ID NO: 16425 - DNA, 2181 bp, Arabidopsis thaliana landsberg
ccggtcgaaacagggattaatcggaaacaaggagatacaaaatatttagaaattttttatgaatatttaatactatatacattatataattctaaaaaccgaataatttcattaaaagttactgcaggcacggtggttaaaatggttttatgtagtgtcctgaccccggatcgagttttataaccacacttttacagtttttaacttaaatagaaaggataaaaatataatttacacacatgtcttcttcttccccattaaaaccctaatcggttctgtgttttttcttctcgagtttcttcagttctattcaccactttagcatgtaacgtagccaaactacgttagatctataactagtaggcctgggcaaaaaaatccgtaaccaaaaacccgaaccgaaaccgacccgaaaaaactggtttggggcgggtacgggtattagctatttaccctattgggtcttagattgtcgtatccgtgggtatagagtaatacccgacccgaacccgatactcgaaagggtatccgcttacccaaaattacatatacttattcatagatttatacatataaaattttattttatatttaatatttgaaccaaatacatttatatccaaatatccaataataattactaaaaactaaatgtacctatatttaaatacttaatactaaatattttatatatgcaaaatattcgtaaatgttttggatatttggacaaaatttcggttattcgggtaaaattcagatatttgggtaaaattttcgactatttgggtataatttcgggtatttgggtaaaattatcgactatttgggtacaaatttcgggtataattttgggtatctgggtcaaagttccgattatttgggtataaattctgggtatttgggtacaatttcgggtattcggtaaaatttcggatatctgggtataaaatacccgaacccgaaggacacccaattttttccgggtatttagcggttctgaaattctatacccgaacccaattgacccgaacataatccgaaccgaggttttctatttaccctattgggtcctaataactagtttaccgatttcgaacaaaaaatcaaatttttaggctgtttttatttttggccgatttctttgccgcgtagggtaaaatcgcggcggctaaccttcctttacggccttttcggcgcctagccggccgagtagaacgatttttagaacatctatatatgagtttttgacatcgttgacatcctaaaatctaatgagccatgtcccataattgacgtgtgagaaatacaaaatttccatcattctttaaagtttaatcaagatatgaacctccaatatttgatttgttttacctcttcgaagttataatatttacttcttgcgatcacagcatgttcatcaatagtaagtttaatcttacttgttcatatacactagcaggagccagtatggaacttgtgtcgttgggagtagaaaagctttgggacagactgagccaagaatatgaccaatttaaaggggtcgaagatcaagtaactgaactgaaaagtaatctaaacttgttgaagtcgtttttaaaagatgcagatgccacgaaacatacgaataagatggtgcgacactgtgtggaagagatcaaagaaattgtttatgacgcggaggatataattgaaacgtgtattcttaaggaaaacgttggaaaacaaagtggcgtcatgaggcgtatcaaaagatttgcttccacctttgtggatcgaagggaactggcgtccgatattagaggcataagtaagaggatctcaaaggtgattctagatatgaagagatttaaagtacaacagatgattgccgatggcagttcgtcttcacgtccactacaagagagagaaagggatatgcgacaagagtttgctagggattatgaatgcaattttgtggggttggaagcaaatgttaagaaattggttggatatttggtggaggaagatgacattcaaattgtttcagtaaccgggatgggtggtcttggtaaaaccaccgttgctagacaagtctttaaccacgaggatgtgaaacatcattttgatggactcgcatgggtgtgtgtttcacaagattttacccggaagaatgtgtggcaagctatctttaggaatctcaga

SEQ ID NO: 16426 - DNA, 1997 bp, Arabidopsis thaliana landsberg
cctcaacagggactaggttctttagaaccaaacctcgataaaacaaatcaccatgtttatccgctttatttcttgattgatttgtttttcccttctctcccggacttgatatttgttctaatgctaaccctggcttgcagtgtgtgcttaagtttataattttcaggttccgcctatccacccccctctaggagactttcaattggtatcagagcccagtgcttcatttagagtctaaccactcgaagtgatgccgggaggatccgctaagagggacatagaaaccggcgagaaggccacaagccacgggaaggctccatcaagggagtccggcgccaaaggcaaggaggaatcccctccccacgtcaagtcacatcggagtggcgacaagaagaaaaagatgaagaaagtggtctactacgagaccgactcttcgtcgccctccacatccgactccgatgcgacgtccgtacttctaagcgccatgagcacaagaagtatagtaagatccacttcgttatccctgtatttcaaaacgcgctcctttactttccgttcccttaggcaaaccaccatactttgatggtgaggattattgtatgtggagtgataaaatgaggcatcacctaaccccactccacgcaagcatttgggacattgttgagtttggagcgcaggtaccgaatgtgggagacgaaggctacgacttggacgaggtcacccaaattaggcactttaactcccaagccacaactatactcctcgcctccttgtgtcgagaggagtataataaggtacaagggttaaagagtgccaaagagatttgggacgttctcaagacggcacacgaaggggacgaggtgaccaagatcaccaagcgcgaaacgatcgagggagaactcggtcgattcgtcctcaacaagggagaggagcacaagcaatgtacaaccgacttcaagtccttggtcaaccaagtgcgcaacctcggggagcaaaatgtaggatgaccacgagatcgttaaggttattcttagatcacttattttccttaaccctactcaagttcaattaattcgtggtaatcttagatatcacataatgactcccgaggaagtaatcgggaattttgtgtgctttaagtatatgatcaagggctcaaagaaaaatcaacgagctagatgatccctccacatccgaagcacaaccggttgcattcaaggcaacggaggagaagaaggaggagtctacaccaagtagacaaccaatcaacgcctcaaagctcgataatgaggaaatggcgcttgtcatcaagagtttccgccaaatcctcaagcaaaggagggggaaagactacaagccccactccaagaaagtttgctacaaatgtggtaagcccggtcattatattgcaaaatgtcctctatctagtgacagtgacaggggcgacgacaaaaaggggagaagaaaggagaagaagaggtactacaagaagaagggcggtgatgcccatgtttgtcgcgagtgggactccgacgaaagctctagtgactcctccaacgacgaggacgccgtcaacatcgccgtcaccaatggacttctcttccccaacgtcggccacaagtgcctcatggcaaaggacggcaaaaagaagaaggttaaatctaactcctccactaaatatgagtcttctagtgatgataatgctagtggtgaggaagataatttgcgtactctttttgccaacttaaacatggaacaaaaggagaaattaaatgaattgattagtgctatccatgagaaggatgatctcttggactcccaagaggacttccttattaaagaaaacaagaaacatgttaaagttaaaaatgcttacgctctagaagtagaaaaatgtgaaaaactatctagtgagctaagcacttgccatgagactatagacaaccttagaaatgaaaatgctaattttttagctaagcttgattataatgcttgcc

SEQ ID NO: 16427 - DNA, 2041 bp, Arabidopsis thaliana landsberg
ctaactcgtaattgaaaagtccaacttgtgaatattattagtttttttttttttaatcaatatttatgagctcatagagacatatttcattggttgtaatttacttatcttttggcctatttttagtgaaaaaaatgactagttgattttttaaacgtctgaaacttgtattagtggttaattgaaaataaaagaaaagaaatgtaaattctattactctattggttatctaaatgtaaatgagtcattctccggaattttgttttatgtttttttctctcgactcttgttggatcatttagttctcactgcaagtcttaatcttgtggatagaagaatcttacaaaattcttgtgaaatttagattccaaagaatatactacgaaaaaagatttagtcttcttcctattttttgtttggtcaggattacttaaagtcgtagctccatgtgagtttataaatatcatcttattctttctctttctcaacatatgtcggtacgtctttttcttttcacgcatgtcggcacatcaaaatgttatagtgctactcttagattgttacattcatatcaacatcagaatacccaacaatactacatacatatatccaactagtcaaatactctataaaaaactaactaaacaattcaacagacaggataaaaagaaatttggtagtctattgagcattttggcttacaagtaaaagatcttgaaacatatcaacgtaaactaataatgcatatttttaccaaaacaaaaaaactaataatggatatatactattaacattttggcttttggccagttaacaaaaagaaaaagaaaaaaaaaagtttagaaatattaaaattatgacgttaggacaaaagaagaaaatatcaaatttatagaaaacaaccactacataaatagtaggtcggccatgggtcggacaaaatagattacttaacaattaacgagcagcaaattagctttgggtatagtaacaaccaatcaatgttccctcagcttcttcttcgtgggctccatttaggccacgtggcattatcacagccttgtattgacttcaacggagatccttcaaccaatcacgagatttcgttagcgctggtagggccctctctcgctaaacacatggggtagtatctaaagtggacctgtcacactgcatcgccatgtcatcatttcgggcatcttcaacttaatacgaacttacgaagctttccccggtggataattaaccgttttattaattagccataatcacggcctcaaagcctatataagttgtttctcaccaacaatcaaatcacttatcaacaactcaaaactgatcatcacaaagaaaagagttttctctgataatctttctcggacaagatggcacctgagatgaacaacaagttgagctacggagaaaagaagagagcgtacgttacgttcctcgccggaaccggagactacgtgaaaggagtggttggtctggctaaagggctaaggaaaactaaaagcaagtacccattagtggttgctgtgttacctgacgtgccggccgatcaccggagacagctattggaccaaggctgcgtcatcaaggagattcagccggtttacccaccggataaccaaactcagtttgctatggcttactacgtcctcaactactctaaacttcgtatttggaaggtatttatatacatgatagtatctaggtttaaaagacttgagaatctgaatttaagttttcttgatgaaacaataactatttggatgcagtttgtagagtacagcaagctgatatacttagacggagacatacaagtgtttgagaacatagatcacttgtttgatcttcctgacggcaacttctacgccgttaaagactgtttctgcgagaagacttggagccacacgcctcagtacaagattggctactgccaacagtgtccggacaaggtgacgtggcctgagtcagagcttggtcctaagccaccgttgtacttcaacgccggcatgttcgtctacgagccaagcct

SEQ ID NO: 16428 - DNA, 2632 bp, Arabidopsis thaliana landsberg
  unsure (1)..(2632): unsure at all n locations
cagatgaaaggtcttgatttattctttcatagctgtatagttcaaggtctgcctcgccacttccgggttggtttgcatcttctgcaatgttttctgaccacaaagacatgaacttctcctttaatcgcttcgatcttgaccgttctgcccaaacttgtttcactgaagctcttatcttctccttggtttcattactgcaagagacaaacttagcttagatatggctctagcttcattgttctctattctacactcaatactttacaaatctacctgtgtggttgttgatgatcggacatcttcttccgaacctgcaagatattgaagagaagaaaaagttctttgccaaataagttttcttccttcacttctcactgtaaacaatataatatgggacaacaacaaaatgtccctgaatttgcattgaatcttacttgacttcaccttgggatttgtcaaagcttcgattgttctctgcttgattcgtcttcgagtgtctgttaaagagtatcaacaatctcactacacaaagcctcaaagaagaaacaatgcagaaaatcgaagaaaagatccttctaccttcactgtgtttcctccctttgttccatggcacctttcctctattagctaatccaatcttccttctcctttcctcttctttaatcttcctatcactatcactatcagcttcagtatctttgttcatagctttcacttccaaaagacttgaattgacttctttcctatgaatctcaaacacattgtacaatgaacctacagatttcaactccaagtgtctgatagacctcaaagaagcaagtgaattaggtattttcaaaacgattggttctttgagagtccaatagattgaatttgggaaccaccaagcgcattggaatggagcacgagttgattgaaatgtgcatttcatctccattgataaacctctgcaaaaacagtatttgaccaaatcgaaatcaaaataggtcaaataaaatcaaacaaccagtacctgaacgataaatcaatgaatttctacataattttcatcaaattagaaatagatttttataaatccttgatttcagagatgatttcaaatcacaagagataagagtttgagaatgcagaagcactcacaaatttagtgacatacacggcacggagacgaacaggagacaagagaaaactctgaaaagtttccttttatggtttctcaaacgcgaaagccattgaagaagaagaagaagagtgcgcagacacgaagagagagagagagagagagagagagagagagagcgggagaaacagataaggaagatgaagaacactaatgggccgtgaatgggcctaatctttattaataccttaaattacaatttaccctatttcaaagtaaagtacacctttgttttagaggttctctctctttactactatatactcgaaagtgtacccaaatgagtattatcttcatgtacatattaatttatttagtacggttttgatttatcattgaaatatgagagctgaagagacccaaaaaaatcggaataaatttgaacaccacaatgtgtaaagattttttccctaaaatcaaaaacaaattagacgaaaaatcttaaaaattaaattacgaaaaagacctgaaaggattaaagtaaagagggtggtggtatatctcatcgagtgtctcgcccagcttcttcagtcttcaccacataatattaataaaaagcattttcttctttcgattgcttcagattcgtcagctcactctttcctctccagaagaaaccctagacatctcatcgccaaaatgttcagatctatgctcgtccgatcttctgcctccgcgaagcaggcggctatccgccgtagcttctcctccggttccgtccccgnnnnnnnnnnnnnnnnnnnnnnnnnnnccggtggaattggtcagcctcttgctctcctcatgaagcttaatcctcttgtctcttctctctccctctacgatatcgctaacactcccggagttgctgctgatgtcggtcacatcaacaccagatctgaggtattactaacaaaattccctttttgatttgaattgcttcctcgttcagattttgaatagagatgtatcattttggcttattagacttgtgacttgttcactatactgattcatgtgctatgtacttgtgtttgataggttgttggatacatgggcgatgataacttggccaaagctctagaaggagctgatctcgttatcattccagctggtgtaccaaggaagcctggtatgacccgtgacgatcttttcaacattaatgctggaattgtcaagaacctttgcactgccatcgccaagtactgcccacatgtaagcatacgatctaatgcatatcagagttgatgtttcttttggaatcatatttcgcattgctatctccaagaattactggtttttaggcctcagttttcttatagatgacatgtcttgagcgtgaatttgctctcgcttctccaagattgttgatttttaggtgtaaaaatgtctccttttgatcaaaaaaatttggttttctatcaaaggattgacctttgaagttactcttttgctgaatcaggcgcttattaa

SEQ ID NO: 16429 - DNA, 6776 bp, Arabidopsis thaliana landsberg
atcaaactactgtggagttcaaaagtttgtcttctgaagttttttataaacgtcacaaaacagtcgctctttgcatcggatttgcagggaaaaaagaaaacagtcggacttcacaaccaattacctacgtattaccaactctcgaattttgcgtttcaaaattttaaagtgtattctgtttatatgttttcttagacgttgatactttaatttgatcgatattagatataaaaacataaccaacacttcaattctgaaatttacaaactaaacgttaaaaaaaaactaatttatataataagatctatgttcattaaattcattgtcatgattgatatttttaaacaagttctagaataagttacgaaaccgatgatttatatacataaagttctgtatgtactctacatcactaaaattggtgcttttcagtcatttttatcaaaagattggatcaaactatgtggatttcaaaagtttgtcttctgaagttttccaaaacgtcagaaaacagtcgctctttgaaccttatttgggacgaaaaaaaaaaacagtcgcactttgcaaccaattacctacgaattaccaactctcgatttttgcatttcgaaaattttaaagtttggtctgtttatattttttcttagacgttgatactttaatttgatcgatactagatataaaaacataaccaaacatatcaattcggaaatttacaaactaaacattcaaaaaaacctaatctatataataagttccatgttctttcattgtcatgattgatatttttaaacaagttctaaaataagttacgaaaccgatgatttatatacctaaagttctgtatgtactctatataactaaaatgggtgcttttcagtaatttttatcaatagattggatcaaactatgtgtatttcaaaagtttgtcttctgaagttttccaaaacgtcacaaaccagtcgctctttgcaacttatttgcgacgaaaaaaaaaaacagtcgcactttgcaaccaattacctacgtattaccaactctcgatttttgcatttagaaattttaaagtttggtgtgcttatatgttttcttagacgttgatactttaatttgattgatattagatataaaaacataacgaaacacttcaattcggaaatttacaaactaaacattcaaaaaaaccaaatctatatcataagttccatgttctttcattgtcatggttgatatttttaaacaagttctaaaataagttacgaaaccgatgatttatatacataaagttctatatgtactctatatcactataatgggtggttttcaataagttttatcaatagattggatcaaactatgtgtatttcaaaagtttgtcttctgaagttttccaaaacgtcacaaaacagtcgctctttgcatctgatttgcgaggaaaaaaaaaacagttggactttgcaaccaattacctacgtattaccaactgtcgattttcccattttgaaattttaaagttttggtctgtttatatattttcttatacgttgatactttaatttgatcgatattagatataaaaacataaccaaacaattcaaatatgaactttacaaactaaacattcacaaaaacctaatatatatgataagttctatgttctttcattgtcatgattgatattttcaaacaagttctaaaataagttatgaaaccaatcatttctatgtctaaagttctgtatgtactgtatatcactaaaatgggtgctttcagtaatttttagaactagatcggatcaaactatgtggatttaaaaagtttgtcttgtgacgttttgtaaatgtcacaaaatagtcgctctttgcaacttatttgcgacgaaaatagaaaacagtcgcactttacaaccaattacctacgtattaccaacaatcgatttttgcatttcgaaattttaaaattttggtctatttatatgttttcttatacgttgatactttaatttgatagatattagatataaaaatataaccaacactccatttctgaaatttacaaactacatattcaaaataacctaatctatatcataagttccatgttctttcattgtcatgattaaaatttttaaacaagatctaaaataagttacgaaaccgatgatttatatacctaaagttctgtatgtactctatatctctaaaatggatgcttttcactaatttttatcaataaattggatcaaactatttgaatttcaaaagtttgtcttctgaagttttccaaaacttaacataacagtcgctctttgcaacttatttgcgacgaaaacaaaaacagtcgcactttgcaaccaattacctacgtattaccaactctcgatttttgcgttgcgattttttaaagtttggtctgtttatagtttttcttagacgttgatactttaatttgatcgatattagatataaagacatatccaacactccaattctgaaattgtctaactaaatattcaaaaaaacctaatctatatcataagttccatgttctttcattgtcatgattaaaatttttaaacaagatctaaaataagttacgaaaccgatgatttatatacttaaagttctgtatgaactctatatctgtaaaatgaatgcttttcagtaatttttatcaatagattggatcaaactatttgaatttcaaaagtttgtcttctgaagttttccaaaacttaacataacagtcgctctttgcaacttatatgcgacgaagacaaaaacagtcgcactttgccaccaattacctacgtattaccaactctcgatttttgcattttgaaattttaaagtttggtgtgcttatatgttttattagacgatgatactttaatctgattgatattagatataaaaacataacgaaacactgtaattcggaaatttaaaaactaaacattaaaaaaaacctaatctatataataagttccatgttctttcattggcatgattgatatttttaaacaagttctaaaataagtttcgaaaccgatgatttatatacctaaagttctatatgtactctatatcactaaaatgggtgtttttcagtaatttttatcaatagattggatcaaactatgtggatttcaaaagtttgtgttctgaagttttacaaaacgtcacaaaccagtcgctctttgcaacttatttgtgacgacaaaagaaaacagtcgcactttgcaaccaattacctacgtcgtaccaactctcgatttttgcgtttcgaaattgtaaagtttggtctgtttatatgttttctttgaaaatgatactttaatttgatagatattagatataaaaacataaccaaacacttcaattcggaaatttacaaactaaacattcaaaaaaaaactaatctatataataagttccatgttctttcattgtcatgattgatatttttaaacaagttctaaaataagttacgaaaccgatgatttatatacctaaagttctgtatgtactctatatcactaaagtgggtgcttttcagtaatttttatcaatagattggatcaaactatgtggagttcaaaagtttgtcttctgaagttttccaaaaagtcacaaaagagtcgctctttgcaacttatttgcgatgaaaaaagaatacaatcgcactttgcaaccaattacctacgtattactaactctcgatttttgcgtttcaaaattttaaagtttggtatgtatatatgttttcttagacattgatactttaatttgatagatattagatataaaaacataaccaaacacttcaattcggaaatttacaaactaaacattcaaaaaaaaactaatctatataataagttccttgttctttcattgtcatgattgatatttttaaacaagttctaaaataagttacgaaaccgatgatttatatacctaaagttctgtatgtactctatataactaaaatgagtgctttcagtaatttttatcaatagattggatcaaactatgtggatttcaaaagtttctgttccgaagttttccaaaacgtcacaaaccagtcgctctttgcaacttatttgcgacgacaaaagaaaacagtcgcactttgcaaccaattacctacgtcgtaccaactctcgatttttgcgttttgaaattttaaagtttggtgtgtatatatgttttcttagatattgatactttaatttggtcgatattagatataaaatcataaccaaacacttcaattcggaaatttacaaactaaaaattcaaaaaaaaactaatctatataataagttccatgttctttcattgtcatgattgatattcttaaacaagttctaaaataagttacgaaaccgatgatttatatacgtaaagttctgtatgtactctatctcactaaaatgggtgcttttcagtaatttttatcaatagattggatcaaactatgtggattttaaaagtgtattttccaaaacgtcacataccagtcgctctttgcaacttatttgcgacgacaaaagaaaatagtcgcactttgcaatcaattacctacgtattaccaactctcgatttttgcatttcgaaattttaaagtttggtgtgtttatatgttttcttagacgtggatactttaatttgatcgatattagatataaaaacataaccaaaaacttcaaatgcgaaaatttacaaactaaacattcaaaaaaaactaatctatataataagttcaatgttctttcattgtcatgattgatatttttaaacaagttctaaaataagttacaaaaccgatgatttatatacctaaagttctgtatgtactttatatcactaaaataggtgtttttcagtaatttttatcaatagattggatcaaactatgtggatttcaaaagtttgtcttctgaagttttccaaacagtcacaaaacagtcgctctttgcaacttatttgcgacgaaaaaagaaaacagtcgcactttgcaaccaattacctacgtcgtaccaactctcgatttttacgttttgaaattttaaagtttggtatgtttatatttttttcttagacattgatactttattttgatcgatattagatataaaaacataaccaaacacttcaattcggaaatttacaaactaaacattcaaaaaaaatctaatctatataataagttccatgttctttcattgtcatgattgatatgtttaaacaagttctaaaataagttacgaaaccgatgatttatatacctaaagttctgtatgtactctatatcacttaagtgggtgcttttcagtaatttttatcaatagattggatcaaactatgtggatttcaaaagtttgtcttctgaagttttccaaaaagtcacaaaaaagtcgctctttgcaacttatttgcgacgaaaaaagaaaacagtagcactttgcaaccaattacctacatattattaactctcgatttttgcgtttcgaaattttaaagtttggtctgtttatatgttttcttagacattgatactttaatttgatagatattagatataaaaacataaccaaacaattcaatacggaaatttacaaactaaacattcaaaaaaaaactaatctatataataagttccatgttctttcattgtcatgattgatatttttaaacaagttctaaaataagttatgaaaccgatgatttatatacctaaagttctatatgtactctatatcactaaaatgggtgtttttcagtaatttttatcaatagattggatcaaactatgtggatttcaaaagtttgtgttttaagtttttccaaaaacgtcacataccagtcggctccttgcaacttatttgcgacgacaaaagaaaactgtcgcactttgcaaccaattacctacgttgtaccaactctcgatttttgcgtttcgaaattttaaagtttggtgtgtttatattatttcttacatattgatactttaatttgatcgatattagatatgaaaacataaccaaacacttcaattcggaaatttacaaactaaacattcaaaaaaacctaatctatataataagttccatgttgtgtcattgtcatgattgatatttttaaacaagttctaaaataagttacgaaactgatgatttatatacctaaaattctgtatgtactctatatcactaaagtgggtgcttttcagtaatttttatcaatatattggatcaaactatgtggatttcaaacgtttgtcttctaaagttttccaaaaagtcacaaaacagtcgctcccttgcaacttatttgcgacgaaaaaagaaaacaatcgcactttgcaaccaattacctacgtattactaactctcgatttttgcgtttcaaaattttaaagtttggtatgtttatatgttttcttagacattgatactttaatgtgatacatattagatatacaaccataacctcacccttcatttcggaaatttacaaactaaacattcaagcaaacctaatctatataataagttccatgttctttcattgtcattattgatatttttaaacaagttcaaaaataagttacgaaaccgatgatttatatacctaaagttctgtatgtactctatatcactaaaataggtgcttttcagtaatttttatcaatagattggatcaaactatatggattttaaaagtgtattttccaaaacttcacataccagtcgctgtttgcaacttatt

SEQ ID NO: 16430 - DNA, 1955 bp, Arabidopsis thaliana landsberg
  unsure (1)..(1955): unsure at all n locations
aattaatcgttttagaggaacggaggaaagaacatgtgaaaacaactatgagaagaaaactcagtactatcgatgatactaccatcaccaagcttgaacatcttaacagcttcatcattcattccatcattacaatattctccatcattatcatcgaagtagatataattcttcaaaagtccatggtactcggaactctcatcatcatgcttgataaattgatcagcttctgcgccactctgatacgttcatgagaagttggcacgtgtgagaactgaagtgagagattggagtcacgtgtgaagaagattataaatagtaagagagagtagagagaaaagcatcctgcgtgatcattgatgtgtaaagaggattagagctttatgtgctctgttcttgggagataagattggagaactgtaactccaagcttatcgatttagggtttgtttcattgtaattgggattttaaggataagaaagagaaattcatagtttcattcttatcacactctttcgcacattatcaacgaagtagatagaattgttcaaacatccatggtactcggaggctacaacagtaaaacaactgtccctagccacaatgagtgccttgtctcccaaggacctaacctcaacccattttgccacatactcgtccatcttataaaccttaaaaccaactgtcctttgactccttcggatataagctttctttaagcgaagttgatgaataatgcatagatctccacaatactcaacgagtctcttgttgcaactatcatatccgtcgtagtccattggaattgaaggtgtgaattgaaggaggctgagcggtgataaactaatccaccaaattgcgccggttaggtctaaggcatagacttgtcctttatgaagtataatgtccaagaaatcttcaacttggtttttgatttttgtccatattctactactctcttctccactcttgcagcaccagattttgtcatcctgtccgactgcgaaaatcagattgtctaggaaaacaactctagacaatatatgtgatggtccttctttacctatcacgccttgtattaaatacttatcaaatatatgaatctcgtaagattggcgaatctctgaaacctcaaatttcaaaaggtctagggtttgttgggaaggggttaggagctggcgaaagaaaggagacaagagattaatcttactggattcacagacttgtttggttctgatcagccatcctttgtaaaaacatgaagaagggcccgttacacagaagaaagtggtgggagagagaacagtctctattattttgttggaggaaggaaggttgcattgaaagctttttggcggcccagccgccgaacgccagggtttacagatgcctcctacacggaggacgtcactaatggaggagaaacggtttgcggttaaannnnnnnnnnnnnnnnnnnnnnnnnnnnnnnnnnnnnnnnccatctttgaatcaatcgacgatgtgagagcgtgatcaacatcggctcgccctctctgttataactccatatatatacacaacaaaacttaaaccctagatacttgaggacttacgtgggctggactataatccatccaattcctagttggattttcgattagctattatcacgtgagtaatatctgcattacatgtattgacttagtattattgttggagcaatgttttttttttgttaaaaattattattggagcaatgttttgtttttgttaaaaattatttgagcaaaccaaaaaatcgcagaatgaattataaaacagttcgtatttcgatgaaatttcgtctctccctctcaatagctttggtgcaaattaatacccttactacatacatgtcaacttaactctaattctaacaaatagaacagaaaatctggagagagaaaaaaaacgtaactagatgaaagaaaaa

SEQ ID NO: 16431 - DNA, 425 bp, Arabidopsis thaliana landsberg
ctggaaatgaatgatgctgtatagttctccttttgtgcttgagagcatgagttccgacaaggctttttttcgttctaatgcgagtttctgccattgtgggcatggtctttatagagtttaaactctgatgcggatgaacaggcaaacatggctgctcgtctttctggttagacatcctagtctctgttttctctgtatttgacattgtgagtatcaaattttacagaaagctaaccaaatctatgatgcattatttacagaaggagaagttgaagtggcttaaaggatattatcggtgaactagatttggtctttttttttgttgtccaggctacatccaaatttgaatagctttatctaacagtgtgaggcggtgtctttaaagacaacaaccactatgcaaatactgctcttggtggttttta

SEQ ID NO: 16432 - DNA, 1741 bp, Arabidopsis thaliana landsberg
cgagttgatgggtcagtcagttctatctcctctatttttttttattatgctatcaaaagcttattggtgtgggggttcaggttgtacaaagttttgaacgttcttgagttcaacagcacgaggaaaagaatgtcagttatagtgcaggaagaagatggaaaactcttattactttgtaaaggagcagataagtaagtgacctttgactttagaaaaccatttcatatagattttgaacttatttgtttgatttgtttcgttttctagtgttatgtttgaaagactatccaagaatggtagagagtttgaagaggaaacacgggaccatgtaaacgagtatgctgatgcagggctgagaactttgatacttgcttatcgtgaacttgatgagaaagaatacaaagtattcaatgaaagaatcagtgaagccaagagttcggttagtgctgatcgagaatcgctgatagaggaagtcaccgagaaaattgaaaaagacttgattcttcttggagctactgctgttgaggataaactccaaaatggagtaagcaaacactgatgatagtcatataatcaatttatagttggtggattgaaatgtcttatcttctctctttatccttgattcctttcaggtccctgattgcattgacaagcttgctcaagcaggaataaagatttgggttttgactggtgacaagatggagactgctatcaatattgggtatcattttctgggtatcaccttaatattgtctactcttgagttcctgcatacagttttcttctacattctttccactctttgaaccctttgtgtgtttgtctttcacaggtttgcttgtagtttgctcagacaagacatgaagcagatcataatcaacttggagacccctgaaattcagtcactagagaaaaccggagaaaaagatgtcattgcaaaggtaaaaaagataccaaagaattaatattttgtggagtagtattagcagaagattatattagatgaatgtatcaatgtggctagttgttatcttgcaggcatcaaaagaaaatgtcttgtcgcagataattaatggaaagactcagttaaagtattctggagggaatgcttttgctttaatcattgatggaaaatcacttgcttacgcgttggatgatgatataaagcacatctttctagagctggctgttagttgtgcgtctgtcatttgttgccgttcatcaccaaaacaaaaagctctggttagttttaaacttattcttgaatcttgagtatacttttgctgctgtcaagattttcacaataagtaaatcgctatgtaggtgacaagactagtaaaatctggaaacggtaaaacgactttagcaattggtgatggtgcaaatgatgttggaatgcttcaggaagcagatataggtgttggtattagcggtgtggaaggaatgcaggttcagtttagatttatttaactatcatttgttgattttcattgtgtgtttgttttttttggtatgggcttaatcctgatcattgttcacaggctgtaatgtccagcgacattgcgattgctcagtttagatatttggaacgtttgttgctagtccatggacactggtgttacagacggatctcgacaatggtaaatttatttatacatcctcagactaagaccaaccttctgtggcatgagtaatgacataatcagttttctctatctgacagatttgctacttcttc

SEQ ID NO: 16433 - DNA, 2135 bp, Arabidopsis thaliana landsberg
tcagtgacttttttattcttattaatattggctgcttttgtatcccatttacaacgtattggcttcaggtatgtttctagttatatatatgttgttatattctaagtacgtttcatcatttgaaagcaagaacattgatatgtaattatgtatgtctgtataaatataaatcatgcatatatatatgattatatatggttttcatgtggtgacttggtggacatgcagagatcaaacctacagggagaattgatgatcaatgcaagcagatgtgttcggcaacgtacggggacggtaaatgtgcctcggactgtaggaaggctggtttctcatccggacgttgtctaacttcttctcctttcggaaataaatgttgttgcaccaagtgatacaaaccgatctatatgagttttctcttgttggattgccacaaaaaaaatcataaattaaaaattccttaacaaaaaaaaaaatcataaataaaataattttattattatattttttccttataatcaaaatcaaaagtacgagttactggcacgatgcaccagttgattagcatactcttattactctttaattagtcaactattacatacgacaagtttttgatttcaatattatgaagtgatgatattattgacacaacgcctatctgatcgactttagatcttttggactgggcctagctgatcgactttagatctttaggactgggcctattcagttcggttagttttgtttcatttcgattttagtgatcagggttcctcggttcctcctagtagaccagaagaattatatcgtatgttggttacttagtttctagccttggacattcggttatctatttggtttcggttcgtatccattcagttatcgattctttcggtattaatgtatagtatccattcagttattttaaaaattttgtttggtttcggctctggttttaaaatttaatatccattcggttattttgaaatttcggttcggtttcggttatttttgatattttcaaatatttttgggttattttcgagtgcttttacgattatatatatatatatatatatatttaagtacttttaattatttagtctaaaaataactaatatttttaaaaatatctttaagataattttggttatctaaaatattttagtttgtatccattcggttttggttctttcggttatagaatttaattttcattcggttattttcaaattttggttcggttggatttggtttttttcatcggtttcggttcggtacattcggttcggtttatttgcctaggcctattgatttctaactccaactctacatagccaattgtgaccaaactcaatccaacttttactttccgagcataacgatgtattgatcacatcatctcagtttcagttcatcgactcaaaatgaaaccaaaataagactaactatttgaagaattctaaaagaaaacaacaaagaacacaaacactttgtattgatttttatgtaaaactaaccaacaaacaaagaacgtatctctaccagaaccaaagatctttgccttaaaggttcagcataaatcttgacacagagagactctaatagtagtagtagtattagatatatgattccaaatttgagattattactagtgtattgttgatttagctgcatattggacaacgaacaagaccattctcattacactccttacacttcaccaccactgcatcattcccccatccttccaccactttacagcttccattacaacccgaacacggcaaaaacgctaatccgccgcaaccaccgcaaccgccgccacaccgatctttcttcctcggaatctctttaagcaattcaccaagcaatccttcttccaccaatctcatcacttcctctgctccaccaatgtacttccccttcacaaaaacccgaggcggcaacaccgccgccgtcgattctaccgccattagattggataactcttctctaaatcctctatccattgacacatctctctcacaaaccactacaccaaaactctcaatcgcagctctcacggcgttacacgcctcaaacgtccgtcgaacaccgcgcaacgacgtcgtataaatcacaacgcgattctc

SEQ ID NO: 16434 - DNA, 3622 bp, Arabidopsis thaliana landsberg
aatccgagcagccttttttatgtttaacttcctacagacgatttttactttattatgactttctttgatgattagcaggttcgccggaggcaaggttgacaccgcttgagcaaattacatctgatgatacgaaacggtggggtttggtgacatcacaattcacaactgctacaccattatcctttctaataaattgacattactgattttgcagtgggatagatatcactgagactctgcgaattcagatggaacatcagaagaaactgcatgagcagcttgaggtacaacgatgaacatataatgagtcttagctttgtggtgttatctgtttatattccttgaagttgcatacagtagggattgaaaagggggcttgttttgatgtgcttgcagagtctaagaacaatgcaacttcggatagaagagcaaggaaaggcgctgttgatgatgattgagaagcaaaatatgggtttcggcggaccagaacaaggagagaaaacaagtgcgaaaacgcctgaaaatggttcagaggagtcggaatccccgcggccaaagcgtccgagaaatgaagaatgaaggaaacctttcttcggatggtagatcataaaactgtggttttggtggagttgtagagtatgacttattaggagtagagctttcagtcttcttcaggccttttctcttttttttttctttcttaaaactctaattttctgattctcagctctctaggaagaaacaaataaagagcaattccatctttgtgatgtaattctgagtgcagagattttagatttagtgtttaggtggattttaaactagcttttatttcgagtttcttcctgtatactgcgttaatttcataattgcatgtatggaatcaactcatgtaagttagattaatcttcgaaatataaagaaagctgggcctatctttcaaatcataattgtcccacatcgctaagctcgtgaagcattagtcagaaccaacctgtatataaagaaagctgggcctatctttcaaatcatacctttctcggccttttggctaagatcaagtgtagtatctgttcttatcagtttaatatctgatatgtgggccatcggcccacacgatattaactctatttttaaagggaggaagcccattaaggtagcttgctacctgggtttccgcgagtcgcccatgcgttgcactactgcacgggcttggctcaacccgccaatcgaatagtaaaatgatttactttactttataatttccgaattattgatataattaactctaaaccttaagcgtagttaataaaaactttttgacggagctaaacgctaattaacctacgtcttctcgacagaggacaaactcaaattcgtaggtgagaaaaattcgattttggaattgttcatattctaggtttgagcttaattggatatatccttggtgattggttcatttggatccgattaggtttaagtataggttttgatatttggattctggaagaaaaagagtgatgagtcgtggggattacaagaacccgtgcttgaccatgcatcagccatgggcatcacttctcgtccatggtatcaaacgcatcgaaagcagatcctggccttccccaattcgaggtaaaaaaaccctaattttgaactcagggattcgactgagatttaatttgaatttgaaacattgtgataattgcataactttgaagaagaagatgatgttgtttttaaacatgtaaataggccgtttatggattcatgctgcaagtaaagtacctgatgaagctactatcaaagcaatggaagagttttaccaacaaatttatgctgttgatgggatcactgatattcaattcccccaacattaccctgtttcaagactaattggtatcgttgtttactaatctccatatttgaaagtctaagttccatgttatagtataagtaagacctgattttgcttggaacatatttgaatacggtttcgttggtataggatgtgttgaggttgttggatgtgtcacctccgatgagcttcagaactgggatgctttacctcaaggggtacaacaattttccttattactgtgttctattctttgacattgaaaacagctcgttatcgatgattctttagtataataagcaaaaacctcaactgttgtcacgtatgtaatagtgaggcttgaagacaaactaacttttgttggctatgtgagaagccacagttgaaagtcacttcatcttgtggctgatactgcattgtatagattgacttatttgacatttgattctgtgaactcttccagaaactgattattccatttgagatgcgtgggtaccagggcgtctataacttagagaataaggtaatcttgctgttcttcaaagcctagggattggtgggttcttgttgtagtataaattagtaccagttacttactgtatttctaaatgaaacagatttatgtagcagcagctagaggtcttatgccttctcaaaactcttttaaggtgaaattccctcttcctgacccaaaagacccgttttccttaaaacctggttctattccttgtacaatgcaagagaagaaagaacttgattcaaagcaagttaccagcctcacagctgcaatcaagcaagttaccagcctcacagctgcaatcgccggtgcaaaagcagcggcgacacaattttctaagaagggacaaagtctccaaacaaataatatatttgattacacaacaagaagcaagagcaaagttattgaagatgaagcagcagaatccctagataacccggttcttggttctggtggaacgtctgaccgtacttatagaacaagaagcaagaacagaggcacacagatgggtgaagaagtatgtagtgaaagcagcagcagcagcagcaaagttgaatctagtcaaagaagtgcagtcacaaagagtgaggacaggaatacaagaattggtgaaagaaggtttgatcctggatctgcccgggtacgtttattatcttacattaagcgataattacaacaataattgttgactttgttgttgtctgattttatttcacatgtggaattatttcagatcatggccgctgcaattaggaacttgaagccaccttcttgatctaatgcgtcaaggttgtaccatattttgcattctttctaaaacatgttcatttcaaagtttgagaagttcgttttagagttagtttataggtttattgtatacacattcaatttaacttatatgagagaataatcatgtggactaataaatacacagagcaatgagttttgagtagactgtttagtcgaattttactaaattactatattttggtcagatttagaagaatgtttatatttttggggggtttgtcccacatcggtagtttcaaaatatcagttgtgtatatatttagtcgaaaacgaaaacaagtaacaatagtcattggacaaagtgaatgggtcacatgggcttgtctaagttccgacccaggaaagtacccgggccactttttgcaaagatgcggtctcggtaacgagagaatcatgcgggtggagagattctataagctgagacgcgtgtgtggagc

SEQ ID NO: 16435 - DNA, 1102 bp, Arabidopsis thaliana landsberg
cactatctttctttcttaatcagttcttgcttcttctcaaactctatcaaactcttcaacaatctgcatatcgacgccggatccaaagtattgcaaatccgtttttccacatagccaaggcaatgttcaacaatacggccgtttctctatccgcaaatcgctatcgcaatcgcgaaaatctattcgcaccgtcgatagatatatcaaacgcaacgctcatttatctcaacctgccgttatcagagctctccaagattgccgttttctcgccggtctaacaatggattacctcttaacgtcgttcgaaaccgttaacgacacgtcagcaaaaacctctttcaaaccgctgtcgtttcccaaagccgacgacatccaaacgcttctttccgcggcgctgactaatgagcagacgtgtcttgaaggacttaccacggccgcttcttattccgccacgtggactgtaagaaccggcgtcgctttgcctctcgtcaatgacacgaagctcttgggcgtctcactcgctctcttcaccaaaggttgggttccaaagaagaagaaacgggccgggtttgcttgggcccaaccgagatccggttcatcgacccacactaaaccattccgtctgttccgtaacggagctctaccgttaaagatgacagagaaaacaaaagcggtttacgagtcactcagcagaagaaaactcgccgacggtgacagtaacggtgatggagacgacggaagcatggttctgataagcgatatcgttaccgtgagccaagacggaacaggaaatttcaccaacatcacggcagctgtagcggcggcgccgaacaacaccgacggaagcgccggtttctttttgatctatgtgacggcgggaatctacgaagagtatatctcaatcgcgaagaacaaaaggtacatgatgatgataggtgacgggattaatcagacggtggtcaccggaaatagaagcgtcgtcgacggttggactactttcaattccgccacatttggtacgtcacacaatcacatgttattaataataatgtctcgagatctcaaagttatttttcaataatatttagggtacgagctcgaa

SEQ ID NO: 16436 - DNA, 517 bp, Arabidopsis thaliana landsberg
ttcataaactataaacaaaattaattttgtttcacatcataggggaacaaccgcgtctattcccaatctaagggtactcaaaattgaaaataaactaacatattagaccaagcaaaattggaatcgacgaaaaagtatagaagaaaaacatataaaacgtaattaaattggagaagaaatagatcgatacgaattctaccaatttatttctttatgtagttataccaagttgaaccaaaaaaaaaaataacaataaaagaaggaaaaaaaaatctatcaacgtttgacccgattacattgaatttggaatattttattatttgttatacttggttgggtcggtaataaactcaatttctaagggattctaaagtctttttcacaaatgtcgattaaaaaaaaatagaaattagtttaatttttataagaggagtatctgagaatatttttgcccattgaagagcttctgagaatttaatccctaaaatcctaatcttcggtctctcagattgaaacc

SEQ ID NO: 16437 - DNA, 1854 bp, Arabidopsis thaliana landsberg
  unsure (1)..(1854): unsure at all n locations
taatcaaacaagtcggtctacactatttaattcctaaagcgaggatagccacaatgcgcacatacttatatggctacaagcagatcttaaaaagccaacaccaaatgatatagataagtatatttcagcagaaatacccgataaagataaagatcctgaaggacacacactggtagagcaacacatgatgcatggaccatgtggaaaagaccgtccctcctctccatgcatggaaaaaggaatttgcagtaaaaaattcccaagggaatttgtaaagcatacaaaaatgaatgaatcaggatttatcctatatagacggcggaatgatcaaagatatgtgttgaaagggcaaaccagactggataatcgatttgtggtacctcacaatctcgaaattctaaagaagtacaaaactcatatcaatgtagaatggtgtaacaagtcaagcgctatcaagtatctcttcaaatacattacaaaaggagtggataaagcaacatttataatccaaaaaggaaacagtgtcaatggtcaaggatctggaaatggttttgaggaaaaaccaagaaatgagataaatgagtatctcgactgtcgttacttatcggcatgtgaagcaatgtggaggatatttatgttcaatattcaccaccacaatccaccagtacaacggctaccattacaccttcctggcgaacaaagcacaatatttgaagaagaagaaaatcttgaaaatgtggaatatcgttacggacatgagaggaccatgttgacagaatattttgagctgaataaaatatgcgaagatgcaagaaagctgaaatacgtgcaagtgccaacaatgtttgtatgggatagtacaaataaaatgtacactcaaagaaagcagagagaaaacattggaaggattgtaaacatactcccaacggcaggggatttgtattatcttagaatcttgcttaacaaagtgaagggtgcaacaagtttcgattatttgaaaactgtaggaggtgtggtacatgaaagttttaaagcagcatgtcacgcaagagggttgctagatggagacaaagaatggcatgatgcaatggatgaagcannnnnnnnnnnnnnnnnnnnnttacttagaagcttatttgtcttgatcttgatatactgtgaggtctctgaaccactaaaactgtggagtcactgttgggagagcatggcagatgatgtcctccgtaagcagcaaagagttctgaatttccctcaactagaactgaaagcaaaagaactagagaaatacacattgatcgagattgaaacactcttacgccagcatgaaaagtcattgtcagattatccagaaatgcctcagccagaaaagtcaatattggaagaagtaaacaactccttacttcggcaagagtttcagatcaacattgacaaggaaagagaaacacatgcaaatttattcagcaagctgaacgagcagcaacggataatttacgatgatgttctcaaatcagtgataaataaagaaggcaagttattctttctatatggagctggaggcacaggcaaaacatttttgtacaagactattatctctgctcttagatcaaatggaaaaaatgtcatgcccgtcgcatcatcagctattgcagctctactcctaccaggtggcagaactgcacattcaaggtttaagataccaatcaatgtgcatgaggattccatttgtgatattaaaataggttcaatgctagccaatgtacttagtacagtggatcttattatttgggatgaggcaccaataacacacaaccatacattcgaaacagtagatcgaacattgagagatggtctgtc

SEQ ID NO: 16438 - DNA, 1860 bp, Arabidopsis thaliana landsberg
  unsure (1)..(1860): unsure at all n locations
ggagacttgcgttggaatggtattggtgggtaaagcctcattgattcactcaatgcaccatgtaagtacacttacttgttcaagtacgatgacatgtcttggtcacttccggttcttggtagatttgtgttgatctcttggagaatcttggttaagacgttagggttttcagataaattccaaaagaaccaagtgagtgtagtggccgtggaatctctcccagctgccatgaaacctattgtgaagtccctgaggaacttatcatgactgggtttnnnnnnnnnnnnnnnnnnnnnnnnnnnnnnnatgaaggatgttaaaagatcctcactttctccattagagttgtatgtaatcccttgtgatcctagctcttctctctttgctgctattattttttcacaaacacggtcaaaagtggcatgagctttcaacatcttcttctctgttccgattccaatccatttttgtaacttccacacgaacctcggtgtaatatgcctatgcacaatcgcatctccaacatcatcaagagctttggaaaattcgacctctggcatttcaatggagagacttctaggatcggtcccggttatgaaaatgaaggttatatcatacatgaatctctggaacacatcttccaagtccacaacaatctcttcatttgcaaagtgattgaaaagaggtacaagcccatcattgactttagttttcgtggtacttgctgagaagttttggtacctttgatgattgaatataagctgagatgcgttcctccaatccctccatagctccgcgtccgaattaatgatcccatctccaaaagcttcaaatatttcgtggaatctaggacctttgatgtaatttgagaagtttgagctcattatatgatgaatattagctggatcagccgtggctaatacatccattccaacgaaccatgggcctttgaattgaaacgtcatgttggaattctcgagcacctcgacgctgcagtcatagatgcgctggagcctcaagagaacaccgggaagcattccaagaaccggccagttccaagggtagcctttgaagagttttcttgatgagtaagtatctgaaaggtttcttgacaaggaaataaaagaagatgagaaagcagaggaaacctatgaatgcttcatatagccctattgaagccattagagagatggttattttgtgtacaaggagaagatgaaggaactcgatttatacacacagaatcacacgtcaattgggagaatttaaaagctattgttaacattacattttcccagagagacatcttgagatccacactaaagatatgttttaaaagtcatttttgtattataataaccagacaaaacgtagaacatttaaggatcgaaacgtagaacatttaaggattcttgtcgaaggttaatggttaccgtctcctataaataatcaaggagcacatgattctcatttatgtaaacctagtgcaaagtaatgctttaggggttattattggttgatggatttttagagagttttaaaattttcagattccacagttattggttaatggattactacattcttagtaaattctagtgttatctgtttgatgactttaaattctatccacaatctcatgttattcaaattttttagttatcattaaatttatcattctactaaattctcatgttattggatcatggattctcttcaatttaactcataagacacaactttcaaaatcacatgtatatccatgagatttttaatttatatcacaaaaataatatccgaaaaatccaacaaattgcttccttcattcgttaacataaaaaaagcaatagcatttacaat

SEQ ID NO: 16439 - DNA, 1523 bp, Arabidopsis thaliana landsberg
caaggaacgctgttaggctacttgttgaagaacaagctgtggacgagctgttaggcgaagtgcagacgagctgctagctaggaatagctacagacgaactgggagctagaaaggctgcaaacgagctgttagctagacggactgcgagctaggaaagctacagacgaactgggagctagaaaggctgcagacgagctgttagctaggcgaagtgcagacgagctgctagctagacgaactgcgagctaggaaagcttcagacgaactgggagctacgaaggctttaggtcggttgacttatgtcgaccacgcttatctttcagacttttatatttgaataaatgtttttgtccttaagaacaagttcattttttatttttattttttttgtgaacctccgtcggttgattacgtattaaccatatcggattcccaatctggaaattaggtttttagatcgactaacttataagtcatctgcaagctttgagctcagctttcgggcggactggtttttacctgacgtcacaaccgatttgttctgtttaagttcgggttagatgttaagtgcgagtctgagctcgaattttataaataaatatttcggttcaatactaatttagtttcggttcattcggttatagaattttagtatccatttggttaggtttatttacccaggcctaaagcaatcgatggtctgagcctaaccattattaaagaagtctaacttgggctcgaggttgtatatctctaattctctattgacttattagcatgatgttttctttttttgtttaccatgttcatgtcctaattgtgtttatggacttacaggtaatgaatgagcttaaatcattcacaattcatgaaagcccaaaggcctatcaaatttatcctctatttctttctttctttttcaaatctttactctttattttattatactcacaaacgaattttaagtaaaaagaatggcacaaacaaatcttataaaagttttctgtcgtcaggatcactctcaatctcaatctcaatctcaggccgacgttgctgccggcgatttctccgccgttcacgcgcctccgtaccaccaaacttcaaccttcccgtttccttaaacctatctttctcagccggaacaatcacacattccggtagaggctcaggatacctaagtgtatcgtaacagtaagaatagtacatgaaacgttgtcgaaatcttcgcatggcggcgcgttgatgggaattaattgaagagtaatcttgagactcaaggaaatcgactgagtcggaacaatccatggggacttcttgaataggatcaacggagcaaccgtctagagagaaagatttgaattcagctacgaaaggggcaaatttgtaattagctttgtatttgccgccggaagtagcccaatcagaagcgtcccaaatggtggcgtaaagccccatcggctttgccggataatctgctcccaaagcaacgtttctgatcacttctcttattggcacatcatcta

SEQ ID NO: 16440 - DNA, 1067 bp, Arabidopsis thaliana landsberg
ataacaaaaacaatttctgtacgtagacttcttcatcaatgcaaggttaagcgcataaccgtccaattaacgtgaaaatgagatgtataatatgtgagtgtgaccatagtaatacgtactcttgttatttacttaattgctatctagaattttgcatacaccacagaccacaccgactaattatagtattgtaccactagatgtttactataatctacatatatgaagaaaaaaacagtgaaatatgtagataactgaacttactttatttaatactcattatatcgaaaccgatatatgatgagcataacaacatatcacagcatattccaaaacaaacagttacagagaatagaaactccacaagaccccctttattatattgattatcgaaaagacaccataataatacaatatcgatcgagatagtgatgacggtgatggtggtggttaagctttgttgacgtggccttcaatgtcaacaaccatttgcttgacgaatttcatgtagccgcttggttcgggaaagtcatcgttgcgcttctcccatatcatagtgattttgcagacgcagctatcctcagatttgggaataaattcgtagatgatatcaaacactttgagatgctccatcacgtgaccatccagtcctcttttcgtcaatgttttattctcatcatctatctctctcttctctttgaacatctccttctttccatcttacacacatgtgtttattagttacaatttccaacatcccacaagctagttataccataaggataaatatctgactatcatgtttttccgttatatttttcaaaattattctcaaaaatgaaaatactttatactcttaaacatatgacttttgttttcatatgtaaacataaatgaaaaatatgattattatgtttttggtcttatagaacaaattccttaattaatgatcatatgtatttcatatttggcagtagaccaccaaaaccatattttcggacgcacataggccgaaaaagtcttaaatatatgtagagagaaagtataagtaaatgactaaatgtata

SEQ ID NO: 16441 - DNA, 4233 bp, Arabidopsis thaliana landsberg
ggataaaatttatttttaaaatttttttattttatggcgtctaaaatttttaaatgtcatttttaactagaattattggaggttaaaatttaacattaaaattaggagaaaatcacaaatattttttaaaaagatctttagaatgtagttttcatgattatattctaaagatctctatatattttcgtctctatactaattatgaaattcaaatagaatttgactgccaatttaccatgtactagagacattctaagtttttgcaagaaaagttgatctatggaccatatcttcgaatttatccctacattattaaaagggaagtacaaattgaaattttgtctaaatttggcttcaattttgatttcaattttggattttgttctttgctattcaaaatcattaagagtaatttggtattaacaatctcctaaactttatatgatccgattcaatctaaaccgttcaataaaattaattcctttcaatctaaaccgtttaaaaaaataaagaatctatgtcgtttttgaaatcaaaatatgatcacatttcatccctaaaacactatattcaatcacaaaatcaataatcgataatatccaaattatatattacgattcttcactaatcactagatatttatatttataaatttaaaatatcaagtttattcaaatatttagtataaaaaccaaatataccgattgcccgcggtaaaccgtgggttaaattctagtgtatactagtaaagtcgtttgcaaaatattcatttcaaaacaatggtctctggtacatcgtaaattggcaatcaaattctatttgaatttcgtaatttcgatagagacgaaaataaccttttaagtgttctataattacgaaattgtccttaccctagacttaaaccccatattttcttcctccttcccttctctgctaaattctgtctgatctaaaaaatcaacgaacacaaaactcatcaaagctcctcaaaaccctaaacacagtctctccatcttcttcaatctctctctcgttcggattctcatctcttcttctggtaatttcttcttcttcttcttctatcttcttgcgaaccattcgtgctcttgaaccatcttacttgattaatttcgttctattctcatctgcttgcacgcaattattagttttcgtttcaataactatgactaggttaatataggatatagatctagggtttcaatcgatgttatgtttgatttgagaactatagatttccctcgtaagtgatctagggtttatctgattagctctcaatctgattggattgatttgtttctcatgagcctttgtatttttctacactgggtagctctaaaattgcaattttgattgaaatttattgtttgggtcattaagctagtgcttgtttgagttagaagataagccagttttatgattatgatatgtttttcttgttcatgtttttggtggtaactaaacactccttctctaatttatgcaggtttcagattgagtcttgttactgtgtttcataagactattgaagttaagatgtctggagcattgaatatgactcttgatgagattgttaagaggggtaaaactgcaaggtctgggggaagagggatttctcgtgggcgtggtcgtggacgtggtggtggtggaagaggagctggacctgctagaagaggtcctcttgctgtgaatgctcgtccatcatctttcaccattaacaaggcaagctcaaaatctgggatcttctatgtgtatgatttggaaatctgagtttctgtgaagcatttacttcatcatactatatctaaacgatgggagaagcaggttttcctgtccatgcggaaagccttacttctgatgatagtttgacattctttagcattgagaacatcgcctaggaacatgcttctttctagttcatggagatgttttcatttaggaatgcctcttacccctgcagtttcagtgtactttgtggtttatgttgttaaattgtgaggactttggcagacaagttattggttgcttttgcgacagtacttagaacctgaggagcttcagtaagatgaagatcaaaatttgttcttccagtacaattagacatgttgtgcatttccgtcacacagttcaaatcctcaaaagatgtgtggtgttgtagtaaatatagtgacttcccctccttacccctacacagtcttaactgtatcatgcatgaagttattgatgaacgtcctgctgcatttggaatttcttcagcatgctatgagcgtcggtttttcttttatcatcatagccttggtacaaagaatttgttttggaaccggagcatagtcggtcaaactcattgttcctccatttcatttggttttctcattgggtggttcttgactactcggtggagctctttgctttgactgggtttccctcttccaggcatatgggtggtcacttctttggaattgtttttcattgacgctgtttttgaagttcgacagacatcttgtactgaaatgattctgttctattgaatagcctgtccgtagggtcaggagcttgccatggcaaagcggtttgtttgaagatggcctaagagctgccggggcatcaggagttgaagttggaaccaggctccatgttacaaatctggaccagggtgtgacaaatgaagatataagggtataatcagacttctataatttgtgcatttggtttcttagaggggagccagacactaaaatgtatcttcatgggatctaggaactcttctctgagattggggaggtagagcgttatgcgattcattatgacaaaaatgggcgtccaagtgtaagtcctcacaaatctttatcagtcccattctcttcatgattttgaaaaagttttatcttgtatgctctttctaacagggattttgttttgtgccatgtaactatagggcacagctgaagtggtgtatccaagaagaagtgatgcatttcaagctctgaagaaatataacaatgtgctattggatggaaggccaatgagacttgagattttgggtggcaacaattcttccgaggctcctttatctggtcgtgtgaatgtgaatgtcactggactcaatggaaggctgaagaggacggttgttatccagtatgaatttctgtcttttctttttgttttctcagtaatcgcatgaataactgttgtgagactaaatccaagacttacacaatcttctctgatgcttgtagacaaggaggaggagggagaggaagagttagaggtgggagaggaggaagaggtccagctcctactgtcagtcgccgccttccaatgtaagtataattctgtttctcttaattcgtttagcggagaaccgaactgagatttgttaactgcattccatattaaactgcatggtcacaaaagttttgttcctatttttgtgtaaccaaaccgaataaatcaaaattcgtagttaattgattttcgtttgtttcggttaatgttttaatttgcacttgttttctcttggtggcagtcataaccagcagggaggagggatgagaggaggaagaggcgggtttcgtgctagagggcgtggtaatggtggccgtggtcgtggtggtggaagaggaaatggaaagaagccagtggagaagtcagctgctgatcttgacaaagatcttgagagctatcacgctgatgccatgaacacctcttaaatcgtgttgtgttgttcttactaaactagtttcagatgaaatcatgcttctctttttttcatgctcttcgttggttttgttggatgttgattgtaaagtaaatggaagccttttagaatctagctgtcttaaattttcttttatataaagagtgatttaaagttaccaagtgaactgttttaagatcggttttactcatcaaattcagaagtctagagagaattaggttttacattgtaatgaaaaaagtgagtctgattgtgaacaaaaatttctcagaccaatttaaccggattatagacattctcacacatccataaagcctagaaaatttacaaaactgagttaaagaaaaaaaacacacacaccattgaatcacaaccatcaacctgacgcaagcctatctacctttcaggaacaacgttatcgttgaaaacgaattctcctgaattgcttcgatggaaaagcttgtccacaacttcatcccaattcttcttctttgttt

SEQ ID NO: 16442 - DNA, 1185 bp, Arabidopsis thaliana landsberg
  unsure (1)..(1185): unsure at all n locations
tatagagattacataacgacatacacgaactaacatgagtcatggtgccaactttatagacatatatttcggtaccgttccggtgatcgacgcgacggaatccggcgccggagttaccaccgaaaatatccaattgttaacccgacccattcaattaaaacctgacccatatacaattaaaacccgacccatattatcactagacccaactcaaatttaagtgggcctaaataggcccaacactaatttagcagtaacaaaccaaatctaatccattcattcacgggatcatttttttcactctcccagaatcaaactctctcttctgcgatttagggttcatgaacgtttagggatgggaaagggatagaagaggggtttttcgaggttgtacttggattcctctatagcaatcattgttgcttccatttctgcttcatcttgagcttctaatagagtcgtcgtccgtgattccatagtaagttttcttctcttggtcctgctctccttagactaccacctaaatagagacataattaagctcaagatataaagcacatagtaaccttgtttatcaagagtcagacaaatctttatctcatgaggacattttcttgaattatggcccggttcaccacataaactacaatgtggtactcttcctttcctactaaccttgttcttattctttgttggtgattcatttgtacctttgatccttgccttacctggaggtctcccaggagggcgtttgtaaggcggtccataaatgcgtgattctccagtctcctcccagaacttggattcattaacaggttccaatcatctatggtaagtgtctctatttttagatgccaaatagtaatcagagatgtaatcgtcaacatgttgacaattctctctaattgcgcaaacaatatggtgacaaggaattcctgttaaatctcacttcctacatgcacactccaccttagacaggttcacactatagtacatctcaaactctgaaatctcatactttccaccaatgcttgaaagagagtagcaattttaagcttcttcacatgatttctcaatctctttccttgctttctttgtatgtttggcagtctccttatctgcaattacagaccttgctgcantcatgtgcattgcatctcttctaccacttccacatctcacaat

SEQ ID NO: 16443 - DNA, 327 bp, Arabidopsis thaliana landsberg
aatccctttcgtctccagtttgtttaattggctaattgcagcgcgtattcaaccatctgtacagagactatcaatgattgtactgtaagtaaacacattagtcttaacatttctttcttccatctttctgagcaaatccaaggccaaagaagtatctgctgaactacatatcccatttacaatcgaattataagtaaccacatcaggttgacatgccggtttgcaccatgctatcgactaaaaccacatcttcagacactgtaccctcatgagagagtactctgatcagagtgttaaacgtggctgagttaggctcatacccaagct

SEQ ID NO: 16444 - DNA, 934 bp, Arabidopsis thaliana landsberg
  unsure (1)..(934): unsure at all n locations
tcgagatcgaatcagaagatatatttagtcttgtagtgaactggaagaattcaaaacaagttcttttcgacagaaacttctacctctacactctcttagatctctccaagaacaagctacacggagaaatcccaacttctttaggcaatctcaaaagcttaaaggttttaaatctttccaacaacgagttctcnnnnnnnnnnnnnnnnnnntttggagatcttgagaaggtagagagcttagacctttcacacaacaacctcactggcgaaatcccgaaaacgttatccaagctaagcgagctgaatacattggatttgcgtaacaacaagcttaaaggtagaatccctgaaagtcctcagctagacagattgaacaatccaaacatttacgcgaacaacagcggaatctgtggaatgcaaatccaagtaccatgctttcctacacagacccaccagccagctgaggaaaaagaagaagaagtaaaagaagaagaagaaacaattttttcatggaatgcagcagccataggttgctcttgtggattccttatagcagttgtgttcatgtcttacaatgagttatggaagtaacaacacaaaaatgtactcataaaacaattcaaaataaaattttcctcttaagttcatcatttcattaccaattgaaaactaaacagatcatcactctctaatggaaccacccgcaatcgaaacgaagcgcacacaaggcacaatctacaatgaaactagtaatattccgtcttaactaagatgaagactaaaggaagccagtaacaagggagacgagagccattgcgaaggacatgaatctgctacaacaccaccgtgaaatccacactaaattaaatcaccgtcctctagtgagaagaacaaggataagccacaggaggagaaatctcataccttgatcc

SEQ ID NO: 16445 - DNA, 2236 bp, Arabidopsis thaliana landsberg
aagatggagagaaggggaaggagcagagtcgttggggaagatgaactgcgaagcgcgcgaaacagagaatccaaagtctccgaatttgatgggaatttgttttttatatagataagttaaatatcgcgtttaagaaaaagaaaaacaatcgacaaaaaaaaaaaaaactaattatcgaacaaacgttttcaccgtcgaattaaatttccacgttttctcaccgtccgattgcagaaattaggatttctatttatttattttcttttcatcgaatatatttatatagtggaagatctataaattaataatgttcgatcataaaattttattaatttgtagttatattatcctataaaatattaattttaaaaatatttatggaagacacaatactgaatttttattttttactttattaactttctttttgcaagatattatgtttttatatctacgacattaccgtaaacacttaagcggagacaaacaacattagatttatattatattaaattgtcttagaatgtatgtttaatatttatgatattatttagaccataattttatatagagatttgaaaaaaaatattgttttattatcttatcgattttggttaatttttacattgttctgatttgggaccgacaaaaattattaattttaataatattaatttatagaatttctattatatcatgaagactaataatttgattgtacaatcatttgtgaccaatatgaaacatcctttaattaacactttcaatcaattttgaacggccttgttttcttcgaatttccatcagcaaccaattttacagaatatattcattcgattggtaaattcactaaatttcaaataattgtgaaatataaaatttacatgtggagtatgtcctaaaggaaaaaatgcataaatatctgtataaaatgaagtcgttaataaaattatgtatatatcatacataaccaatattgatatatatatatatatatatatatatacaatatggaaaatcaatcattattaaataatttctttgttattcgataatttaaaacatccataggtattaaatatcctaactaaaacttatttgaaatcgtgactttttttatatcgtaagtaaatattcggataattgatttgtgtaagaaaaaaggatgattagtaaaacacatgagatcaccaataaaaatctccataattttggtttcaagagacaaactatggtatatagatccaaggtcattttaattgtagtattgtaccatgtatcatgtcttcatgtataattattagccacatttaaatgataacttttcagacttttaaccccgtaaaattttatcttaagtaataggtaacattcgattactttatattagtaatttgagttatagaacaatgtgttaacaattctaatcatagctagatttacaatctattgattacgcaaacttttttcagacatctaattaaaatgtattaagatcaaattttgacttaaagttggttttaagttattttcatatattaacttattgccaatagtctactgggaccacggaactttgacaattttattattaattagatgttcaaattatggatgagaacgtaattaagaagagagcattcaatccaagaagagaaccaagttttgaaaacatatcggcttgttgcataattattctctttcctataaaaatcacaaacagtcaccatgatgaatattttactcgcgtaaatgcattaaacaacgagattgtttataccatgggccagtgcgaggcagatcccgaatttaaattaaccttgtccaagtcaagaaatgtagtgaaaacaaattatttcatacttattattctcttccaatgtaatgtgtaaagtttatttatcgtaaacatgaaaatatagataccttgttgttgttttctttaataatggtggacaccaaaatgtactaaaaaacacattaacaaaaacattaaataaccccggtctccggacataagaataatctaaaaactcagattcatcaaatactgcagccaaatttaaatgtgaaaggcaagaaaatgagtactattaagtagtactaacacaaagaataaagaaggggtctactacatgtggatgagtaacatgtttgtcaacactggtagttagggattgcattaaatttgtcaacatgaattagatgggaagatgaattaatgttattttcttac

SEQ ID NO: 16446 - DNA, 1041 bp, Arabidopsis thaliana landsberg
agccgcttgacgtgtcttcagatgggttgaagtgtttatttaatgcttcgcgattgttcagtgatcgtggttggaggtgagcggttgccttcttcttctataaatagtgcctttgcctctctggtttttcacatctcttgctgttatccactgcttgctttcttctccttcatcgcacttccaccatgggcaagaacaacaagcgcaacgagagccgactcctccatcagaggacttcggtgactcggagtactcagaggaggagttctcctctgagtccgaggggtctccggctctcatccctctgcgtgagtcgtttgacgattcagacgactctcaggggcttgcggcggaggtctggacctatatccgggccatcgagcacgctgggctcgcgggctcggatgagtcggagtactcctcggactcgtccgaggagggcggcggtgacggcgatggcgaggacgacgatgacggaggcaatggcgacggcggcgatgatagcggcgaagcgacggctcgggcggcacaatgggtagctacaagggcagcaacaaggccagtggctaggcgccactggttttaaatgtgagtatagattagtagtagaagtagtattagtaggaataatgttgtagtagttagtagtatagtgtagtgaagtgtaatgtagtagtagtagggaaagcatcaactcataacgagttgatttgtaagttctgtagcttccctttataatgaaaagtgatttcgctccacttctgtatgtgttatgctgctttttcgctgtacgccaatcatatcaatgcgcgaggagtatctatgatcatcaaatcacatttctgattgccttatttgtaatgatagtgctttggtggttgcggccgagtcatccgaaatcccatcgttgctttaggaatgacggccgagttatggtgggccgtgtcggtgttttagaggtaatcagccgagtgattaatggcgacgtcggtgttttagaggtaacagccgaatgacttattgtgatgtcggtgttttaga

SEQ ID NO: 16447 - DNA, 1527 bp, Arabidopsis thaliana landsberg
tacttaaggaccaaccagagcttaaggcactaaggaaagagagggaagaggctgaacagtttaaaaaagagaagcagttattggaagaaaacactaggaaaaggctatctgagatggattttgcgttgaaaaatgcgaccagcctgttggaaaaagcattcaatactgctcacaggctcgagctggaacaatctatactgaagaaagagatggaagctgctaagataaaagccgtcgagtctgctgagagctttagagaagcaaaagagagaggggaaagatcactgaaggatattcactcgtgggaagggcaaaaaattatgctgcaggaagagctcaagggtcaaagggaaaaggtgacagtgctacagaaagaagttaccaaagcaaaaaatcgccagaatcaaatcgaggttagccacttttgtagacatacgttaggtcttcttgtcttatgacgattatcgataggtacccgcaattcaccatatgtctcatctgctaacgtcccttcctttcatattcgtatctctggtaacgattttattcttttggatacatatatatcaccttgtacattgctatatctaaggaatgcgataaagtaaaggaagaaaaaatgtcagtatcaggtgtttttagtctactgcatccttctgctttaaagtagctctagaaatgaagtgtagtaatatcaagagtgttgttgattgcaattgatgttttttatctatctaggtttggtcgatgttgtatcaggtgtttttagtctactgcatccttctgctttaaagtagctctagaactgaagtgtagtaatatcaagagtgttgttaattgcaattgatgttttttgtatctatctaggtttggtcgatgttgtaagtttgagaaagggttgtttttagttataggagttgatgaagacatctaacgaaaattcctctgcaggctgctttgaagcaagaaagaacagccaaagggaaactcagtgctcaggcttcattgataaggaaagaaacaaaggaacttgaagcgcttggaaaagtggaagaagagcggatcaaagggaaagcagaaaccgacgtgaaatattacatagataacatcaagagacttgaaagagagatctcagagctgaaacttaaatcagactactcgagaatcattgcactgaagaaaggcagcagtgagtcaaaggcaacaaaaagagagagtcttgggatgccgaaagtgaaaagagaaagagaatgtgtgatgtgtttatctgaagagatgagtgtgattttcttgccttgtgctcaccaagttctttgctttaaatgcaatcagcttcacgagaaagaaggaatgatggattgtccgtcttgtcgtggaacaatccataggaggattcaagctcgtttcgctcgctccgggtgaaagctttcttaacagtttaaacttgtagaacaacagtctctcttctatctatgaagacacaacaacttttggttaataatccatcttggcgttttgaatgattta

SEQ ID NO: 16448 - DNA, 5961 bp, Arabidopsis thaliana landsberg
gttttgcgttttagattctttgaatcttaaggccatcacagcttagctccttttcggctttggcgaagtggagagctttgtgaagggcatcagctaaagagactggttgcctaacaatgagttcctcacgaaacctagaggaaaaccacagaccgttacgaagggctgctatggctacctcctcgtttaggttcgcaatcttcgatttgattgctttgaattttgcgacgtaagatcgcagggatttgttctgaagttgagtgagactccagaggtcggcttcagacgtcctgtgtttgataagtaccgaatattgttttaagaaagcggaagcgagctgatcgaaggtatcaatggagttccgttcgaggctagcaaaccattcgagggcgtgacctacgaggttttctacgaagaaacggcaatgacctgcttcgttttcttcgtctgtcaggtacgctcgagttatagcgaaacggaaggatttcaggtgagtctttgggtcgctcgttccgtcgtactccgggaaacggagtctcccgacgtcttagacgcgaaaatgagcgatcctatccgtgaaaggggtgcgcgtggtttcttcgctcactcgatctatgtcggaagcatcgctcactgcaagatgcattcgtgagtgcatttgagccatgttcgcgtttgtttgagctgcgtaattacggaatgtttccatatccacaacgttacgcgtatcgaccggtgctttgggatcggttggactgtttaggaggtcacttcctggtatccggggaatggatggcggataagcgatagaggtccgttgttgcgttgagttcccgggaacgcgagaactagatgcggttgtttggtttctcgtccacgtgtacctaggggcgaatagcccatcggtagtaaaggtgggaccgatagccttgggaaggcaggcgttgtgcttatctcgtttcctgttgccgagtttttgacgagagtgttcgtaggtgcctgtaaaaaggcatcctgccggttgataggaggtgagacgtctatcgaggccaagtctagacgagtcctcggagtacgatcggctggttagacgggttggctgggttatctccgttcagaggctgtatcgtgacgttttgttctccgccccttgtgtgcgagggggggggaatgatttggtcagatctagaagaattcgagttttgggagatgttctccacatcaatgtcatggatagcatcggcctcgattccaagagggagatccgttggaaggtgcctgtccgtgacattgtcgtttgggatctgaactggtacgccagatctcgttgaatcgaatgaattcagatccatgatcgttggtcacaatagatgtgttagtttcggtgttggaaggatctatttccgtccccaaagatggcgccaaatgtgggttctgaaatccacactagagatttgtaaatagatttataagaaaggagggctagatctacacaagaactttgagatttatattgctaagaacgaatggacttttgtattgatgatagtagaacttttacaatgtagaatgagattacaagtgtaaaagtataggtgttagtgttaagctgaatgtatatgtcttccaagtcgtccttgcttccttatatagctctacgcacgtgggtagctccatccgagatctgcagggattttcctggatattcggcaggtcagttatgagatatcatgtccgctccgcgaatatctccttgtcagttcctaggttgttattcgcttatctcccttcattaggtaagcgggcttatcaggcccaaatacctaatgcgtacatgggctccagagctgcgcaggttctctacaggtgggcttgttgggcttagtggcctggcctggtattttcgcaggtggactcttggagggaaatccagctccaagaaccttttgatacctgacatatataacaccttctgacaatagttccagcatctcttctcaaatgtggccaaaaatatctcccttccagactagcaatggtcttgtctttacccaaatgcccactaagaccaccccatgctaatctgggatcaacgtctctcttagcgatgagcaagggatgcacaatcgatctcctttgaataagtagccttctcggacatgaaaatctgcagaaggatgcttctcgtcgcactaagcccaaagttccttgaattcaacatcattttcatacaaatccttcttaaactcaaagctataatctcttatgctaaagtaagtagcaatgacgctctcttactcaatgcatctgccaccttattaagcgcgcttaacttatgctggattataaaagagaatttctgcagaaaactaacccaacgagcgtgcattttgtttatcaccttttgggtgtgaagaaacttcaaagcttggtggttagttaacaaaatgaactctctctcaattaaataatgctcccacttccttagagctcaaaataccgcatacaattcttgatcataggtgctctatttatgttgagcttcactcaatttctcgctgaagagagccactggtcgtttttcttgggacaggacagcccctactcccacaccactagcatcacatttaacttggaacactttatcaaaatcaggtaatgctagaactggtgcggtacaaagcttctccttaattaaataaaaacttttctcttgctcgataccccaatgaaactttccttttttcaaactctgagtaataggaaaagtaatattactaaattctcttataaatctcctatagaaggtagcaagaccatgaaagttgcgtacctcactgactaatttggggtaggccaatccctaattgctttcactttatcttcatcagccttaactccatctgtactcacaacaaaacctaaaaagacaaggttatccgttccaaaagtacatttcttaagattgacataaagcttttcctttctaagcacttctaaaaccgtttttaggtgctcaacatgctcttctaggatgtcatcaaagtaaacaacaacaaaatgtcctatataagctctaagatcatgattcattagtctcatgaatgtactaggtgcatttgttagcccgaatggcatcactaaccattcatataatccttgtttagttttaaatgcatttttccattcatcaccttctttcatcctaatctgatgatatccactttttagatcaaccttagaaaagatgctagaaccatgcaatttgtctaacatatcatctaatctagggatagggtgtcgatacttcaccgtgatattgttgattgctctacaatcaacacacatacgccaacttccatctttctttggtactagtaagaccggaacggcacacggactcatgatttctcgaatatgacctttgtccataagctcattcacttgtctctcgagttcctttgttttggtcgggttggtgcgataagctggtcggtttggtagagcggctcccggaacgaagtcgatttgatgctcgatcccacagatgggtggtaaacctatgggattgtcttccagaaacacgtccttatactcttgcaaaatcaacttgatcttactcgatagcaccggtacgggattagttgaacaagtaagtgtctctttgaaaacaaagagtaaactatttttacttaccttgttcttgccctttgtatcgattggttcggttggtttgatggcccattgtttcatacttagctggtctagatcgacttcgtgcggagtcatcgggatgagagttgtctttcggccattttattcgaaggtttgtcggttggtgaagccatcatgaagaacttttcgatccgattgccatggtcgtccgagaaggatgtgactagcgtccataggtagaatatcgcacatgatctcatcatgatacttcccaattgatagtggtaccttgacttgttctctgacggacatctcacccgtttcattaagccattggaacaaaaatacggtctcgggtgtttaagcacttctaaaccaagtttctcgaccatgttcctacacgcaacgttagtacaacttcaacaatcaataattaaactacataccttatctttgaccaagcaacgtgtatgaaacaagttttccctttgcgcttgttcctcggccttagttagaacactcaacgatcttctcgcaacaagcaactctcctctagcgggggattccacatcttcttccattgagtcttcttccgcatgctcatcttcagattctacttcgccattgtctctaaggaccatgatccttttgttggaacattcgctcgcataatgcccaagtccttgacacttaaagcatcggatatctctagccctcgtgattacttccttaacctttccttttggatctagatcgaccgattttggcttgacgaacggcttgtaatccttttgataaccaaacttctcttccttttgataacttggctttcccgggctgtagttggtcttggtgtgacttgatcgggcgttctttctcttgatttgctgttcgaacatgaccgctgtgtgaagcatctcctcaagctccacatagtgttgagtttctagacggtcttggatttctcggttaagacctcccatgaatcgggacatgaccgcttctccatcttcttgaagatcagctcttaacataagggtttccatttccttaaagtattcttcaacggttttgcttccttgaaccaaatttctcaaccgctgatgtatttcacgatgatagtaactcggcacaaatctctttcgcatgacggttttcagctggttccatgtttcgatcggatagtctcgggtacgtctcgggtacgtcttcggctagtaacaagttgatcccaccaacttaaggcatagtcgtagaactcagtagccgtaattttaaccttgttggactcaagacattcttgacaaagaaagactaactcaattttctgctcccattccaagtaagtatccggattgttggttccatggaatgcgggaattttgagttttaggcctcccaagggatctttaggtggtggtctctctcgtcgatgcctacgttggctactgtgagaggaggcgtgactatagtaatttcttgcctcttcatcttcccttggttcttcttgtcttagacgtggatttgtgtccgggttgacttgatataagtttagagcaccaagcttttcatcgattaatgttgccatagctgatgtgactgttttcaaaatcctcctttccaaactagaggcagatgacgcttcatcttcttcacttgtcaccattgtacctgaaaaattaaaaatttaacaagtaaaacaggcaaataaaaacggacaaaacgactccaaaaattccgaacttaatttctaaaaatactagactcgtaaatggttcgaattcaattggtttcacaatttttgaaccagccaaatattttgtaaaattcacgcaagattgaacggagatctgaaaaaaagaaaacaaaattttagggttggaacttcaaaacctgataacaaggtggctctgataccacatgatacactcctggacgtggatgtatgttccaaggactcactttgttggttttgaattggaaatgatgtacttgatgatgaataatggattgatttgaaacaaagcggcggaaagacgataaaccgggatgatgacaagatcgagtggatgcagcggaatgataggggaacgaattgtacttccaagagtgatgaaagactcttagactactagcttgaatccaagttagatattacacactaagaagaaaacaagttgaaaagatattacacacttttcggatcaaacaagtaaaagagaaggtttttgattaaaatgtttgatgattgcaaatgagaaatacaatgagtttatataggagagg

SEQ ID NO: 16449 - DNA, 911 bp, Arabidopsis thaliana landsberg
gaaataggctggttgtttccctttatcatgaaaagatagtctctgaacaggtgttgatctatgctgaattggaaatttgaatattctccatatagcctctgacgcggatacatatctagcaggggaaaaacttatgtatgagctaagaagctatatgtaagatagataagtaactaaattaaatatagattctgaaaacatacctgcaatcgaaccaatcctttatttcatccttctttttctctgttgtatctgactcaactacaggagctgtagtgtcactacttgttgcctcttttactggctcaacaataaaaactacacggtccggacctttgttgatgtatttaaataagtattttatagaaccgttctggttacaccattcgacattgatatgagcttggtatcttaaagatagcttcttattatagggcacaacatacctattgtcacatttaacaccccccttttctatatagtcgtctgtgagtcttctcctatagattggataaccatcagcacccactttagtgatttcttgatgtttttttggatatagctttgaacactgaccatcaaccatacacggagaactggtatttgctgaaccacatggtccatgcatcatagagtttttgataacctcatagagctcaggttctttgtctttgttaggaatctccgcagatattatcttgtcgatgtcgtcagctgttggtagtttactattagagtccataaacgaaagtatgtgagcatgcggaaggcctctttctggaattcgactgtgtacatagctgtaagagatgtgaaataattataattcagagataaaaatatgaaacaggttaaggtattgataagtaactctttataaagagggacttacatgcaactgtttttccaag

SEQ ID NO: 16450 - DNA, 1423 bp, Arabidopsis thaliana landsberg
  unsure (1)..(1423): unsure at all n locations
attctatttaccatatagatcacctctttaatatctgtcaaaaacgttttttgcttttgtagattggaaaggctagggttttgtgtactatttatgccattgatacggattgggcatggtattacattagttgtaagacttgcaacaaaaaagtgaaccacatccatgctggagtccatggtgtgaataacaaagggaaaaaaccaagattttggtgtgacacttgcaaaactgtggtcactaatgtcatcccaaggtaataagagtaattataatggacttagttaaactatttcattctaaattttctgtaaaattctgggacaggtatatgctttacgctaatgttatggacaataccggcgaggcaaagtttctcttatttgattcaatttgctctgaactcattggcgagtcagccgcatctgttctcgacggatcactcgatgaggtatgttctctctgtatattaacacacacagaaacggtagaaaagggatagatgcaatactgattgtaatgtgttctttgtaattaggttgtggaccctgagaatttgccagagccagttaaaaacttgattgaaaagacctttctcttcttggtgtgggttgaaaaagaacacatatcagatggaaaggaagtctacaaagtttggaaagttctttgcaaaggtggactactagaggaacagcttcttgaatattctgctgatattgtgaatcctgcctctattgagtcagctgatcaggtttttaaatcaaagattaactcaaactttgtagcccgtgtatttacaattagaaactaatatggtaaacgatttttttccacagccacaactcatgttagagaatagccacgacacatctgactccggtactccttcttccaagcgtatttacgcaaacccggatggtactgctgatgaatcttccacctctaagaagatatgcattaaacctattgacttggaaaagtcaaacccagaattcggccccacttcagaacacgcacaacttggagatcctagcgttaaggatggagatccaagtttgaggagcagcaatcagtatgaaaagaagaatgtggttgtgagggtcaaagttgagaagaaggagtgatcactcactatcttttacaaataaattcaaagtgcttcactttgattctccttcccaatttaggatcatcatgttagaccctttttttttggtttttgtttttctaaattttctatttctacaataagttctcttaacatggacatctatttcatgcgatttgtgccttaataaagttttctattcttccaaattgttttattctacttacaatccaagtgcctattgttaccctatataactatttctatttggttacaacagaaagttagaccaccctttaattcanatcactaata

SEQ ID NO: 16451 - DNA, 1931 bp, Arabidopsis thaliana landsberg
tcggacgatgttgagacggtcacggagcttagtgctgagccccctcctgaacctgtctctcttcttctcatccgtatctgcgtgatacccagcatactggcacaaatcattaaaggcctgagcatactgcaacactgtcatgttgccctgagtgagtgccaaaaactcattgagcttccggtccataatcccggctggtatatggtgtcctctgaaagctgccttgaactccctccactctacctctcggtactctggctgcatagcaagaaaatgatcccaccaagtccttgcgggtccgcgaagctgctgggtggcgaacctgactttagtgacctctgaacaagctccatggagtagcgggaatttggattccaccacccgcaaccatacatctgcatcaagtgggtcctctgcccttgtgaacaatggaggctgggtgctgaggaactcctgataggtagccgccgcggggtgacgctgatggtctccaccaccatagtgctgaggtggtggctgacgctgagccagctgtctcaagatctcgttctgctgagccatgagctcctgcagagtgggaggtggtggcggcggtggaggaacgcgctcgttctggcccgacgctgcctcccggccatctgaaaaaccacatacatacttaacaccacatttccaagttcaagattttatcgcggcgaaaagagtcaaaaacaacatgatagactccgacttcaacaaaaggattttaaaagacataaatttctccttccaaatttaaaactgataacagtatccatcaacatgcttccaagagagtttagcacgattacatcaattgtcccaaaaagactcaactctatctagcctagtaccccaagggtgcaaaagctaagctagctacgaggagtcctaccatccaacttctaaccctatcctggacatctagtgagcgaacgaagcaacactcgactcgggggaaggtggtcttcccgagccagcagtgtccacactggaggcaggctcatctcctccctcaatgtcgacgtcctcgttggcctcctggtcctggatctcctggtgatgcatgtccaggtgctcgttagcctcggcaagctgctgctgagtgttaaggagctgatcctctagaacctcgatggtgttctccctggtgcccaccagctcctccaactcctgaatatcagtggatagctgctccacctgcaagtccttctccaccatttcttgagacaagtcaaccacgagctcctctctgttattgatagtcgcctagagggggggtgaatagggcgaaactgaaattttcaaatacaagcacaactacaagccgggttagcgttagaaatattaatgagtccgtgagagagggcgaaaaacaaatcgtaagcaaataaagagtgagacacaaggatttgttttaccgaggttcggttcttgcaaacctactccccgttgaggtggtcacaaagaccgggtctctttcaaccattttcctctctcaaacggtcacttagaccgagtgagcttctcttctcaatcaaacgggacacaaagtccactacaaggaccaccacacaattggtgtctcttgctttgattacaatgatcttgatcacaagaatagaggaagaagaaaagcgatccaagcgcaagagctcaaaagaacacaaaagtctctctctctagtcactaatttgtttggagtggttccggacttgggagaggatttgatctctttgtttgtgtcttggaatggagtctagagctcttgtatgaggtttgatggctgaaaacttggatgcattgaagtgtggtggtggttgggtatttatagcctcaaccaccaaaatggccgttggtgagggcttctgtcgtatggcacaccggacagtctggtgcgccaccggacactt

SEQ ID NO: 16452 - DNA, 1253 bp, Arabidopsis thaliana landsberg
ggacgggattcaaacatttatatgaatttttttctctgtagctacccgatttactctgctcgtaatcattgttcaacaggtaaaactaaccgtaattctgaattgagattccgttccgtgtctattaatcccagaggaaatggttcaacataaatctctacttttaaaaagtgttaaaaaactaatacccaaattatttgagaaaccttttattcatctaaaagtcaaaaactcccaatctatatttaacttaattacagagggaatcgtcaaaacacgaatgtattatatattcatctcaattctgaaaacaagcatgctttctcatgatcaagaaaaaacagtagtgagaagtaatgtgaatcacttcgatcatattataacttatataaagttatcaaagcaacataattaagtaccaacaatgaaaacgactatttctatacctctgagatatgatggatggaaacttcaggtgaaggaaagcccacatttagtacaaatcctgtgtatggacgatagctcttgcagcatcttgagtttctcgttatcattggtcgatttcagggatctaatagccattgtcttaagctgtcgagagttttctagcaaatacatcaccacttttttctctacttctcttcctttgtaatcaatccactcaacagtttcaagactcgaaatcaaacacttaggaacagaactcggctgctcccattgagtttgaacatctacggaactgctgcaacatctcttaagaggatctagcaattgataaaattttgcttgtctttgttcgaatctgagaactctgagtttaggtgtatggttgagtataagacgacaccaacctaaagagcatgtacaaagacttagagacactagctgattgaagacgcctataggacatgaatcctgcaaatggcatcataagttatagaaattataatgaaatcaaaaatagaatataaatagtcacaaaatctcatagaccttaccagtggtggttgtagacataaggcaaggcgtttggttgaggtaagacatcccataaacatcttagaatcaccatgtcgaaccttgatagaagccttcacgaggtctggcatttttactaaagaacggaacccactatggggagaaaagttcaacaacgtcaacgactttaaagacggagctttgatcacaaacccaacatcatctccaggaacttgagagcgacagtctatggctattaatctctgcaatgaagc

SEQ ID NO: 16453 - DNA, 1882 bp, Arabidopsis thaliana landsberg
tcaatgaactcaacaagcagttcaagatgaaagatctaggcaagctaaactattctttgggaattcaggctcagtttcatcaaaagggtctcttactatcccaacagaaatatgcttaagatctactagtcacagcagccatgaaagattgctcaccagtagctacaccactaccaattcagccagataatgctcctcatcaatcagagctcttcgaaaatccaacttattttcgcagcttggcagggagattatagtatctgacactcaccagacgagatattcaattctctgttaactatgtttgtcagaagatgcatgctcctactttatcagattttcacttgctcaaacggatcctgagatatgtcaagggtaccactacaatgggaatctccttcaacaaggatacagattgtaaattgagggcttacagtgatagcgatcatgctggttgtcactctacaaggagatccactggaggtttctgcacttttctaggcaacaacctcatctcttggtcatcaagaaaacaacctacagtagccaagagttccactgaagtagaatatagagccatgtcagaaacagtttcagaaatcacatggattgtcaatcttctcaaagatctgtcgttttgagctgtgttgttcatataaacatggtcttacagcatgcacatagttggtactcagagtatcatcaacaattgtttattattaattttaatgcttgtttattgtttgagattttttatgatacttacaataatttgtttctactggtaagactagtattggtatcgtcaaaaaacaaaatttatttgtaaaatcgaaattacatgctagcatcggctagcgatagtcgagagcaaataattttgtttttctctcaattttccacaaaaacgcgttttttcgactaattacaagccgctacgtgattagagactggtatgaaaaatatcactccagtgatatttctcaagtccaaatcagttgctttgtctattaatttaatatttttatgcttatgatacccacaaaaaatctcttctgtacatggtctaacaacagacaaaaaatatgttattttaaggaatttgtgggtgtcattgttgttgaccaaacgatttaagctacaaacactagaaacaatttagtgcagtggagttgccgacttagtttaacaagttatttatttattagtttaaccaattaaagaaaaattttggatttgttcgattacatcagtactcttggaagggtctggtaataaactaatacggatcaatattcagtagtgatgtattaggaatctttgatcaaaaattaaacataaacatgtcatcggattggtgacatacgaataaaaaatactattgatctattaattagtgattaaacattgaaaatgatttaagtataagtttctcaacgtacaagtttaatacgtacggcctgtttttacgtaaaaaaagagaaagaagtttgatcgatcaggtgatgcctttggattcttctttatatgagaaactttcaatgagtcgaacaaataaatatctcgaggcaatgccaaattaatgaattaagacataagcacaacaatgttgtctgttctctcttctcctttatctctcctctttctgtttatcatctcttggttcttcatcacaagccatttttgcttcactctttccttgccaaagatactcggcctcatcaaaatcacatcttcgagagacgattatgacaacgagaaacggttgtttcctaatttttctagacatagatagcttttaataggtttgtcccttaagtcttaactcatatttcaaacttcagtactacctattcatacggtgtcataaactttaagcttt

SEQ ID NO: 16454 - DNA, 896 bp, Arabidopsis thaliana landsberg
ccaccaaaggcaaccatattataggttgtcacaacacaacagcattttccagggaatcgttctttactatcagaagtgaaacgacatatttggtcatctcttatagtagaccacaacttgaactggaaggcccactgatccactgagacagcattcgtcgccaaacaaagacaactcttctttatacgagcagctgcagaaacaccaactagagatttaccagcaccacaaggcaacactataatcccagatcttgctcgccctgcaaatccaagattcaagctcagtcacaatatttctcaagaaattacaaagataattatctattaggtgttcaccataaagctagatcagtcacgtggaagtacaagtggacatatctatgagaagttcaccatcaataaggaaaaataatgtggatgcagacagctataccgttcccaaacattttgctcaaacttttttcctggtatggcctcggttgtgcatggggcttcagttccatgtcaagatcgggattaacctgagagacaccatcaagttattaacaatcacacacctgcggtgcatatcatctggtaagcaaaaattggcctgaagtgtaatatttgttactcacattgtcgttcctgaagtcatattcctctaacatagggtaattcaaggcatttggtaagcaacgctgcttcacattctccacctaaacaccaagagaaaaagagcatgacaccacgagttaagtatagatcatacaactttaccaaactcatcaattcgattacttttaagaagcattaggagaaatttacctgtgcagggtcaatctcaaatgagtgaaattcattctcttctgctgctgctgcaaattccgcttcattcaatagctccccgggtcc

SEQ ID NO: 16455 - DNA, 2550 bp, Arabidopsis thaliana landsberg
gaactgcttagccgcctctaagaacatagctcaagattatttagatttggcaagccaagcacatagactacgtcaaaggcaggtatgagctggaaacaaaccaaaagtctgacaatttacatggcacgagattttccttaataaaacaagaagctggaaattgacttagtgcagattcttttagtcattggtgctgttgtgagtcgtgaccagcggccgaaagcgaaaggaaatggtggcagcaaaagatgtgtcgaagtgagggttgggtaaaaaaaacttaggtactgaaataatgatcaccagcaaaacaacaagaggtcattttgactatctgtcaactacaatcacagtgatcaaactggacctagcttattatgatacaatctgtatgtgtctcttgggaatcaaacctcagtttgatcgacaaagcatcaaaatgaagcacttttttctttaaatagaaaaacaggacaattcaacccaaagtgcggaaataaaatgaaacagaattgcatatataacaacaacggaatcaaacacttacatttcccactatttgttgcaatgcaaagaacgttctaaccaagcttgttaagcaggtgttttgaatctggacaatgttttagagtctctttgacaattctgatatggccattcgttgctgccaaatgagtggaaagggtccatcattgtttcacacataaacactcttcgttaatcgtactaacaggttacatactcctttataaaaccctatggatgctccaattgaaagagaatttatcccttcttcacatcactcatccccaagacttggatattcgataagaataacatgaaggacacctgctcaaacaattgggaacaacaattagcataacgcagctggttttacatagaaatttgaacagattaaatgccaaagcgagagataaacctgtacttctggcattcaaagcaacatgtacaagatgttttctcccttccaactttgaatctaagttagagttcctcccttcaaggtcattgttacctgcggttttcaaaatttctttcacaagagtcacatctccagcttctactgccatgtacaaggaagatattccctcattattttcaagaaaagaagcattctggttcacgttcaccagagaggcagccatctccatatagcgtccttcaatggccaagtgcagagcagtatttccatatttgtctctgagaacatatggattcagtctctccctatcttcttcagccagtctatctgaaaaaaatgttaccgacgcaacaagagcctcaacaatggccgaatgaccggcatgagctgccacatgaagcggaatctgattcttggagtttaactccaatacaaggcatgggcattcagagataatgttcttcactagttctagatgaccccatctagcagcaagatgaagaactgaatctcctctatcgctcttgagacatgccattgtcgttccatggcttttcaacttgtccagacactctttgtccccatcactcagtccgctaaaaacttccgtattcatctggacattttcactagggagatcgaaaagatctgacaatttgaggttgttgaggaactctagcccagattcattgtctcccgtaggtggcgtggcgccatgtcctcctcgtgaacagagtttgcttgcgactttgtttatcagattcatggggaagtatttttttttctcttggtcatgagacacatccgttgacctctgtgcctcaattctatctagatgtgcttcagaactgtccatctcaatcctaaaatcatcacacaaatcgtttgaaaacacatatttaagttccccaagcaccaaaaaaaaaagtcaatgataccaagaagagggggcagagagagagacttaccaagtaaaagaaggagatgagaaatgcaagatgatttgctaattcttgacaggggaaagagactacaagttagtccgtttctattaaaactcttgaacgcttccttgtgccatgtgcgtggtgagagcttactgttctgtgtaatggtcacctacaaattaagggaatgtctttctttaatcagaaaataattagagtaagcgcatccaaggcaaagttaatggaagccaggtcttttattttcaatcagaaaatgtcaacgttcttatcgtcttaaccacctcaaacatgacattgtctcaaactagaaatgtaattcacaaagaggtttcatatggaataaataataaaagatgtcatgaaaagcgagagattaaaaaaatactaactcattaacaatgtcaaccctaaaagccctcaactatcaaccggtcaaaatttaaatacttgcaaagcacactattagaaagatatacatgaacacttatatatacctgttccatgaaagtaaacgcatgtatttgcttcatgacgatcttattagtgtctttgcccaccactggtttctgaacttatgccatctttgtcccaaaagactgaaagaaggaagtttatagagtataagaaatcaaagcctat

SEQ ID NO: 16456 - DNA, 539 bp, Arabidopsis thaliana landsberg
gctcttttgttctcacaatcggtgaatgtatgagattaagctccgccggtcatcacaaaaagaaaaaaaacaagcaaatagcggattggatggatgtcaattcacaagatacaaacgttaggcttaggattttcttaggaaacgtcaggtcattagtagatctagttattgctaggatgttatcaaaccgaccttaaactcaaatcattattacagagtaaccggtggcgtgccgcattactcactatgtgtaataactaaagattccgaatgtcgggccgcaacttcctaattcaaaacatgcatgctaatcgagtttgatacgttcacctaggtaaataaactgattgttattacacatctaaaagcctcgctcatcaaataggagttatggtaatagatgcctttttgagtattacctattatttaagatcaaattctacttaactactctataactagccattaagacaaccaaagatgaaaagttatacagatatcctacaggtggacgaactactaataatctaaaccctaat

SEQ ID NO: 16457 - DNA, 1023 bp, Arabidopsis thaliana landsberg
tcagacttacaaattataaaataattggtgcagatggggaggcaaaggtggcgattgttagaatcgaggcggtggagccggagaagaacttgatcacgtttagggttatagaaggtgatctgatgaaagagtacaagagctttttgatcacgatccaggtgacccctaagcatggagggcctggaagtattgtgcattggcaccttgagtatgagaaaatcagcgacgaggtagctcatcccgaaactctcctccaattctgtgttgaggtctcccaagagatcgacgaacatctcttatccgaggaagaagaggtgaagacaacagagacacttgagacagaggtggagatcaaagcttccgctgagaagttccatcacatgtttgccgggaaaccacaccatgtctctaaagcaactccaggaaacattcagagctgtgatctgcacgaaggtgactggggcacagtcggctctatcgtcttctggaactacgttcatggcaagtcaatattttattacacatttttcatatatatatatatatatatatatatatatataactaaccagtttatttttaaaaaagaaaatcaaacaaatgtttattttgaagtgactagatcatatgtgtctaagaaaataatctcaaaatttccattcgtagaccactctagtcacgatatatatgtcaagtctcaaagttaacctataaagatgaaatgttaaataattggtacagatggggaggcaaaggtggcaaaggagaggattgaggcggtggatccagagaaaaacttgatcacgttcagggttatagaaggtgatctgatgaaagagtacaagagcttcgtaatcacaatccaagtgactcctaagcatggaggttcagggagtgtggtgcattggcacttcgagtatgagaaaataaacgaggaggtggctcatcttgagactctcctccagtttgccgtcgaagtctccaaagaaatcgacgaacatctcttggccgaggaatagagga

SEQ ID NO: 16458 - DNA, 1086 bp, Arabidopsis thaliana landsberg
aatgccctgattcatgctgcagacgtcgcagaaaatcaatttatatatatttgcccataaaggtacaccacaaaaagttctatttgatttggtctcattaccaaacaacatttgtgataaaatttcactttgcaacaatgttaagttctagttttatttgacaactaagagatcttcacctgaacaacagagaaccaatcttcttcaggtgaagttttaatttccatctctttggatgttctcactgaatcctacaaaaaaaataaaaaaaattaaggtacatgaaattacatgtgtttattggtaaaacactgcaaaaattgaaagtacctcttggacataaacagattcaatacttctggagacagaatcaatcaacgacctgagatcagttttgctactcatgtctaatttcttcggaagctaattaaaaaaaaaaaggaattagagatgatttattggcaaataagcattaagagagagatgcgagagaaaccaatttagcagagccaaaagcagataagcagccatgtttgctcttgagttgtttgacgagtgagagagcagtttcgtaattgcctcttaagagttctttatccactctttcaagtgatttccggcggcggtctaccggagatttagatccgagcaccatgacgcggctcgcttggagataagaagagttcatgttggtttagatattcgaatttataaaacgtgaagcattgtaactcaacaactggggatgtagctcaaatggtagagcgctcgctttgcatgcgagaggcacggggttcgatcccccgcatctccaagtttttggacaaattttgtattttatatttcgttctaattagtaatcatcttctggaaattgtgtagaagaaaaagattaaaaaagcattaggattatgaattcgaaggcttttattagtgatttttaattcggctttcttattatatttttattgacattctagattttaacccactacaaaattataatcaatttaaaagcttttttcagatagttatttaatttttatagatttcacatattctataaaaaaaagaacagccctattt

SEQ ID NO: 16459 - DNA, 516 bp, Arabidopsis thaliana landsberg
gcaccgttgtttcaaaacgtctctgcagaatacgttaaagttattgcggagttccttcctctctaatggtaaaactaaaaaacctatgatgtttccaaacctggattggtgccagcaaaaatgccaaaccagagatcgtctgtgatgaaggaagtggctctctcaactgctccaaggtagacaccaggaccaagggcaggagggagaggatgaaacatcttctggctagggtaatctaagttaacagcaacatggcggttagtcacaaacccaacttgtctacctccagtctgactcctaactattgcccccaaagtcccacaagtctcttggcttgccacctgattgaagttagcagcaagacaacacaagattatcgactttgcgactatttccataacaccagattacaatgagtgattatacctgagagcctgatccaatgaaaggatctgacccttggagatgatcaacaatatcagtagtgaatgtttgtttaggtgtgggctgatgatc

SEQ ID NO: 16460 - DNA, 854 bp, Arabidopsis thaliana landsberg
aaataatttaatttttacaaatagtttaaaattttgacataaaaaaaataaaaaatagaacacattttacttttatgttgacgggagatccaaacataaaatatttgaggagatccaaaccataaaaattattttgaggtttacaagattagtaaataagtttgagagtttatagtaacttgtttcttaattttttaacgtcaataagtaaaactatttcgaatgacgggacaaaaaaaactatttaacgtcaaaatgtaaaaatatatcatttttaacgtcaaaaaataaaactatatcatttttaatgtcaaaagtaaaatattttgattgacgggacacacaaatactacttcaagtcaaaaactaaaaactatttcgttaaaaaaagatttgttttacttttctgttagcttttatatcaaccggagaaactgttctgttatgttttagggctacataaacaaaaaactcaatttggaggtttaaagtattagtaaaattagtttggaggtttatagtgctagtgaaaatatgttaaggttaaaaatgctacttattgctactttgaaagttaaaaaaagtgattttccctttttacaactgatgattaatctttaattaaacatcagttattattgattcaaattttcaatcatttaatatatatatatatatatatatatatatatatatatattatgaaagtgatataatttaatgatgtgattatactgacatcaattattgcaactaacgttaatttctaattggtggaccgattataaataactaattttaaattagtatcattctttttttttttatgaaatctaatcgatgcaattgaccct

SEQ ID NO: 16461 - DNA, 1387 bp, Arabidopsis thaliana landsberg
gccggagcataagttctcagacgagggaccgatacaccaccaacagcaacaaggtctttaacaagcttgaaagcatagtctccatcacccttggcagcagctagtcgtgcaactgcagtgacggatgattcattaggacttatcccagaactaaccatacggtcaaaaatttgaaagccacggtcaatggcaacggtttgaagagatgggtcactaatgaacgcggagcagaggtaaagaagggattggaagtgttgctggttgaggcgaatgtcactggaagtgatagctgcatcataaagagccaatgcagctgagagatcctttctcttggaacatgaatgaagattgataaggagactcttttctggattacggtttcctttcttcttcttgttgggatttttagggctttcgtcgtcgtggcgagagcggcggttatcagtaccagccatggaacagtaatatatgtgcaaattaacagtgtggtttctcaaagttacaagctttgcattggcgaaagttgatgatgaaacccttaccctgacattaagtgagcagaaagaaaccatttaacaacaacattcagaaatatcaatcttttcacagagattgaaaccaggaaattgatttagatcagtgactaaactcagtatctaaaggggataaagaacaagtatatacacaagattttcatcagaacatagcgtttaaggaacatgcatgaatcctaaaaactctggacccgattcttaggctgtgtaaactaagctagtgactaattccgtagaagagctgagtaatctaggttaaatgattcgacattgaaagataacaactagagtttatcaatctctgtactttaagatcgacaataacttaagaaaaggcggaaacttttaggtaaagaaacgaacccagaaggaatgcgaaagcaataatggtagaagaagctaacctgcgagggatgagtaagcgaatttgagagagacaaggcgggacggcgcagagcaatgaagaaggcaatgaaggttttttcaatttcattgcttaattcattttgctgttgttccaaaaaaaaatagaaataatttttaacacaaataaaaataaataaactaattttttattccaaaaatcaattttaaatttatagagataattaattgcctttttaataataaactattcccatttttaaagaatttacattcaataaatttacacgattcattatagtagtttttcattgttaattagtttacctaattacatgtagtgtagtgtatgatatgtctaatacatgtgcgtgaaccacctggaataatggatagtccacatgttatgctcatataatatccccacatatgcctagttgcctgccgcc

SEQ ID NO: 16462 - DNA, 591 bp, Arabidopsis thaliana landsberg
ttattttgaagtttgaaaagtgagagagctttggtatgttttgacgaaaaagtaatcgaatccaagttttgagcacaccatctttactttggtgtgcataatgataaattttacagcccaccagatgaccattgtgattgttaaatgaaatgttcaaactctactttgcactcgtgattggttaagaggttttgcaaaatatgaaggtaacactttatgaacaatcacaatggttatctggtggtctgccacactagtgtaaagacagtgtgctcgaaacttggattcatttatttactttctagaaacataccaaagttctttcactttcagaccgtcatactaaccgtaagggagtcaaactgctccaattgtccccaagcacattctctcatcgaaagatcacaacattgttcctatatctatatagtttaaaaaccacatatgccaattcaacgactatcataatctcaagaatctcaaacctgagaaaatattcgttgaagtttatgtgttcaacccagctatttcattagtcattctctcaaggttctggtgctaaatgtcatgttgtacaacaaaaccccttgc

SEQ ID NO: 16463 - DNA, 1888 bp, Arabidopsis thaliana landsberg
  unsure (1)..(1888): unsure at all n locations
tgcacatttctaattatgtatccttcgtgtgagcagacaccctgactccagatccggctaggtcaagaactcgcatcatacaacccgggatgtctggaattcagaaattccaagtttgagccaatctccgggatgagatgtaagggtatggggtcccttcagatcttnnnnnnnnnnnnnnnnnnnnnnnnnnnnnnnnccgaagcttcctcctctcgagtgtgaatttttggtgtcgaactgtgagcttcatgacgaacgccatcgtgagctcttggtcccgttctggaaggcctttgatcaaagcacatggagtttggatttgagatcggaagaaacctggagatggagagggtcctctttccggctcatttgggatatctccatccattataccgacaatagaaaaatttggcatagattccgagcaccaaaggttgaaatccatatctgcaaaagagggaaagatggaaaataagacaaggttagagcaataatttataggagcaacgtatccctcaaaatccatttttttccatcctagaatggagcgattcgaaggagaatttatgttgtccagctaatcatgcctttaagtttgtaatcgagaatataccaaattaaaaggtagtaaaagttttccataaataaaaatgggttgaagcccgttacgagttcaaccgaagtaaaagcgagttaaaataaaaaacattcctttggggacatttttggaagaggctcaggaacagactccttcatggctggttcagcattcgaagtggatgtttcgttcttatcatccaacttgggctgggttttgacgtgtctccaggagatgctgactcatcctacatcatcatattcgctgtgagaagggatcacttcacccggagcagacgcgggtcatgaacttgactacaactgtggaggtacatccaaagcatggtcgggatcttggcaacagaatcgaagttcctccactcccattgaaagggatcgctttcctgagccctcacattcctttccacacaagcgatgcgcgcctcaagcatctgcctcttaagacccgagcgctgcctctcatcgcacatgcggtggtgtttatcgataacctaacatggaaaacatgtgaaaatagggagagagtaaaagagtcttcaaagagagcggttaccgaccttatccacgaaatcttacgcctctttcttatccttcggaggaaagtggaaggcaacatgtgggaacaaaataccggacaattcaaaaccgtcgcaggacaggaacaatgggctgaccagctcgagagggcaaattgtggacgcgccttctctctctatctttgaagtatcatagagggaaatttcagaaataatgtttggagggagttaagttgactagagtttcttatttataggggcttagggttaccttggaacaagaagctcaataatggtggcgtgtcggaatggattaaaccatttttagaaatcgagaaagtaaaattattgccttaatggcgtgtagtttttactattttcgaaaaacaaaaaagaaaaagcaatcgtcacattaaagataatggcccattaatgtcgaataaaacaatcaaggtctaggcccttacatttaccgagttgactaagtggggaactcgtgttaagtcgagctcatttctcgcattttatgaggaaggtctgatcaacctaaattctcaaagcctaaccacaaggtcaatttctaagagtgtggactttgcaaacccgcataacaactgagaaaccctctatggaataaaaattgaaaggtttaaaagcctcctcccgcaaacagcttgttcaagaaattgagcctccataggcaaaaactaacttttcaagaaatttaaaag

SEQ ID NO: 16464 - DNA, 1216 bp, Arabidopsis thaliana landsberg
  unsure (1)..(1216): unsure at all n locations
gtgataaatctgacaaatttagtagtataaggggaaagtttccactaaactcgttgttttcaacagctaagctatataactggttaaaactgccaaaaaaagatgggatttcaccaaccaggttgttttgtgagagatcgagatatgtgagatgtgaaagattttcaaatgaggatgggatttcaccagcaaggtcgttttcacagagggcaatatcggtgagatgagaaatannnnnnnnnnnnnnnnnnnnnnnnnnnncaaggttgttagcaccaagtattaaggagagaatcatatctttgattattccaatcatacctttgatttctcatatcattcgattactacaatcatggatttatttatgtatattacatattctcatttatgtctattgtaataccctagctagcatctcctttgtatataagttctcactttgtattaataaagagatatcacttctgcaaacgtttatatggtatcagagcaccaaatccagcacaaaacgtcatttattgcaggtggttgttcacaacaaaatatttagcgtcagggattctagatcgctacaaagctagacttgttgcaaaggggttcacacaacaatatggagtcgatttcaaagaaactttcagtcctgtagtaaaatcaacaaccattcgcacagtcttggaggttgtcgttaccaagtcatggccaattaagcagctcgatgtgaacaatgcctttctttaaggagaactcactgagacagtttacatgaaacaaccccctggatttgttgatagagaccgaccgcaacatgtatgtcgtctccgtaaaccaatttatggtctcaagcaggcgcctcgctcatggtatctctctctcaaacagtatctccttcagattgggtttcataattctcttgctgatgcttcactattcgttaactcacatggttccaaagttacttacatcttggtctacgtggatgacattattgtcaccgggaatgatccctcttatgttgcaaagttctacattcctttgcagctaggttctcgattaagaatccagtggatcttcatactttctcggtatagaagcccaaaggtcagataagggacttcacttgatgcagcgtcgttacatacttgatcttcttgctcgcnncnncatggcagatgcaaanccggcaatactcctttccggcgtcaccaaaactcaa

SEQ ID NO: 16465 - DNA, 2392 bp, Arabidopsis thaliana landsberg
tttttggtaatggctggatccaccaacctgaagatgagaaggccctatgtgaatatctaaaaccctatgtagtctacaaatgtacccattatgaagtttcatataaatttctaactgaccaaatttcaaaagtcagaaacagcaactgatcaaaccatatttcaatcttcacattatgctatagaacctaaggaagattttcatacattctcatatctaatggcagagtaagcatcggaattcaaaggaattatttcataatgatactgatctaacattccataccgaggaagaatcggtctatcaaggtccatcttcaaaggaagagcaggctccatatgcatgcgtactaactttcttcttcatttcttcttgggatttcttaccctgaaataaaatccctaatttcagaaatgaagaaaccccgtaaaaccaaaactacttctcaaaatttatgataaaacagaaatttctggcaagggaaattcaatcaatgaaattgacgatgggaactatgccattgaaccatctctgcaagttcataattcaagtactaaacctggtactacgtgtatgtttgtccagccacacacatgttcataattccactaggaactacaaaaaacaacgatagtaattcaagttcaacacaaaaaagaacgaactgttccaatgtgcaatgaactacaccatgggaacatactgactgcattgagaagtaatacttgaacactgaaatatctttcatttgatgagattacagctgctacactctctcatatactcacattagtttggatatcatcttctgaaaccgtcattgagcctgcaaaacaagagttcccatgtgaaatggagtgcgatgcagctccacctgttcaaagacagcttctggtacatacatgattcgcatcagaaccattttcttctataggagaaattaacaatttgcaagtttcctaatgcacgaaacaaagataaaagtttccaaatttgattaacataattgagaatgtctcgtttataagatatgaacaatattggatacagaagataaaaaaccaaatcacaactcaaaatgttcactaaaacttcaatgctggttcacagaaagctaatcaggcatactcatgaacataaggattgtattgactattgagaagtaataacttattaaaaaaggcttactcacttcaaggatagtttaagaaagcatttccaaaaagcttttgtccaatctccccattcaacatattagtgaccaagccaaaggttgaagcatctccagcaaacctgcaactcctcaattctttgatgagttcagctgatgctgctttgtcaccattctctaagatggcatcttatagcaaccgctatctggaagagtcccatcttctttcatatctctaaacaaggcatctgcttctttgtttaaacctttcctacaaaatcctgagatcattgttgtgtaggttacaacattaggcttcactcctttaaggctgaggctacaaaatagatcccacccatcttccaccttccctgccttgcacatcccttcaatcataatattatatgtgtaaatatcaggttccattgtactcctttgcagatactcgaatacaaccattgctttcgctagcttcccatttttacaaagtccatctaacagaatgctgtatgttatgatatcgggaggcacaccatcagataccatctttttgaatattttttgagccatatcacaatctccagcttgaaataacccttggataagagtgttgtaagtgactgtgttgccaaacaatcctctttgagacatctcgcggaagagttccataccttcttctactctcttagccttacaaaatccctttataagagtattgtaagtcactacgtttgggaaacagtccttgctaatcatcaactcaaacatgtgcttggcctcgtctaaacgatcgtgcatacaaaacccattgatcagtgaactataagtgaaaatatcaggatctatagaccttttgatcatctcgtcgtacaatttctcagcctctacaagcttccccttcttcacaaatgcatcaatcaatgcgctgaaagtgactacatttggattgattttcctctcaatcatatcactgagtagtcgagaagcatcactccatcttccgtaattacaaaggcaacttatgagggagctgtaggtgataacatttggtctaactcctttgttttccatttcagtgaacaagttgagtgcatcatcctcatgtctatatttgcagagactatctatgactgtgctgtagatcacaacattggcctctattttcgcagcttccatcttgttagcagatttaaagccaaatcagttcacctctcttacata

SEQ ID NO: 16466 - DNA, 1736 bp, Arabidopsis thaliana landsberg
tcgaaaacacctcgggtctctgcaagtaaccttctgacccgaccttaggaacgcctcgggtgctctcaggaaaccaccccgagacgaacctcagaagcacttcgggtaaacgatttagctcgcgcaaaacgagccgtctagctacaggccgacaagaggcacctgactcggaagaaacttcgtaccaaggccaaagcaccttaaacccgaggaaaagactcagacccgacgcaagatcaagataccatttccgaaaaacccggaaatgatattgggaaatctttaaggatattatccatagggagaagatcccgcgaaaatctacagaagataaagataaatcaccaccgcctctaagataacaatgaatctcccaagaatatcgcgaggggcggttcaccaaaaccctatataaagtgcctcaagggaccaataaaggggacacgcacaaaaacgctctcaacttcaggctatcaaaaacgctctgattttgaaggcaaaacacttattttccatatttctaaacacttgtacgatcgaatcctcattatttcaataatataaccaagaacaccgtccgcggtaatcaacaattctaatgttctttgagaatctcacatagatccgttctttgaaggaacccttagtacaatttttcttgtgcgagttttggctctcacaatttggcgctaaaaggaggggaaattgagatgaaaggataaattttttttattgtttgtcaaggtatttggatgattttttctacttgtatttataacgtagattatttatagtatggttacataatcatttgaatttctaaataattaattagtatgatgattgacaagtattttcattgagatcagacctcttttttttgctttagcttttctcccaaaatgttttttgtaatttttacatgcaaatctgattgattagaaggtatatgtcaatataaactgacaaagacaagctaaaggaaaaacaaaagcgacatgtcttttcccagacacgtttatcaaagcttctcctccgattttcttttatgacgccggtgaagctccgtcttgccggcgtcggaacatctctccttcttctcagatgcaccacacaaatctctcttcttctttcttctggctaactcttcaatcatccctaaaatccaatttttcgatgggattcgaacagatctgtgatagaggaccaaggtggtctccaaagaccttcttccaaacttgctctctcccgatttcactgtcgaattcgaagaagaaatatcactctcttcccgtaggtgttttttctcacacatcagaaccctccttccctgctcttcaaagcctttatagatcttgatcttctcttgaaagatccatgcaccagttgttgcccagtgcttcacttattggattggcttctccgacgatgttggcggcggtgtacgatagagttcctctttctagaggttttctagggtttctccttttgggcaagcctcctttgggcctaactgttatcttcggcccatccctggaattggcagcctactttctccactagtttggcccaggtctgttactcttaaatctccaattagcccattagacttgatatcccgacttagcgccttaattggttatggactctgcttaagctttttgttgattacaatggttttggcgtgtaattttatctctagaacctaggccaattggattcctcaagtgataatc

SEQ ID NO: 16467 - DNA, 1277 bp, Arabidopsis thaliana landsberg
aaaaacacttgcaagaaaattcaaatgtggtgagtaccaaagttactcccaacagtatgatactgtaaaatgaaacatatgatatgatatatgggatcaagtctcagagaaggtagacaaggacgctagaagcttcttaattgaagaagttatgttctgaactttttcttttagaattagaattttattattttccttattagttttaacttacgtcggctgcaagagatctatataatgatctccaaatcttaataataatcagcttccaaacattagtcttcttctcaagagaggctaggtttaaaggaagtaaacgcaacataccagctgtggcaagactagcagctatagctcgaagacgatcaggtctctctggatgtggttgtgccttcacttcaaactttttaagcatgccatcagcacatattaaatagaaaaacttgcacgaagaaaagctttggagatgataacgtagagatgtcaatagatactagaggtttctcaggaaaacataacacataacagtaacaggatcatacttctgagtgtagcaacattctctcgtcgaacccaacagctgtcgagctggttgcagatgagcttcctaatatcaagttaaaagaaaagtgaacatgcttacagttacttaaatagcatggaactgagactaacaatatttataaagatattttcagaggaagcaagggaagtaattcctacctccatatttctcctcgacttcaatgagaccagtgtcttttaaaaagggagacgctaaatatccatgcctcaaaatgccagattccttgtgctcaccgcatatctacatcaaggaatcaacattactaatacataaccaatgtccaatgcgcattgctcagacgtacgtttgtcactttgaaatcataaaaagtagtagccaagcaagaaaaagtaaataaaaaacgtacataacagtggaccatatcaccagggttcgacatagtgcaattgacacaacaccattttacaaactccataggcgcctgcacaggttcccaatcacaatcatcctcctcatcatcatcatcattgagtaatgcatcagcaccgtaaatatcttcaaacgtcatttctctagaaaccctaactcttttctgcataagacacaacaatgaccaatatcaccaaaagctgaaccaactcaatctctgacaattccttgaaaggaagccatggtttttagcttacctgtgaaacttcaggagctacatttatatctccattgctcactc

SEQ ID NO: 16468 - DNA, 1169 bp, Arabidopsis thaliana landsberg
atctattacactcagaaattgacgcgactgatagataattccaattccagtcaaacaaaaccttcacattctcaattattcttccgattttggtttctctcttccaatcatccttcaagctcatctttttcttctacccaataacgaaagtctcctcctttactaatgggttgcttcagcagtaaacaccggaaaactcaaaacgacggcggagaaaaatcaatcccgatcaatccagttcaaacccatgtagtccccgagcatcgtaaacctcaaaccccaacaccaaaacccatgactcaaccaatccatcagcagatttcaacaccgtcttcaaatccagtctcagttcgagatccagatacgattttaggtaaaccattcgaagacatcaggaaattttacagcttggggaaagaattaggtcgaggtcaatttgggattacgtatatgtgtaaagagattggtactggtaacacttatgcttgcaaatcgattcttaagaggaagctaattagtaagcaagataaagaagatgtgaagagagagattcagataatgcagtatttgtctggacaacctaacattgttgagatcaaaggtgcttatgaagatagacaatctatacatttggttatggagttgtgtgctggtggtgagttgtttgataggattatagctcaaggtcattactctgagagagctgctgctggtatcattaggtctattgtcaatgttgttcagatttgtcattttatgggtgtggttcatcgagatctcaagcctgagaatttcttgctttcgagtaaagaggagaatgctatgcttaaagctactgatttcggtttgtccgtcttcatcgaagaaggttatctagagactcaatatagccttttttggtctttggctatggattgttagtgttcagaatctataagcttgtatagaatctttagtggcaaagattaaaagtttggcagttcattgcattgtgatctctagcttgaatacttcttgttttccagaaacagtgagagtgtcatgaatgaaacaagcgatattgagcatggtctagtgattgagcatggatcatattatttggtatgtaagaccttgcaactgtatatttgcgctggacatgagatttattgttgccatatgttgcaatg

SEQ ID NO: 16469 - DNA, 755 bp, Arabidopsis thaliana landsberg
aggaaaatactttttagtgtaaaaataaatgctagaacttgtttaatttatataaaatgcatacttggtccaaattgacccatttcagtctctataattttgtaacaatgttgtttatcatctattgcctctgtttttacatgaaaataataataaaatttgatctcttaaccaatcccatatcaagtacaataaaatctttagaaattcataacttaaaatctatgattacgatttgatccgttccagttgtgttagtctcgtatgaatatttactatacaataacaacatttattataccatgtctcattctttaataattagacctttatttaacttatgttgattagtttgttaatctgcttattaatgcaatagaagatgatttatggtaaatttataacttaaatataattatttatagaatgacctctcatatgatttatattaaccaaattataatatagtttaatattttaatcaaacggatcttttataacattttaactccttaatcatgactccgatgttagtagttctcgatccacgatctcgtagcttcgcgtagatcattattattcaatttgttctcatgtttggtgtgatgttgatttttatctataccatgtttgtttgtattgctacgactatcagcgagatttcgagtcacctgaagattaccctagtaactggaattcaagtgccaggcaagttgtgcccttcatccacctttgttacccaataatattatttc

SEQ ID NO: 16470 - DNA, 1719 bp, Arabidopsis thaliana landsberg
gatcataactataacaaacacagctccagaagctcatctccctggttggatttgagagtgttctatgttcggataatcaatttcatggtggaagattcaactcctgaggtcctcactatcaatcacattcctctggatccagatacgcttttggagattaacggtgttagaatgggaatgtactcagaaggaggttcttcacagcttaggagagatcgggttgataagaaatctgaagaagctacttatgtcagcacagacaatatcaggttaactggtagtgtgaagtttgaggtttatgacaaaaatgagctggttttgtctggaactcttgagatgtctggtagtaatggtttcactggggaatctaagcatagcgtgaagcggtggaacatgaattgtgaagctgagatcactgcagggtctggtttcttgaaggagaaacatattggtggttcggagttatcttctccattgccaactattgaagtctatgtcactggctgcttttctggaactcctatcatcctaactaagactctacagcttggtttcagaaagaagcacggtagagtgactgcattagattcgattcccgagtatgaaactgatgagcctcataaaggaaactcatctgagcttgattatcaggtaacttttaattgcttggtacttcattttttcaagattattataatgcttccgaatagttttatattgattgaatgctttgaatgcttttcctaagatatgagtcttcatggtcactattggctgtatgagcattaagtttttcatggttttgagatttcatagtttgagtctttgagacatgtttcttggtagttggtactctaaggaagataattcctttagatattgaagtggaccaacttcgttataaatgatcatgtgaggtatggggccagccacattttacaagtcaatagatagctctcgccctctctctctctatctctcactctcactctcacacactctctctctcccatttgcctcttgtcttgtgatcttaatatctgaattcttatccttttgcctgctacagtcagttctaaggtgacttattggttggaatatcgcggttttcacatgtaatgctacagtatattatctttaatttatgcatagactgatttgggaaacgttgccctgtttaagagtcaatgttaagaatagcttatgcttgaagttttaattggaggctcttgcagttgacagtgtcaatacctattggagatagatcttcatactcaccgaagattatttaactatagtgcaatgtctatatcttcgaccattagcctctattctacatttgaaagagtttataagattggaacaaaaagaccattagcgtaattgcatgacgattgtattctttctctgactatcgctatgaatgtctcttaattatttttctttgttaagtatgggagttaatttctgtgcaggttactgaatatggaagttataaacaagaatatgaaggagaacacagcgacatgtactggaatagagagtacgcagatggtgaagatggtgagatgtcgtggttcaacgctggtgtgagggttggtgtgggaattggtcttggtgtctgtgtaggtcttggcattggggttggccttctggtgcgtacctatcaatcgaccaccagaaacttcagaagtaggattatctaccctcattcccctt

SEQ ID NO: 16471 - DNA, 2334 bp, Arabidopsis thaliana landsberg
acttccctagtgatatacatgtacattctagaatatcaacaaagctttacacagtttctctaaaaatggaagagcgatcaaactaaaccatcgaagaaatgattttatgacccaaaacctatagtaactgccctctagaaatttcaaatggcagatagttttatttccatctctaatgttgtcagcatactttcaaaataggtttcagaaatgtgtatcttccgaaggaaatcagtatatataagaaaatcactcacaattgaatcttctaagtacattattacatctatcgaataacgaaccgtatgcatgcgaataaaagccttttgcaggaggtgaacggctatgttctacggagatcttcattcccttgtgaatgtgaatctttccaccttcttcttcttcttcatggacttgtaacacatcaaaaattgattataaaacattttttaaaattacacattacactgtttggacttatgcatgattcatgaatcaaagtataaacttactaattttctgatttctaaaaagtaaagtgatggtcgaattggaagatgcgatgcataaaagtagaagcgtagctataagaatgaacttgaaactcattttgtctttgcccttttctgttatgtctatatgtgtaaaagagaatacaaagttcttgttaaaagttgttttcttagagggggtgtattcaatctagtatttaagtgatttgtgtaaaatttacaaatcttatgttattcaattatggattttaaaaactctaatgaaatccaatactggaattgaactaatgatttaaaaatctactttaaattctattgtttaaaacaatttgtaaatttgattcttattaattttaaaggatttgataagacttttttagttaaaaatatagaaatttaagtctcatggttttagatgaaatttgaaaagattttacaataaatcacatcaaaatcatttacaaattaataaacaaatcatttattttaaaattaataaaaaaatatattatcacgaaatggaacgattgtcatcccacctccaggattacatgaattcaagacagcgatatgaaaaatgaaaacagcaccaaaaattcaacacttcatgtggagaatcctatccaatgcgttagcggcaggcactgtacttgcaagacgaaatatcaccaccaatactcaatgtaaacgttgtggcagagcagaagaatcgatcgaccacttgttctttgattgtgactacgttcaagaaatctggaggcgtaacgctggactacagagaagtaacttcgacccctctgcaccgttcacggaaaaattcagaaccatcattgattgttacaacaaccattacatcttagagtttgaccggcaatcacctttatggctactttggcgaatatggaagagcagaaaccttttagtttaccaacataaagatagcaattggcaggaggatatcaccaaagcagagcaagaggcggaagaatgggtcgattgttggtcaaatatttcgaatgatagcaacacaggagcaacgaggacgcgatcaacactatctcagtggcaaaaaccaaagcacggctatatcaagtgcaactatgattgtaagttcaccgccacggacaatccatctcacgcagcatggatcatacgagattccaatggtacctatctatcagcaggacacagtgtcgaacactgatgcaccacaactttggaagctgagcttcaagcgctattaattacaatgcaacaagcttggctaaatgggcatcgttacgttatcttcgaaggtgacaattctacagccacacaactcatcaacggcgaaaaacgcattttcaaagttcacaattgggttcgtgagatcaatacttggaaacgaaaattcatggatgccgaattcagatggaccagaagacataacaacaaagcggccgaccgaattgctagagctacttttaataactatgctctatttgaatctttcttctatgttccacaattcattgtaaacatcctccatgaggatcactctgtttcttaatcaataaaaccagccgttaaaaaaaaaaaaaagcttaccttcactgtttatgcacaacatgtaagtcacaatgtcaaaagtttggcttaaacaatagcaatcaatgttatgcgttaccttatgcctaagcgtcagattctctcccttcattctggatgcaatatgggaatagatggagatgttgccctcttctttggacatttaggtattgcaactttttaaaccgagcacagagaagattacgcttgcgcaaccatcggcgaagagaaagag

SEQ ID NO: 16472 - DNA, 976 bp, Arabidopsis thaliana landsberg
actgcatatatgcgaacacgataacattattattaaaaagtaacttaatatttagcatgaagagcaaaaaaattgactggggagggaacaatcatgtaaaaaatacatgcatcaaaatagttagcaggtaacatattatcaggttaacacgataacaaaaatctcggtaatatttattaggttaacatgataacaaaatatttatatcaataagtttataattatatcatgctaagtcattttgtatcgtgataagttataagttatgtgatatatttatatttatcgttttaattcatttattatatcatataaaaaattaacgaattgttacaacgtgaaaaatatgaattttatgcaataagattattataattatgcagatttgatttcaaagattatataattatgggaagatgataacattattattaaaaggtaacaaaatatttaacatcaaaaacaaataaggtataggggtataagaatattttcttgatagagagaaggttcaacagtagttttttctaacacttaattttgtaattttctattaattttgtaattttctatgtatacagagtgcaatttcccttctttctttcttttttgttgtcgaagagttatctactctatgtgaatattatcaagttggcaatagtttgtgaaataatagtccattttccctcgtgtaatacattttataacaataaacatcattaacaaacgaaaagcatgtgaaacataaaaaaataagtattatcatatattaaactttcacgtgattgtaagtaacaaaaaagtgaagaataatgcttaaggtgaaatagactcacaagtcacaactttcaccatacgacgaagcaattagagcagacaattcatatcagttttctttgaacttcatagccttattattaatctatatctagccgtgcgtatttatatttataaaaaattaattataattttagag

SEQ ID NO: 16473 - DNA, 871 bp, Arabidopsis thaliana landsberg
atttgcaccagaagatggagacgatgagtttgcggatctgtatgttgtgaaatggagctttttgatggttcctccattaactatcatgatggtgaatatgattgcaattgcggtggggctagcgaggactctgtacagtccgtttccacagtggagtaagcttgttggaggagtgttcttcagcttttgggtgctttgtcatctgtatccgtttgctaaaggattgatgggaagaagaggcagagttccgaccatagtgtttgtgtggtcaggtttgttgtcgattattgtgtcgttgctttgggtttatattaaccctccttcagggaaacaggactatatgcagtttcaattcccttgattcttaagagttttttttctttcgtggtacaaggcatgaaagttcttctttctaggcttcagccttcatgtttgtaatcagatattataattacgatttttcaaagtaaagtctcaatttcttacttttttgttaattaatggttcaagtcttgacgaggatagaattatttacacagtcggtatatcttcggttaagtcctcatgggtggtcaaaagtcaaaacaaacaactaatgggccactattatacaagcaagcaacttccgtttagtcctcatatgatctcattattcaaaccacaacactgtcttctttgatgattagtatataagtcttgcatcttatatatttagagttatatgtgtttggttcggttgatgtgtgtaactgtgtctatgtaatcacacaagtatgaagtatgtatgctgtctggttagtcggagacggattaagaaaacatgcatcatcatacacatgacattggagaattataaggcaacataaaatct

SEQ ID NO: 16474 - DNA, 494 bp, Arabidopsis thaliana landsberg
cccgctgttatctgcattgtacaccaaacgatcgattttgttaaatagccatactctacggcattgtacctggaaaaatatgataaaacaacaagagatagctgtgcaattttcatctaattatgtcaaaaggcttacccgcatccgtttattgcttctcgcagtctctacaacatcacatttttctcgagactgttggttgtactctgtttcagagcttccatcactatcatctggatatggagacacattcaagagtcgtacaccacattcttttatcctcttggagcaagaaaatttaaactccacatcgtttaaagtcaatttagatggaagatcttcaggctggaacttgaaggaacagaaaaacagatgatccgtattacacaaccgcaggtctgcatctttaaaaaatgatttgcaatacagtgtcccattgaagccaacatttacctcacaatatggaccccaactgtcgccctcagttagaaggt

SEQ ID NO: 16475 - DNA, 1745 bp, Arabidopsis thaliana landsberg
tgtctgatttcgcggtgaaacgaaaaaatcagaacacacacaactcgtgtttagggtttaccaaaatctctccaactcgctttagggttcattcagatgttttagggttcagcaatttcagaacggatccatctccatcgtaaccaaatggataagacgtggatttcgctgccacggtatacactaaattctttctgagcttattaaccaactgaaagaaatctagctaagttcttttcaaatttacaatgtaggaatagtttcgagtacttataaggagcaacaaacttcgccaattcatcagcaagaagattgggtaatctgtctgaaatgctatgcccatgtatagattgtcgcaatttatgccatcagtctatcgatgaaattgttgagcatctagtgataaggggtatggataagaagtataagacttcttgttggagtattcatggtgaaaaaagagcatctacagaagacagtggtcctcaatatgaaacagaggcatttgacttgtttaagacagtattctctatgggtgaaggtgaaccaaatcagacgaatgatgatcagggaaacgacgatgaagcagtagaggaaactgagtttaggcagaagttaagagaagctgaaactccattgtactctgattgtatcaaatacacaaaggtttcagcaattatgggactttacagattcaaggttaaaagtggtgtgtcggagacctactttgatcagctgttggatttaattcaagacatgctatctaaagacaatgtacttccgaagagtttagctgcaatcaaaagattcctgaagatatttggtttcggatatgaaaatattcatgcttgcaagaataattgcatactatataggaaggagtttgagaagttagatagctgtccaagatgcaaagttttaagatgggaaatggataagcacagtaatgagataaaggttgggattccagccaaggtccttagatatttccaatcaaggacagatttaggagaatgtttagatcaaaaaagatggctgaagatttacgttggcactatacaaagggcactgaagatggtacaatgagacaccccgttgattctatatcttgggcacaagtgaatgcataatgtccagactatgctgttgaaccacggaatcttcgacttggaatttcaacagatgggatgaaccctttctccatgcaaaacaccaatcacagcacatggccagttttgttggcgaactataacacagctccgtctatgtgtatgaaggctgacaatataatgttgtctttgctgaatccctggtccaacaactcctggtaataacatagatgtttacttggcaccactgatagacgatttaaaagatttgtgggctgagggtattgaagtatatgactcatttgcgaaggagaatttcacacttagagccatgctgctatggagtatcagtgactatccagccctaggaacattgtctagatgtaaagtgaaggggaaacaagcttgcaatgtatgtggaaaagatacaccttccagatggcttaagtttagccgtaagtttgtctatatggggaatagaaagagactaccgcctggccatcgttacagatatagaaaagcttggtttgataacactgttgaggaagggaatgccaataggagccccactagcgctgaaagatatgaggcgctacaagctcttagaaatgattttggacaacctatgaaactagg

SEQ ID NO: 16476 - DNA, 1673 bp, Arabidopsis thaliana landsberg
ccatgaattttttgataaaactggaatcaaggttcgtttctcaagccaacatacctcccaaccaaatgggaaattctaaaaggatgattagaactattaacaatgttattcgagcgctcctatttcaagctcgtctatctccttgttattgggttgaggcactaaatgttgttgttcatatcctaaaatccttccctccacagctatccaaaatcaaattctccatagcctcctctttcataaaaatctaacctatgatcaccttcgagtttttgggtgcttatgttttccaagcttgaatcattcaaatctgtcaaaactatcacagaggacaacgccttgtctgttccttgggtatccatatctcaacaaaagggtatcgatgccttgatttaaaaacaaacaaaattattatttcttgacacgtttactttgatgaggatacgttctccgcagctaatcaaaatttatctcttgaagctaatgagtggattggttataaaggaatacaagtagagaaaaatgtggtgatgtgtttattagagaactctccacagctaaagacaatggtcattagatccttgaaattgaacaatgatactgagaaactcaagatgttgcaagagttgtcgtctatgcagaggacttcaaccaaatgtcggctttcgtttacctaaagttccccggggaattatatattgaaacagacgatcgattacatttttggagcatcattattagttatgttgtcttgataactttacaagttttattagttatatatagtgttccactgtatataatttcgataaaatttgatcaccaatcgtgtcagatagtaaaggaaaactcagctcgtgagtcttgttagagagtagatcagtgtctgatacagagccaactatactctggcttagccttatctagctttctctcaattttaggacaatgtcaaatataatgcctacaaatctaaaaaagaatcaatttagctttaaattaagtaaacatgaattatgtgtttaatatattaaatagatcttcccaaacaaaaaagttatgtttcaaaaaaaaagaacgaaaaaccagtagtaattgggtgttgttgtactcccaattaccaacggcgtcgtatgatcaagacgttatttttcctttttgttttcgtttttgtttttcttcgtttcttttttgcttctgattaggatttagggattcccttctaattagaatttagggttgctctttggctaaaaaaagacgacgaagttagaggttaaacctttttcattgattctcaatttttctttagtatatatatatattctcctaagaggcgaggatggtttgatttggaacaagtgcatcgtcatcatcgctaggtttttttttgccttcttgcttgggaaattgatacggaagatgcttttaaccctttttagttttactcttttatcggcaacaaaatccaccgaggcaaacttttgggattttgaagggttcgtttacaatggataggatcagtttgttgctagaatgatgtagtctttaagatattgtcattggttccaaccagagatgttgtatccactaatattttgcgaagcgaaggcgttatctctggaaggcaagtgccaaagcttgagtttcttgatacatcttctgacactgag

SEQ ID NO: 16477 - DNA, 378 bp, Arabidopsis thaliana landsberg
tggttcccttttttttatgttcattaagtttgaaagaaaatcattattttttgttttgtcatcttttttattaatattataaaataaaaatatattttccgatcttacaaaaccggcagaaaacaaagatatcttcgaaaacatagtttaaaagagagaatcaaagctccaaaaggaagagaaaacacatattaagatataaactaaactatggaaacagaggcttaagaagaaaagctcataaacactaaactatataaaatcaagaactcattaaacaaacaaaaaatgttgtaaacaaactagttgcaggattagaattttcatactataagccaacaatctcaaaacttgagttgataaatttagacaaccatt

SEQ ID NO: 16478 - DNA, 508 bp, Arabidopsis thaliana landsberg
tcgtcgcaagttagtattccggtgattacgaggcaaaagacaatcgcatggaagcttacttggatctgcttcgggagctcgcagaaaagtttgagaagttcgaactgatcaaagtgtctcgtgcagaaaacttagctgctgatgccttagccgcgttggcttctacacccgaaataactgtcacaaggataatctctgttgaaacaatagctcagcccaatatccgaattgaggaaataaactttgttactcgagccatgcgtaggcaactcgaggtgcaagcaaacaatcccgagctgcaacaacttgacgatgaagacgagattccagaagttgtcccgcttgcagctgacgaagattcacctagtctcgatacctcacgactggggggcagattggagagaaccaatccggaactatatcttcaacggagtacttccaccgataaatgggaggctcggaagttgaaggccacttgtgctcgtttctgcttagcagatgacattct

SEQ ID NO: 16479 - DNA, 1006 bp, Arabidopsis thaliana landsberg
  unsure (1)..(1006): unsure at all n locations
atggtatgtcggtctcagggttgtgaagtccttcgtgggtcatctcaatgctatgtataagatagttggcttggttttggcagacgagcatgtaagctaattgaattattgtgtattctttgtctagatcttttattttcagaaccgtattgaacaattgttgcatgtatacttcctagggtgtatccgactactataatgaatttattgatgttggcgattggataaccatcatgcgttttggagtttatccgaactcgaattttgttagggtaacatctcataagttcaagatttgtttcttcaaagacaccgttgttaggaagacaactgctgtggttgcgaatcctcattacgctttgacatatttctctttgannnnnnnnnnnnnnnnnnnnacgtcggttctaatcggtaagaccctttttattttgtgttaacttatgttcttcgaaaatcaactaatcgatataaataaatttcaatcatatttagtgatgtttttaaaaaaaaactgtattctagactttgttggggcgattcatgatgtaggagaggtggagaatattaggcgtacacaaaatgttgtcaatgatttaaggatttgtttcaaactcaagaacaaagagttagattattttataaatataatgaaattgttgttctttagtaaaaaagatcaatttttcttttttcatatgtagcaactgtgtgttggaatgcttggcttggggaaaacaagctcttgatttttgtcagaattatcacagtcgtggtggtggtgttattgtggccgtgcttggatggtggaaattggaccattattttgatggtccataaaatgtgcaaatttgcacatgttcatttaactttatgaaaatcgcgaaaagaaacacgtgtgttttatgacctactatacaaacatatatagttaaaaataataattatctatcaacaataaaaaaaataaggtaaaatttaaattttaccttttattcaaaaaaat

SEQ ID NO: 16480 - DNA, 738 bp, Arabidopsis thaliana landsberg
tgttgcccttgtgacatcttgtaactttgtatgtaattattgagggcataaatgtaatagtgcatgaaccgttacggttgcctataaatagataaacagtaccccatactgttcacgctgaatggtaattgctctcgcgtcatcaccttcaaacaagccgaagatatcaatgtaatataaattcagttaaatgttcatatgtttatcatgaaacaaatatatgaataaataatatatctcgtgtatataaactcttatttcatatggatcatggaggctcttcatgaccttcgtctgaagatcattatatccgaaaggatataatgcttcgaagaacgaaggtccttaatctttaacaattgtgttgccttgttcttgattcacaacatttgagaataagtgaccaacattggcgcccactccggtgaactcaaatgaccacctttgacaccaggagctcaagcaaccaccttcgtcatgccaccgaagaaggcaatagagctaggggctgcccttgcactgctggacataaaccaagaagggctttctctgagagaagcccgaaaccagaaaaggaaggccattagcccaaccccagaggaagagaagctagatcaagagatcaaagatctagaggccatctaccaacaagtggagaaaagaagggagaaaatgcttcggctagctgaactccagaagaagattgatgaagttgccaaagagatgcgccatatcaca

SEQ ID NO: 16481 - DNA, 597 bp, Arabidopsis thaliana landsberg
  unsure (1)..(597): unsure at all n locations
ttctgaacatctactgctgctgcttatcaggtttgtaaggacctcaataaagaagttgccattaaagtaatcgacctggaagaatcgtgagtatattttttattttagtattttctcatcatatatgcaattctcctcttaagattttgagttgtataacgtttatcgtcttataagttgagtaactacaattatgattctatgaatgttacttgttcacggttctcaaaggctaagggacagtaacctttccttggctttccactatacgaataggatttttggttgagaataccatcaggctcagtaattttctaactaacctttttacttgatatctggcagagaagatgagatcgaagatattcagaaggtatttcttattgacgtttatttctgtgctttatatttttgtgtggcgattgtcatgctcagtttttgttgttgacccccagaaattttcagtattgtcaccatgtcgttgcccatatattacccaatactatggntcttaccttaatcagaccaagttggggatcactatggaatatatgggccgtggctctgttgcttgacttgtatgtaacctcctacttt

SEQ ID NO: 16482 - DNA, 340 bp, Arabidopsis thaliana landsberg
ttaaaagaacaggtaagtcatctcttttcttggttaagagaacagattgaaaactcatgatggtgattctggttaactctaactgatagtctctttaaccgcttgctagatacctcttggttcgactgaacatgaagatataattaagtggatagcatatggtccacgatgtagtgctaggtcctttactgggtatatagtgaacgggcagcgtttccacacaagctcacttcaaaggcaaaatcaaaatagtgggatttattatgaggcaactgctatgtgtagatctagtgctaaagataactcacaagtggtggatttggtatcctactatggtaga

SEQ ID NO: 16483 - DNA, 1658 bp, Arabidopsis thaliana landsberg
attttattttcaacaactgccaatgtattaaaaagaagcaatctcatgaattgcctacacgctaattaggcgggcgaaatttgttttatgtgtatgtggtatggtatttgtttttcctcgccatcctttcctggtaaaaccaataattttttatatcacatataaagttacgtgctgaacgaaacaaccgattattattaagaatccatgttgaaatagagaaaatggattgtgtgaatagaaaaacaaaaacgaaaagtcgacaaaaaaaacaaaaaacagaaaaacccactaaagtcaagcgttttgtttcaaccatgttatagtttagaactttataatcagaaattaattccacgaaaatgaataaatgtcagcagtcaaaccagaccattaaaagaaacaattaccattaaaagatatattgactaacaaaatcaatacaaacctttgcgtccatctctgttatggacacagttgacaattacaaaaaccctccatcttcctgtctctctctatcatccatgacttttttttttttctcaacaacaactaattattatccaaagttcttagataatgagattaatacatgctatttcttgcccaactaggcacaatagaataaagcttaggatcataattcaaaaatgaaagagactcccttgatactctgccaatgtgtgccctctcttggtatgaacacaaacttgacctcttcaaattgggggaacaacctctgcagatcatccatgactgaaactgcacaataattaaaataggaaacttaagttcatcacgagagaccaaaaatatcacaaaactcttatttataccatttctattggcaatatttaatagttttttataattgaaataataaaataaaagagaaaaaaagtaaaaaaattctcgcttgaatttttttgaaatactctatacaactcatagtgacattttttttttcaattggttcaatttttttttactaaaaaaaaaattttaattacttttttagaaattctttggggttctccttgatggaaaaagatataccaaaataggtaaagattcttgaacaatggtgtaccatctacgacttcaccgaagtgagctaaagcatccctttaacgttggtaatcagttacccatgacacacactggacatttaccttcatcactctggtcgtcctgagacttgaacagtttcttgtttctgttatcatttacaacataaggcccacttcttgcccacacacagtttattactcatcaatttctctaatatactattactctataacaacaaaaaagtaacattgtaatttgtacacatagcgtttgatctagctagttctatatgtagaattgatgttagcaagtgaatcaaaattttgcggagatgatgtttgaacatgggtttgttcattgtgttacccacacgaagccaatttgattgttcgtccagatccttgtaaaaagaacacatatggatcatttatcgcacaataaagaagatgtatcagagctacatatgtatgtttccagtatttctcctctcgattaacaatgaactggagcaagctcacgattccctcttaggaagttcaaagaacagataaatttagaggcaaagagggccccagaaagggttttca

SEQ ID NO: 16484 - DNA, 1647 bp, Arabidopsis thaliana landsberg
aggaccctttgcaatataacaaagccttcatgaactctaattttttaaaagggtttgtcatttctttgataactagaccaaaaaataccagaacaatcttttcttgcgtttggactccttaaatatcaagaccggctctagcggaaatataattagtagtaaggattagataaattttcttatgagttattgtgtttattcgactttaatgataaactagatgagtacccgcactacgtgcgggtttatgtattactatttacaaattgttttatataatgtttgctcatataacataaagtaaagttgaatgcatcggttttgaaacataaatatgatttgtaattgcttttgaaaagtccaactatattagttcatatgaaaaacgaatatgcttgagttgtttttttttattgttttaaattctcaggttttttttaatttatatatccttgttttttaattataattgtaaattgtgagacggtgaaattttagaaaatttatttcttacactataaatataacatgtctttattaaccatgtctctgcatattcaatctaagcttattcaacttgatgttcttaaaaagtttagttaagttcttgttataatcttatatcttacgttttagttataaggatgactcctcaaacatctttcaaattatttgttttcttagcataaatctccaaaagcttagatatatttaatttgcatattcatttagtttctttcataataatcgtttaatttttaggcaagtaatatatgtagcatgtttggatttttagccacttaagtggatttcgaaattaaagaggatatattgaattaaaaaatgtagaaaaagtgatagttcaagttctgattaattatattctttatgttgaattaattactaattatgtattacttattttataaagtttaggtggcaagctctcatgtattgatgtatcaacaacaatataacacatgtgcatagtgaaagaataaacccagcctgcaaacttggctttgatcgcacccacaaaaaaagaaaagcccgttacagcatccatcaacagaactcccaccaaatcagttaattactggctgaccgatgatcgtcgactgtacgcattcaatagcagagaagagctatatgaatcgagaccactaagacacacaaccactgaaattacatgtaggcgaagtaggatgatggaggtgaattttaaaaaattattacaaatttgagttaaatagataacaaaatgtgaagttggaaagattggcgagtaagattccgaaaaagaagacgaaggggatgaattggaatttggaaggagacgaaagaggtaaaactgaaatgtcattaattgattcattatgtaaaagtttgagcaaattacgtttaattacttttaataatttttttgtaaatatatgaaaatatgtgctgatgtgtcaactgctggagtgctgaggtgtcatgctgtggaagagagttaggcttctttcatatatatgattttctccaaagccatttagtaaacaactattttgagatgaatttacattgaaagaaataggtcatattgaatatttggtacgattttaattctttcatttcattatgaggggaccaaatgattttttc

SEQ ID NO: 16485 - DNA, 1472 bp, Arabidopsis thaliana landsberg
tggaatccggtgttgcttcaacagcgtatctctggcttggaggcgacgaatgctggttagtgctcttttgcttcccttcgtctaccttattgaactgcttcacactttgaccctttttgcttgattgtttctcgctagatatggctcggcagatttctgttcttgaagaaaaacattctcaaggtcaggctgaactggtccggcggtgctctgattttgaggaaaagtattctcaaagccagactgagctggcccaggtctctgctgctctgaatgacgctaacatgctgaactctactcttcgcgctcagcttgattctgaaaaggtgacttatgaaactgtgccttgtattgtcgtgttcttattgcttgcttgatgtttgaagaagctgattcttgtttgcaggaagaaaaacgtgcccttgttacttctcgtgacaatctcgacaggttatattgtgactctagcaactcgttgaccatcttggagaggagtcatcgcttcaccatggaggagttagacaatcatcgttataagctgcaagaaaccttggacgacgtgattcgcctcaggcagttgatatcggctaaagatgttgtcatcaaggaactgcgtgcttccaagaagtccatcgcccaggagctagagatcgctcagttggctgtcaaggttgctgaagaaacttccgctactctgagggcccagcgcgacagagctatggataaagccattcgcgcagggcggatcttgatgaggagacctggtgtgattgtccccgacgacataagggctgatgtgaacactgctcctgattcctcgagtcgtccctcttcgtcggttgctcctgagaagaacattaccaaatagaaagactgaatgctttgaatatgtggttagtgtgcccggatattttgctagaaaacactttttagtactgaatgccgctattgttttcccgttgttagaatacaacagtatctacaatcgcagaagtaaatgttgtgtgatggttttgaaatttcgtcgtggggcatagacgtttccctaagatgggtgatcgcaaacatgtcgagtgtgccatgccaatttaagtcagtgccaacttaaaccgaccgctccgttagtagggcatagtggccaccccgagttaagtaagcgtgagcatgtcgcaccgccttaagtcattgccgacttaagtcgattgctccgttagtagggcatagtggtcaccccgagtttagtaagcatgagcatgtcgcaccgccttaagtcattgccgacttaagccgattgctccgttagtagggcatagtggtcaccccgagtttagtaagcgtgagcatgtcacaccgtcttaagtcattgccgacttaagccgattgctccattagtagggtatagtggtcacccctgagttaagtaagtatgccaattgacagcgaacaatttgagtgcctttgaagtcttttta

SEQ ID NO: 16486 - DNA, 4126 bp, Arabidopsis thaliana landsberg
  unsure (1)..(4126): unsure at all n locations
atacacacacaagaaaaaacttctaaaaatagtaatacaaaattataatgccaaagcttctttcttttttactagttctgcttattctccaaagctaattggtcattgttgatcagaacagaattaccactctcatcctctgattcattcacatttgtcttcctccgcggtgaccttccctgttctattcctcctcctcctcctccagagtttctccgatcatctttagagaccaagtcctcagcttcaagcatatgaatgatatgacccatttttggcctcttttgagcattaggatcaacacatcttaaagctaccaaaagggtacgcttcaatgaccttaacgacggtttatcaaccatcctcggatccaaaactccttccgcatctcgattcgtcaccaatctcttcaaccattccacaagattcacttctcccggagcccggctataatccacaggacttctccctgaaataatctccataacaagaacaccgagctttaaacatcgctcctctcattcaacatcccggtctcgcgtattcaggagccacatacccaaacgtacccatcacacgagtagtcacatagctcatctccgaacccaagagcttagctaacccaaagtcagaaactttcgagttccattgcttgtcaagcaagatattactcgatttaatatctcggtgaacaactttaggctcaagaccttcgtgtaaatacattaaccctttggctgttccaagaacaatgttcatcctaatctcccaagtaagaggactcttaaaccccaaaccaccaccatgaatccattgttctaaattcccattatcaacatactcgtaaactaacatgctatgagctgcttcaacgcaataaccaagcaatctcaccagattcttgtgtcttacgcgtccaatagcttcgacttcgactttaaattctttctcagcttgtcctctgttgttgagcagattctttatagccaccattgatttatcctcaagaacacctctatacacaatcccataacctccttgtccaatcacattctcgtcagcaaatccattagtagaaacctcaagctctctcaacgtataccaatgtccccaacctaaatgagaaacctcaggacccgacaacataagtaaaccctgatcacccgacccggacccagacccggaaccagtccaacctcctcgttccgggtacgcaatccgatgatctttaccaatttcgatgtgaattttgttatcgtcttctctttgttggttttggtgtggctccggtgttgggtcgggttgaattggaggtcgaatctcttgaatctccttggaaacaacgggaacaatcgtatggttagatttagaagaagactcaagagatttgttcttgttgcttcgtcggtaaatgaaccagagagagatgagaacgagtaaaagaacgatcgcggctccaacgcaaacgccgagaacaacccataaacgtaaaccaaaaatggaagtgtgtctcgagagctgattgttgactgagtgagaatccgccattgcagctcactgactcttcttcttcttcttcttcttcttcctctgactctctctttttgcttttgttctgcttcacatataataatcatcacaggaggtttttctgaagtagagacaagaaaagagatgtcgaaaagacaaacgtaccctcgaagaggcaagctggctttgatgggacttgcactcatcattatttttagtatatatttnnnnnnnnnnnnnnnnnnnnnnnnatgagcaattattaaaggagggttttatcgttattaaaggtatagtcaggggtaatattgtcaattgaatcgtgttctgaacaagttttttttttgcgcgtggtctttggttgtgatttacacaaatctatctatcaaatcaaatcgaagaaggagagaagaacagagaaaaagaggtaatgagtaaaatctatgagcttttgctttatcttcgaatctaagatcaggaattgatcagggtttttacccaatttcgataattgtcttcttcgctggattgatttttgttctggaattgtttatcgtgtgtagttgaatcaaatatggctgggagagctacgatccctgctcgcaactctgccctcatcgcaatgatcgccgatgaggtaaattcgttaccaaaaaactcatctttttatatgttgatgaaggatttgaggttccattagtttgattctttagataattttgatttttcatttggatcttctgtgttgagttttgaatctctgagatgtgatctgaactaaatcaatgcgttgtttgtatagatttatttatccgtaaactgcttgactttttggatttgtttgtggaatttttaatctttttggtagtgattcaagccttagaatagctttgtccgtagttttgtgtatttcttgatttgggatcagaccaaatctgcagatgatctgatctgctattactgaattttgatttcagcacgaatcaggaaactaaggagtagaaatcttcctagaaactgtattaacattgaataacaagaggtttaggttttttaatgttagtcttcacaactgttctggcttaacaattggatttactccattgtattctatcagaaaatcatgtctagtctcttattttagacttaacttgcattttcttccttgtacaacgacttgttactggcagacacttaattggccaatggtggcagaattgtttggaactatccgttgatataaccctttagcaatcttcaatgccacttacaagacttaaattttgtgtacaggacactgttgttggatttttgatggctggagttggtaatgttgacataaggaggaagacaaattacctcatcgtggattcaagtatgtttttctaactcaatatgatcttgaggaaagataatcttttcaatcatgaatcaagttatgtcacttatctcaaagtggtatccttttgacaaaatcaagttagttgaagtttttcatctaatcaatttcgtgtggaattgttaggagataactctcttaacttctatttctgtagaatttgtataaattacccatctagtcttctaagttaattgatntttcttttcttttgggtntgnctttcagagacaactgtgagacacattgatgatgctttcagggattctcagcaggggatgatatcgctatcattcttttaagccaatatgttagtgtcttcttccaaatccagtttacggtggaatgttactcatcttaactgctatgtctgtactgtcttgtttaagtcgtaatcaaaggattcatgacttgtactcctccactttattgagccccttatgtttaatgccattattgactatcttacttgcttccacgcacccttttcatcatggatcaaagtcaccattatgtagggtagttttgctatctttttcccagcaattagtatattattggatccaactgtgtcagaaacataaggttaggctactttgtatcagccttttgacacatatcatttgtaaacatgaaatagaatgaggcctatctctatgtgctctatactgcaaagtctatttctttctacaatgtcaaaaatgtaatgagaaagtttcatgcttgtagatcgccaatatgatccggttcttggtggatagctacaacaagccagttcctgcaatcttggagatcccttccaaggaccatccctatgatcctgctcatgattcagttctctctcgtgtcaagtacctcttttctgcagaatctgtgtcacagcgttaaacatatgcattttgcaagctctcggagcctatatcatttgtttgtttttgatattcttgtctttctccttcggaacccgaaaaatctacaataatgtataactcttgatttttatttggagaggaatgttatattatgaagaagcaatggtagcttcatctggttctttgcattcaattaagaaagaatcattgtgggtattcaagagacaagagcaggcttcgaaggtttagtgaagaaatctaaaaccttaagtccttgctcaggtgattcagactcgcccaagatcttaaccatcgcgctaccaac

SEQ ID NO: 16487 - DNA, 1982 bp, Arabidopsis thaliana landsberg
ggatttgactttcaggctctagcgagctgcaaagattttaggagttttcttcaatgggttctagaggatgcgagaggtgggttagctggagaacaagaggaacagcttcctcttacttttgctttgtctgctttattacaaggtataattgttgaatcttgtgttgaaagttggtttatgataatgagagtaatcttttgttacttgttaccatcagagctcggcacagttggaagtagacgatctgtatctaaccctcgtaaagttatggtgacattgactgactatgccaaaaattttaatttgacaagccaacaggttaaatttatatttcttctataagaccaaaagtatactttgagttggtggtcgtcttctatgagctaatgatcttgttgaaacataggatgcagcagaagcccttcttcatcttatatcttctttgcaagaagagattgtagtttgttatcgccctagccaaagtagtaatctttcggatatacttttctctcgcaacttgagaatgcttgcgcctagtgaaggcctccatggtttgatggagctcaagagatggcataaacatttgcgtggaccatttgatgggattcttggtagtactttaatgtgccgaacttgttcatctcaggtaagggattagatttctcaatctcaccagtaaaaagtggctcttgctatagttaaatactttttccccatgtgatattttttgcttttttccagatttctttggagtttcagttttttcatactctgcctctttctcctttactccatcacggtggttacaacattgtatgttacggaaggttcattctcttgttgctatattgttttgcttttggcaatatgaaacttctccagaaatataagaattctcaatatatttttccttttggaatgctcttagatgtctggatgcactttggagcattgcttgaagaagtttcttaacactgagaaagttgaaaactacttctgctatagatgctggcatggtgctgcactgaaatatttatctgtgataggagcagctgaggtagttaatctctctcagcttttaatgttattgtacttttcctttgtacatgcttcgcgactctatttgacccgtgtgtcctggaaacggtttcaatcagacggaaatcgaaaagctcaggagctgtggcggagaggaccaatgtgactgtaaaacttctcttcatcttcaaagaatgccttggtcaaatagctattcccatatattgaagcagttaatcatcgcccgtttcccaaaggtatttgcttactcattgaaactagacgtgaaagtaaagttgaatccattacaatatcaaaatctcttttcttttgagtcccattttgaccctgtctagctaaattgttacagctcctatgcattcaagtgcaacgcgcttcgtttaacatgtttgaggaattcaaactgtcggtatgagtcttgttatctctctttcctgtctacatttcatgtctcgagttctattccttctaatctcagttcatctgtatagggacatatcgcatttccacttgtcttgaacctctccttgttcacaccatcttcaatagatttacatgttttcaaaaaatttatgttaaaatctattgttacaatgatgagtttgggaaaatcaagtgtgagttatacgttgatgatacgtggagcagcctcagcagctacgagagcaggatctaagcctttacgttgagccaatggaccaacgtgggtattgaaccactgcaccacttggggtttgccctctgggattggtgtcaaatcatctgcgaacaccattggtgaaacaaagatcaccaacatgcctaataaaatggacacatttgtgtatcccatatttattttttatttttttttattagaaaaaaaaaagatatttttttgggtttataattttttttttttttttttggttttttctgggatg

SEQ ID NO: 16488 - DNA, 2003 bp, Arabidopsis thaliana landsberg
gtaagtactaattcatattatcgttcaacagtgaattattgaagagtatgagaacatatgcaaaagtcgcagccaagttgatgtggttcgcattaggttcactgggagttgaagaaaaggacatacaatgggccgggcctaattcagactttcaaggaacccaagcagctatccaactaaaccattatccaaaatgtccagaaccagacagagccatgggcctcgcagcccatacagactcgaccctcatgaccattctgtaccagaacaacaccgccggtctccaagttttccgggatgacgtgggctgggttaccgcgccacctgtccctggctcgctggtggtcaacgtcggtgacttgctccacattttaaccaacggaatcttcccgagcgtgcttcaccgagccagggttaaccacgtccgatctcggttctcaatggcttacctgtggggtccaccatccgatgtaatgatctctccacttcccaaactggttgatcctctccaatctcctctctacccatctctcacttggaaacaataccttgctaccaaagctactcattttaatcaatctctttccattattagaaattaactgtcttccgactgaatttcttgattttcagattttactatttattttcttagtaatatgatgatatctattactgtttcgattttagatgagtggttcttcaaattcacaattagtagcttaatattgattttgtcatgttacataaaaagggtcgtatagtttttgttttccacaaatttacaaaactatgaaaacttgctaatgttttacatgaactatatataagcaatattacaactaaatttacagagcttttacaaagtacagtatttatatatttaaaaataaaataaaaataataacaaagaaaagcacatactctagaggaatcaatatctaagaccatatgggtatctcataagagtttctcacaattaaaaaaataaaaatattaaaaatgaaggagagagagtgtagaaagtttctcacttgagaaactctgagatactctctacaacccatcatgacaattttcatcttattattagtttaattttttaacaaaaatacttttttaatcaaataatcaaattataatataatattaatattttttttatttgagaaactttgtggatttctcatggatggagatgcccttagtgctcatactattctttttctaattaatatatttttgtggaagatactcctattatgcagtttaattaattaatcatatgtttagtcaaaccaacaactctctgttcctatgatgtatgattcaaaggtggcaacaataaagcaataatcaataaagatttcgttagttaattgttgattatcgctgccccacgcatggggtcggttggttaaactaatccattttatttctgacaacaaaaagtctacttttattttagttcttgggagagctaccacacaattttcgacatgtcccatggtttggctcaaacgtttatgatttgtggtgattaactgttgagacaagtgagttatcaaagtaagtcatataacactagtactaatttcttgttgacattacagtctaaaattatactatgcaattatctatactataacaggtaaattactcaaaatacatttgtattgagagggatgatataattcaataatttgtgagcgactatgtatataaaccaagggacacaatactcaaaatcattagtttggttggtccctcttatttatatgacgttatcattagccattaggtgctaaaataattatattctataatagccgttttccgattttgaaaggacatcatgattttagtataactaatagttaatagaacaactaaagtttcatttgtaacattaggaaagtaaagtattcaaaagataaaataaagtttccatttaactaaggatgcaagaaaacctgcagaccaatctactatcaaagttgaac

SEQ ID NO: 16489 - DNA, 2849 bp, Arabidopsis thaliana landsberg
  unsure (1)..(2849): unsure at all n locations
agtcaagtcccagtgggggaatacgtcgaacacatggggtgcacaaaaagggcgtacatgttagtgatgcggcagattgtggagttttggaaactacagtcgcatttgatgagaggattgtaggcagggtttgagtcgagtacactggcgtcgatagcggcgccggagcaaagttcgccgctgatgttccattctctcggcgcctggatcttccaagccgcgaaaattgagttcaaagctcgcgctgttgtatccacagtcaaacacaacggtcaaattaatataaccggtcaattattaacagaaactaaccggtaagtatcttattattttggaatttgtggatacaattcatggtgtattttttgtttctaatcaatttggatccgaataactagtataagactataatctatacaatccaattgattattggtgattgaactctttgtaagtgttagattaaagacaaaccttcgtcgggatgagtagtggctccggtttggttttgagattgaaccacctgaaccgaaccggcaatacacatgaaccagataatgaggagtagtagacacggagacctccgtatcctggtcatcgacgacggtggttttgcttttggttaaaaaacacaaatgctttttagaaagagtttatttctgctctttgcaaaatttagttgagaggtctaagcttttggttcatttatgatttcagtttaaatactataacaattgccgttaccaaactaagagatgcatttgctaatttgaattaattaatggtcttgtcccgacagcgagggcgtgtaagctcacgtgcgtggaccgaggagtgcacctgctgtgtcaacgacggtggcggctgcgctgcgagtcgtccgtaataaacatcaccaattagaccaaaaacattcaattcaacagaacacaatctcaatgtgacgtttataagattatgtaattgatcaacatggcttgcttaaattgcctgaaccatttctttattgacttttaataatgtaagacaaacaccaaaatataaaaacaaaagcacacgtttcaagtttcaaatcgtcgtccatctccgacttgggactcataaatattctttagaatctcaggtcatatccggttcgagctcgttgaaccactcatgaaaagtgttcttaataacttccttcatttggaaaccaacacagttacactgtaaaagagacggcattgatttggttgaggacgtgaatagtacgtggcccatcacgaccgcttgtggaagtcagaggagctaaaatattattattatttaaccaaagtgaaatctagagtttttccaatccaagaagaataaagtgaacctcatatacacaaacataatctctatatgactatatctatagccaccatatagggtctttgtcatcttccctcattcatctgggctccaagcattggcctagcgtcgttgtttctcggtgatatctcggatctaggcgccacaaagctcgtgaaggattcagaagcctgtgtgtttcttaatggaaagccgctgattgaggaggctgnnnnnnnnnnnnnnnnnnnnnnnnnnaggtagcctggctttgaagtgacatcactgacctcaacatctcctgaaagcatggccaccactcgtgacattggtgcctcaaggcatgagatgtttgtgtacacagcagggctatgccaatcatgcgtttcccttcttccatgttgaattcagtcagctgatgatcaataagttcaacttcacggcctttctcgtgtagattccatgcctgtgaacaagttacacaatcaatatcagcttttgctaaagggcataacccagattagcctctcatggtcacatacattgaagttgtgttcattatcaaaaagtgttgaagtatggacgtacccattcaagaagatatcttttttcatcctccaagttctcatcagagtttggccttccactcactagctcaagagccacaacaccaaaggcatatacatccgttttctctgttagatgtccacgcatggcatactctggcgcaagatacccactgcattgatacagtaaaatcaccaacatgtgttataaatccatagttgtgttgcaaaccagaggtcagggttgggagttacttacattgtccctgcaacccgggtacttatgtgggttttcttgtcatcatatagttttgcaagcccaaaatcagaaacttttgggaccagttcagagtccagtggaatgttgctggccttcacatctctgtgtattatgcgaacacttgcttcctcgtggagataaactagacctctggctactcccagacatatctcataacgggttgaccaatcaagatgcaaactcttatcccctgtaacatccaacccaatggcataatgattactttagcttggcagaagcagagataggtaagtcatgtttctgttcattaccaaataatgcctgatcgagacttccattagggagatactcatatacgagcaaacgatgatctccttcaaagcagcacccgtaaagttttactaggttgcgatgtagaactgaagaaattgcaataatttctgcaacaaattgtcccttcccttgccgtgatccaattgacaactgcttcatcgccacctctcttccatcattgaggtttccctgttgaatgtgttattcaaaacaaaacgtattaaaaggtatttacatgtacccttctttcctagtatctcagaaaaatatacagctattgttcgattcagtaagggacttaccttataaacagccccaaaccctccctttccaagcttgtttgagagatcaaaatc

SEQ ID NO: 16490 - DNA, 1545 bp, Arabidopsis thaliana landsberg
atctgcttcttttttaagtttactataatagttatttctctgtttccattcttatctgaatccatttttgacaggtctccatgctcgaggagcaagtaaagcctcgtacaaatcttccacctctattggttccactccatgatcgacgacctgagaagctccactacattggtgtttcctttgggcttactttggacctcttcagattttggagaaaacacaattttgcgccattctacgttagccaaatcccagttgagaatatttccatcctcgcttatacaaatttcttttttaatagttgtttgtaacacttattatctgtgtttcgatcagagtgctgtgactggtgagcacacatgtatgcttttaaaacccttaaagaatgatgaactagaagtcaacgagtccgatgagttgggattctttactcccttctataaaggtttgttgattccttgatcaagaactgaactttcactatcttccaagtatctcataatttttgttcagatttcaagataaggttctctaagctgttgagtgacaaattcaagaagatggactataaacttgcaatgaggtaagcaataacatttttctgtctttactttttgataacatcgatttcgtataattatttattcgtgtcatattattctttgtccagtgtcttaaaccccaagatcaacttcgccgaggttgattcttcagggagttcatcaggtggatttttgaagacactcaacggcatattatctccgtatgatatggagaggctcagagcatatactgaaaatctgactgacttcaatctggttagatttcttctttcttttaagaatggtttacttttgaaaatgtctgtgaactaaattgacatttttggtaatgattctcttggaaccaaaattggacgttgaaatggtgcagaagtaaaaacatatgcctttgttgtaaactgctttcagttctccttcagtttgtaacctgtttcattgtcttatcgttgaaaggtttatgacatctgcaaaacgctggcacatcagtattttgaagagaagctccccgtatcactgtcatatgttcaagcatctatattgctatgcttggggttgcaggagacggatttctccagcatcgaggtaacatgttttactctaattttgaagattgcagccagctggttcattatgtttcaacaaatccatatttaataaacatgcaaacacatttgaatgtttcagagacaaatgcagttggagaggggacaaatacattctcttctcctgaaggtcgcaagggagttatacaaatatctcaatggagttgcgggaaaggaaatcaaatcagctctccctcgtttgaaagaggtaacttcatgttattcattactttgtaattggtcataatagtttacatttacgaaaccaagaacaaagtttggatagtctgcacaaaacttttagttcaaagtcttgagcatacctgagagaataagaataactaaaagtcgctcaagctgtttatagtgttgtgttcgca

SEQ ID NO: 16491 - DNA, 871 bp, Arabidopsis thaliana landsberg
catcaaaactgttccaatatccaaaacaaagatactaacattctcaaaccaattgattgattcactagataataatactgtttatcacaaagatccccaacatgtaaaaaagtagtcatagatcacaaaagtagacgattctcaggccctgatccattcaaatatgtatgtgcacaacattgttcgtgtatatatagtctatagacatttaattcaatcttaaagaggaaccatcatcacacgcatagccacagaaatactcctcaaagatgctaatctcagactatataaaccagcattgtgtgacacagtatcccgcaaacaaaaacactgaatttcattcatgaatgtaacctacctgcgatggctgcaacctgaacctccatttgtgccgccctgactttagaacccgtggctcggtggaagaactgttctctcgacaacaacctcacattcctcaaatactgatcaaagggaacaacaccatcttgaaacgacttatccaaggaataaatagcatcttcaatggctaaatccaaagcagtacactctaacatctgcttagagagtgtgtcaccacattcaaaagcattatccacatccaaatcaactaaattcttggttttgccttggttctctctaacccacgagtctagaatatcagtgttcatggagataatctgtaattgttgttcaagtgtttctttctcctcaaccatctctttcaaccctatattaagctcatcctctcttctcttcagcccagcttgcaagctcagcagctcctctgcttcagcttctctggctctcctcatcgaaaccaaatcgctatgaaccatctccaccatcttattaatcgcatttctcttga

SEQ ID NO: 16492 - DNA, 2873 bp, Arabidopsis thaliana landsberg
atcatccccttttcagttatatttgatcattcatgtgtcaatagattcactggtcatcattagttatcgtctctttgctatttctctacttaggctgtcaacgcaaatgtttcactgcaacgcattgaggaactacttttaagtgaagagagaattctagcacaaaacccacctctccaaccaggagctccagccatttccattaagaatggatatttttcatgggattcaaaggtgaatcctcaaaatatccctcttgcttagattatgttgagacgcaatattagtttatgcaattgtacacatgacattctgatcatggtgtttgctcgaatattttccagacatccaaacccacattatcggatatcaatttggagataccggtgggcagcttggttgccattgtaggtggaactggagaaggtaagacgtcacttatttcggcaatgctgggggagttatctcatgctgaaacctcaagcgttgatatcagaggatctgtagcttatgtacctcaagtttcatggatctttaatgccactgtgagtcccctttacttcttgctggctctgaaaacattaactgtattataactttttggtagcttttttttaattcggtcaattagttaggcaggaagcgtcctaatacaagtgtctatgcattgcagctgcgtgaaaacattttatttgggtcagattttgagtctgaaagatattggagggctattgatgtgactgccttacaacacgatcttgatttgtttccagttaagtaaaatgacaggcatacacaacccggtacatgacatttcttactaacttcctgaatttgcttattcagggccgtgatcgtactgagattggagaacgtggggtgaatattagtggagggcagaagcagagagtttcaatggctagggcagtctactcaaattcagatatttacatatttgatgatcctttcagtgctttagatgctcatgttgctcaccaggtattcttatggttgatccataacataactgataatatctcaaggctgacataaatcgcattgataactaatgtgtgtttagccattttcatgatttcatttctcatctaatgacagacttctctgaatcaagttaggtctttgatagctgcgtgaagcatgagctgaaggggaaaaccagggttcttgtaacaaatcagctacattttcttcctttgatggatagaataattttagtctccgaaggaatgatcaaagaggagggaaacttcgcagagctgtcaaaaagtgggactttgttcaaaaaactaatggagaatgctggaaaaatggatgcaacccaagaagtcaatacaaatgacgagaacatttcgaagctgggtcctactgtcacgattgatgtgagtgaaagaagtcttggcagtatccagcaagggaaatggggaagatccatgcttgtaaagcaagaagagcgggaaactggcatcattagctgggatgttgtgatgaggtacttagctcaacatctttctacagcaagtaaattatcaactttgatcatttaaaacatatggacaaacacaaaaaacgcattttctttaaatctttgaacgaaatctgacttccaattgcttagatgaacattgctttatgttttaatacaaacagatgattaaggtactttccaaatttccaggtataataaagcagtaggcggcttatgggtagttatgattctcttcgcatgctatttaacaactgaagttctccgagttttaagtagcacatggttaagtatttggactgatcaaagcacgccaaagagttatagtcccggtttctacattgtcgtatatgctcttctcggatttggtcaggtttgtttctgtaaaagacttagatctgtgtttctgacatattacacgaagttgacgtttatatggtcattgtttcaggtggctgtcacgtttaccaactctttttggttgatctcgtcaagtttacatgccgctaaaagactccatgacgcaatgctgaattctatcctacgtgctcctatgctcttcttcgaaacaaacccaaccggacgtgtaataaacaggttttctaaggatattggtgatatagatagaaacgtggccaacctaatgaacatgttcatgaaccagctatggcaactcctctcgacatttgcacttataggtattgtcagtacaatttcattgtgggcaataatgccactcctaatactgttttatgcaacatatatctactatcaggtaaattctacttcatgtcattgtccgcttctctttaattgttattaatctatgtgatccacttggaatgaatctcacttttgtaatttgtagagcacatcccgtgaagttagacgtttggattccgttactagatcacctatctatgctctatttggagaagctttgaatggtttgtcaagcatccgagcctataaagcctatgaccggatggcaaagataaatggaaaatccatggacaacaacataaggtttactctcgctagtactagctcaaatcgttggctcactataagatctgagagtcttgggggtgtcatgatttggttaactgcaacttttgcggttctgcgatatgggaatgcagagaaccaagctgtttttgcatctacgatgggtctccttcttagttacactctgaatatcactactctgttaagtggtgttctaaggcaagctagcaaagcagagaacagcttaaaaactgttaagcgtgttggcaactatattgatcttccttctgaggctacagctataatcgagaacaatcgtccagtatgtggctggccttcagaggatcaattcaatttgaga

SEQ ID NO: 16493 - DNA, 1696 bp, Arabidopsis thaliana landsberg
gttgacatgagactatgtttgggagtgacagtctgacggatgtgaacaaagtttctgtatctcacattgagtactttgcttgttgatgtattcaagattatgaaataaagagtacttggataagttgcatgttgaaatctattatgtgttcaatgagaaaaatattttaaagattccagagtactagaaaagggtaaaaatttcacactagtagaaaagacaagatataaaaaataaaaacaatgaatgattcaggcatagataaaatcagcatataacaagttaagaccgccaccactatataacaataaaaacaacctaaccgctcaatgttcactgaaacctcaccccatccctcgagtccatggcgtctggtcagggaaagcttggcataccaaatctccaaaatgcatcaggctggtgggcttcccagaagatggccagcctctcaacaaagaaggcgcaaagtttaatgatatcaaaagaaccaccaccaataatcccattcagagtgttgcttctacggctctttcaaacccttgaattccttccaaacagtctcctctggaaaaaaacaacacagtattttcccgccgatatcttggcagaataatgcctcaaataaaacccaatcgtttctatttttttgggttagactcttttgatccggttgtcacaaagaaacaacaacttgttgagaagaaaaagatttgaccatcctcatccaccgcgtgaacatacgtgtcgttatgtaccaccacatcatgttggattttgtggggcatcttgggcgttaacacagacaacaagtcccaagttcgggtttcatatcaaaaacctctacacagtttgaggaatcagcaacaacattcccagtaccttccaaacacgtatatcttcttgccgtctaccaagcttgtcgatgctcggcttcaagccatcttcatgggggtaaggcggtgcattgtgtgttgtatacagtcgaataaaggacttccgatgtgggtttgccgttcatgagtccacaaataatgtagattccgcaatcctacctcacgaaacataatcctgattcaaggaaaggacacaagctcgattggaccggtttgagcagacgttgcatgggggtggtggacgaaccaccataggcttggattttgatgcatctgcatatatacgtacaaacatggctcgacgttacccatccaaaatttcaatgtcctgaccatatgggagtctaccacaaaccggtgtctcctacagaccatggctaaggccaccatgtccaatatcgacacgtaagcctggcaatccacaattcatctagcagcgaccatagcccactcacctcctccgtctcattcgtcttcaattttaattcactacatccccccgaatcgatgatgaattgatgataataaaaattattaactattgttttatagtaattattaattaaatcattacttaaatggtaaactcttttaaccattcaaccaatcaaaataaatgagttcattggttgacccaactcatttaactctaaactcattggataatgagtttagttgagttaggttacccattttgacacccctatatgtatatgttttttaaaatgacaaacttaaaacttaatacatttaaaaaaaataagtcataggatgtaatacaatattcatgggtaattttgggt

SEQ ID NO: 16494 - DNA, 1411 bp, Arabidopsis thaliana landsberg
aaggcaccgaagctgttacttttactgcatttcgttctgcataccttggttgcgctttggtgaagcctattgattttgtagcagatcatccatttcttttcttgattagagaagaacaaaccggaactgttttgttcgctggtcaaatcttcgatccttctgcttaggatcggccttaaccggatcagagtatggtatttaaattttgtttctttgtagtttgtttctttgtagttttagattgttttgatttgctgaattatatttgataaacaaggagaaaaacgttataaacaatagtagaactcaaaagtagaccagaaaagatacatagaggtaacaaaaagagtctataaaaacccctacaatacaaatatacgaagtcatgtagaagagtaataactcttgtttattctctgacgtccacaatattataaccaagatgaaatcactccttcatctcaattctctttcattcttcatcacactgtttttcttttctaatctcataactcaccgaagaagattcacaaacgacatgagtgaatcaacatctctatgctctgaagggtacttaatagcccgtggagctcttttcggaaagagaagtatcgtcgggaagcttcctaactgaagctcttgcttagcaaactccttctgctcaccgtcagctcggaatttcgccactttaactccttttcccgcaagtttctcagccaattcgacgtacgatgcttccatcgcctggcagaaagggcaccaaggagcgtaaagtacgaccagccacgcctctttacggttctctagcttcaaaagattctcaacccctcctctgctcaatgcaaccacattgttgctttcaaatatctcttgcacagcagcaggctttgagtctgcagcaccatcttcctccttgatgttccctttgtgtagaccacattctttagctttagcatcttcccaccaccaccttccttctctctcatgttggcctggaagcaccggcctagtacacggctcacacccgattgacacatacccttgtgcgtgcaatgcattcaccggaacatccatagttctcagaaagttccacacatcagctccttcaacattagccaaaggattccacttcacaagacttccaacaccaccatctaatccttcaaacaccggatcaacctgaacaatagggatctcagatctcgtacccggagattggtctttcctctgtcctgtaatccaagctttaagacccttaagagcacgacgcaaaggtctcacctttctaatacggcaacactcctggtgaccatcttcatagaaagagagcaaacccttgttcctaactaaagcttgaacctcaacagcatcaggaaacatgtactcaattcgaatcccgtattgcttctcg

SEQ ID NO: 16495 - DNA, 1190 bp, Arabidopsis thaliana landsberg
cccctaagacacgcacgcatataagggtagggtgttttgtaattgtttttttacgtatttgttacctagtcccaacaattgcaaggcaaaatgtgcactgggttaatgctcaatttttaaaatggaatcatgattttttattcatgagaagaacaaactatacatagatagtaccaaaacataaagtacaaaattattttgaccaaaaaattacatgtatatagatactacaagaattaggtcaaaagaccttaagaaaaaaggaaactaaacaatacacaaatatacacaaatgtatatggcatttctaaatattaaaagaatcttaatcttatcccgtaatttttatcaaaattaaataaagaatcagttatttaatttcccccaccatatgagcttaaatcatcggtattgcagaccaccaattcttgacactcttaaacagatccaagggcattggttttccagatctctgaaggaaatgtttgaaccacttggctgagtttttagcatgtcgtgatagaccatttttatagtcaacgtagtacaaaccaaatctcactgcatatccatgttcccattcaaaattatccaacaatgaccatgtgaaatagcctttcacgttacacccatcctcactgcatattcgtttacataaaataaatcaattttcctcgaattttatcaatcaatcatatactaatcaattttatttttcatatatagtgaaatagtcttacgtgatcgctttctggagttgttgaagatggttttggtggtactctattctctttgtgtcttctattatctcttcacgtgtcactgatccattttcgtagtcatcgaaacctatacatttttacgtggttacatatattaaataaagagaatagataaaacatctattgatgataagttagacattattgaaatgttcaagattatgtttctaacgttcttaccgttttcagttatgtaaatagttggattgttatatttatttttgatatagttaagaagctttcgtaggccttccgggtatgaccagagaatttttgtcccatcctgaaaatgaaggaaaaatgaagaacattatttatggtcaagcattgttaatatactacttacttttctaagaaagtacgaagaataatttgtgcgaaaagtgcataccgattctgatgagatgt

SEQ ID NO: 16496 - DNA, 1154 bp, Arabidopsis thaliana landsberg
ccatgtagtctattggttatttttgtggttcagtttaaattttaaatacatgtatttatcctcaaacttttttttttgcgattctcaaactatttaattcaaatccagaaacggtttatttctccccaaaatacatgtatttatccatgttaattttttttatttctttggcttaagtaataattagatcaatacattttagaccaataaacgtttgaacgtctttttgcatcagaacgtgaaattaatgtcaaacgcaaacgcatgtacaaatcctgaacaaacataccgcttatgtgatggatggttgcgtaagaacaaaacaccttaaacggcagcgttttgtaggagcaccgcttcgcacgtttcttccatatctctgatcacgtgatagtcgtcttcttcagatcttttatcactttcttcttcccggagaaaatttggccctaaatcactttcccgggaaaatcaaactctggggaaagagttgaaacaatgtcacaaggcgatacagtaccgcttcatccatcgtctcaatcagacattgacgagatcgagaatctgattaacgaaagcgtccaatcaggtcccggaaccgttctcgccgctcgtccaccgagcccaaccagaccttcgattccagtatcttcttcttcttcttcttctccgtttatgcaatcgaatcttccaccgcttcatccgtcgtcatcagctcagaaagtgacacatgtccccgttcctccgcctcttccggcggtaagtaactccagcaatttccaaggagcgagtgcttttggatctccgcctaatacgttgacggagcctgtgtgggatactgtgaagcgagatctgtctcggatcgtgagtaatttgaagcttgtggtgtttcctaatccgtatagggaagatcctgggaaggctcttagagattgggatctttggggtccgtttttcttcattgtgttcttgggtcttactctttcatggtcagcttccgtcaagaaggttagctctcagatcagtagctagtttctctcagctttaagcttgtgtgatctaaatgtgatctggaactttagcttttaggtatctgatagagttctttagaatgtctctgttacagaaaatgagtgggactagagaaagcatttcac

SEQ ID NO: 16497 - DNA, 883 bp, Arabidopsis thaliana landsberg
ctatcaccaaaccattttagagaaaagcttgataaagtgactaacctaaaggggcgagtaactccaccacaacggagagcggttttccctttaacaaatgaagactatctcattgaaaagtagaacaaatgcatttattgaggatatacggaccggtttacatctagttattttcggtaatgttagggaaaataccaaaagaatatatcaattatttttaatttatacgtttaatattcaattattttttgttgaaagattaatacataaagtaataaaactatgtaatttaatatccaaaccattaactgttgttattttcattctcacgattttacaacaaaaataaattttcaattttacccttaccatctcaatttttttctagaggtggatctatcagtccaaccgtctatgtctctccagggaattcacgaatcgatcgatccagaggtggatcgatcgatcccactgtatatgtctgaaacgttgaagtacggaccgatcggtccaaccgtctatggccgatttgttgtagcctgaaccaatcggtttaccccgtcttctctccgcttcagcttttctcgttctttctcgacccgaataaactcaaaaccatctaatccattcacaagtacctaaaacctgcaaaagactcaagacttgatcaaaaagacgtaaaaacggactacgacatgataaatgactcaaaacgaaggttagacaagagatctaagacaccaaaaacgcaacatatcaatagtcttatccttatgttacatgaaataacatatatgtagttcaaacttcaattttttttagatgattctaatgtctggaattgtataccaaatcttttagttatcaagcactagggagaaga

SEQ ID NO: 16498 - DNA, 1568 bp, Arabidopsis thaliana landsberg
tgacctgcaggctgtgtttggggagccggctgaggcacgcgcagctcttaagggaatggcatacaagcgttacaagtaagctttaaaattaactttaatgtttactaaatcaggaggggaagaacaacttctgtattaatgtctaaaatccgtttgtctttccctaaagtgcttcttggagataaatgaccatgctagttaaaactaaactacttcatcacattttcctattatcacagagatgctcccttgtatctggagtgggctcctggaaatattcttgagccaaaaaatcttcctgacaccaatgaagagagaagtgacattgaagaaaatggcgtgagaagagtcaacttggagcagcaggttgaaatcgatccagatgtaactgaggtatgtccagttatggtagctgtgaacgttttgaaatcatatgttttttttctgtttgagtggatactagctatcagaactgaaaggtagttgagaaaatcttgattagcttaggaaactaaattggatattagtcttacctcgtggggctatatgcgggtttagtagtatctatataatttctgttcattaaatttatgtatatagattttttttttttttctgatccattttgtagacaaagaaagttgcatatgtatctttgaattggtatgttcgtaacatatcctttaaataatgcgttatatttcagtcaaatgtccttaatgttaagaatctgagcttcaagacaactgatgagggtttgaagaagcatttcactaaactggtgaagcagggaaagattctcagtgtcacggtaagttgttgttcattactgacatatggtcttaactgtgagagtctgttttaataatctattattttccattctaaacagataataaagcataaaaagaatgagaagtatctttcaagcggttatggttttgtagaattcgactctgtagagacagccaccagtgtctacagagatctacaggtatataatagttaagtctctttgcatatgtatattttaaagttgattggacttgatggagtagagtggcctttcttctttggcaggggactgttctggatgggcatgctttgatcttgagattctgtgaaaacaagcggagtgacaaggttggaaaagattcaaacaaggacaaaccttgtacaaagttacatgtgaaaaatatagcttttgaggcaaccaagagagaactaagacagctattcagtccatttggacaggtatgcacttatctttaggatagagtgatgttatgggcacagcttattagttctatgttacaaaccatgaacacatactgttattctcgtatactggtcttatgtgtgtaaaaattcattttgctagagaaactactagggtatgaaacatctaacaacattcctgttgtttatgcagatcaagagtatgaggcttccaaagaagaatatcgggcaatatgctggttatgcttttgttaaatttgtgacaaagcaagaagccttaaacgctaaaaaagcattagccagcacccatttctacggacgccatttgg

SEQ ID NO: 16499 - DNA, 2163 bp, Arabidopsis thaliana landsberg
gatttcagaactgaggattccataagctacgacagaaggcgcatttgatgcagcaaaagctgaaatccaagaagagcgaaaagaaaatctggataatcaccaagaatcagaagctgccactgaaaaacaattcgaacatggagcgtaagttgtagtatttaatcgataaagtatcactgcaagagaaacatggactgtaaggatgtatttaatcgatggattgttgacaatgctcacatcccttgggatttgtcgcaatggatggatatagagtttagggtttgagtgcggcactagtattactgagaaataagataacaaaatcacatctacatctgaagttttcgacacactcaacatccaacggtctgaaccaactaccaaccaaaccaataacatcgtctaaaacctacaaactgattgaataaaaagataagctagggaaggtatcatagtggttcggtacggtttgaattggttagatgagattggacccctaccgaaaatagagtcttcggttacatttggttgatttgtgggaagtgggaaccaaacggaatgggaagacggaagaggaaaggtttaggagatatcaatcagacctccaaggccaaagtcaccttccgatttaggtaaagctttgaaataaagagataaattactctttttcaccggacacgaatgagatatcgtaatttggtaaacttgatagaagatgatcagtgacgttatttctcaccaacactataattccattttaagaaactttttctcattttagttacagttttccagtttgaaatctctcacacctttacgactagactacaaaccatatctcttacccatcaactcttaaaaatcaggcattgctttatcactcagtaattagtatttgacgtttagagtgtactcgattagatagatagctttgcgtccaattctctactttctatttaccttgtttcgtatcgaaattgataacgtaattgactataagaaactcttttgccaatcacttgctgttgtgtttttatgttcctgaaaacagttcagtaactggttttcttataaatgtcacgaagagcttacattttcttataaattacataaatgaattctgccaattttctctttcagacttttcttaaatttgagctcttcgtgcagctaactgttgcctattgattgattaactactttttggttagtttgggaagaaaatggcgggtgacgatttggtgtttgctgttaatggagagaaatttgaagtcttgtcagttaatccttctacgactttgctcgagttcttgcgttccaatacttgctttaagagtgtcaagctcagctgtggcgaaggtacacacacacactgtgatatttttcgatgaatgtcaatatcttttgtggttttattttgtttatatacacttctctgtttgaatctctaattcgtatcaacaactattttgcttatgaatgaagatccttcaatttcgaggacctggatgattaactcttttgtctccaccagaacgtaaaagtcatgatttattatttgaatctgtgaacgatcatacaaatagttaaaatctatgtttatttactccttccttttcagaaatcaatcttgttgtgttttggttttgtgccactcatatttacctgaattagtataccacttgtctgacaagtgtttaccaaactgaaatgaggcttggaacttggtttctttttccttgtttcatgtgtctttgaacttgatatttttgtcttcttttgttgcctgtccggcattttcagtgtgtgtttctctcactgactcagctatatttttcaattttcacagggggttgtggtgcttgcatcgtaattctatcaaaatacgatcctgtgttagaccaagtcgaggagtattctataaactcttgcctgacccttctttgcagcttaaatgggtgctccataactacatccgatggactcggaaacactgaaaaagggttccacccaattcacaagagatttgcggggttccatgcctctcaatgtggtttctgtaccccagggatgtgcatctctctctactccgctctttcaaaagcccataactcacaatcttcgccagcctacctgtctgctcttgcagcagagaagtccatt

SEQ ID NO: 16500 - DNA, 1580 bp, Arabidopsis thaliana landsberg
tctgctgccaacgtggaagaaattctaaaggtaatgactgaatccttgcctatcaagctaagtccactgggccacatctgacgaagcttttacagaagaagaaggagccctcagcaaagaagaagtctgctgggccaaaaaacgaagaattatcactgtgacagaggccattgaagaaacaccaccaccagcttcggcgtcaaaaccaccagctgttgagagcgctacagctaccgaagctgcacctaccgaagccgcaattgccgaagctgcaacggccaaggatgcaaacttagaaagcacactttctgatatagataaaatacttctggatatggccgcagaagaagctgctacagccgccgaagagaccatggccacagtgcctgggaaagagaaggaaatagccgtcgaagatagttcagaagaagaaaatttcaactttcaaaacttaattggacaagaattgacaaaggctgagaaagaagagttgagagattatgccatatcctgcgggtatcagccaggggtctactcttcggcggtatcgcgatgaaagcttaggttgctccgagacaggactggagcgaaggtcgtcggtactctgtcgaagagtattggtttcccgaagcttgagaccgatatcagccgctaccgacgacagcatatcatcggtagtttattctattctaacttcaaggtaaaaacttttcttcgacttttcattgtttttaacaacgaaggtgttttctaacgaaggttgcttctgtacatagtattttattgagtaaagctttgaggatgcaacaggaccttgaagataaaaagcatgaagttataattgaaggcttagaaagcaaaataaaagatcaagcagctgctcttgaaaagaaagatttcgaacttcagacaatggaaggtttactgcagaagctgaagccaaaattgcaaagttggataaagagcttctctcaaaatcagaaagcttcgaacaagaaaagcagagatttgatacgaagtttgaggctgaggtcgaaaaagttcaaatttgcaaaaatccttgaaagagcttcaggacaaatgcttaaacttcggcaaccggtgcgtgcaacggctcgaaataggtcttcaactcaggtgggtgctagttctgaaaaatttgaaccttcagttgaagacctgccaagcaccttcgaacatattgagggcgaagttgaggcgcttgacgaagttatagctgggcatggtgacttctgtgccctgctggcttctcgcgacacagctatagcttttatgaaggctggttgcacgcacgaaaaaattgtaaataggccgaacttcagcctatcactagcggacttgactaacatcccccgcctggcccaaagcattggaaattgatttataacaaaaatttggacgaagggtgggcgagacttagctggtgacgaagctcgaagtcatctcaagccggtattaaacttgtacctgttgcttaccctctcctaagattactttttaccttatactgctttgttgtgtacaggatgacgatgccgaaggtcaaaaatccgaagctc

SEQ ID NO: 16501 - DNA, 643 bp, Arabidopsis thaliana landsberg
  unsure (1)..(643): unsure at all n locations
tatgacgtgaatatctattgtctggattcaagatctagttaattactctagatctaacattaagcatttttaattatgaagaattctatagataacctaacaaagggggcaatctactaaaccatatgaatccctaatgagaaaccctattcctaacaagcagactactcatacatattgaatgaaccaaacaacataattgagatagaaagcataaacacagtaaatagagaaggggaaataatggatctcttcactgtattaagatctgaataaaactctgaaaagcagtcaacgaatggcttatgtctctcagtaatagggtttgtagaaaacttgataaaagaaacttaggtctaaaaacaatatatatagaccctaaaaacgtccagggnnnnnnnnnnnnnnnnnnnnnnnnnnnnnnnnnnnnnttctgtaaacttgaaagcatctagggttttgctgggccgaaactggtgtcaatcgacaccaaaagtgtgtcggtcgacactcctcgctgattcttgagtccaaaatcgtccttagcttccttttccttagatcttgctccaaaatgactccttatctccattgttgtcccagtgcatagaatccctgcaaagacactaaaaagactcgagaa

SEQ ID NO: 16502 - DNA, 830 bp, Arabidopsis thaliana landsberg
  unsure (1)..(830): unsure at all n locations
atgttgttgagagaaagcaagcacattcttaatgttgctagggcgcttcttttccaatcacatcttcctcttccttattggggagattgtgtgctctctgttgttcatcttataaacagacttccgactcctgtgcttgaggacatcagtccatttgaggtcttaacaaagaagaaacctaactatgacgagttaaaagttttaggttgcctttgttnnnnnnnnnnnnnnnnnnnnnnnnnnnnnnnnnnngatccccgagctcgtgcttgtgcttttcttggttatccttccggatacaaagggtacaagctgcttgatctggaaactaatgatattataatatccagacatgttgtgttccatgaagagctctttccttttgctaagacagatttgtctcaggaatcccaaaacttttttcctgatcttcttagcaattctcctatgtcacctattatatctgatcaggatgcttctacatcctcatcttctatagagactatgccttctgctagtcctatcaatgtccctgaaccttctgttcaaacatcacataggagaaccaaaaagcctgcttatcttcaagattattactgtcattcagtagtgtcttcaactccacatgaaattcgaaaattcctctcttatgataggattaatgatccttatcttacttttctcgcttgtcttgataaaactaaagaaccctctaactatactgaggcagagaaacttcaggtttggcgtgatgctatgggtgctgaatttgattccttagaaggtacacatacttgggaagtttgctctttgcctgcagataaaaggtg

SEQ ID NO: 16503 - DNA, 571 bp, Arabidopsis thaliana landsberg
tgattagaaagaaacaggaacttaaggaagcaccaaggacttcatgcaagggacgtataaaaatttatgtaaaatcttgtgttgcatgttgtaattcttccttattcttttccgcacaggtataggtgtttgctatagctcaagtccccaaattcaaaagctatttttgaaaaccaaaaatcactttaacattatttggttgaccatggttagggttgagaaacctagagtgttcttgctgaaaagcagctgaacttcttcaactgcagctgagctttccagctgaacttaacttcagctgtgttgagcttcttcagctgcagctgagcttttcagctgagctggacttcagctgtggacctctttgaccatacccagctgaacttgcccccgggcagctgagctggggttttttctccaaaactctctggcctagaccagctgaactggtcctggggggcagctcaactggtctctgacccctctgacttctgatctgcagtctgccagtcagactggcagtcaggtcaccagggttgtctgggggtggttcaacggtcctgtcctgtct

SEQ ID NO: 16504 - DNA, 975 bp, Arabidopsis thaliana landsberg
ccaatacattccaaatatataagttgtcgctggagttagcttcaaacatacacgtattactcaaagtttttacatcaagctagtaacctacactggattcctagcgtcaagcctcccctaaagtttacccactactagtcacctgcaaaacaaatagcgtcatgaataatctaggattactcagggagaccggattctaacaattatattaacccaacccaacccctaatcacaaagaatcaataacaaaagattcactaacaataaattaaacaaccactaccaatccccagtctaaacatcctaacaggccactacgaattcatgataccccccaaggtgatgcctccacactcctagacacgtaagtctataagagattacatccctcaatactacatcgtcatgtagcgcttggccggacatgacccgctccaaacctttgtaagccataatgttacggaatttcacgcatcgcacagcagacggatagactatcatggtttacctaacaataggtaaccccctattgctatacaacaacacgcataaccatattcttatgctatccgacagcataacggttatgctaacaaactcgcagcataacgattacacagtcgttaagcctaacttcataaccaatcaatcaaccaagcataaatgattatgaaataataccaagtataaactagcaacctcatgcataatttaacataataactaaaacccaatctgtgtgctacttcacacagctcggttactcacaaagctcggcggaaggttttgggccgtgaacttctccgattgttctccgttttcccaaaacattttttaagtggtttctattcgcatgtgtatgttctaagggtcggaaatgtgggctatttataggtttttgggcgagctagttaggtgaggcgctggggacacatgtcgtggccgttgccactaagctatgctcaatgggcgaca

SEQ ID NO: 16505 - DNA, 933 bp, Arabidopsis thaliana landsberg
tctcacattgacatatgttgttcgtgtcacaactagatcttcaagtttcggacagacacttataagcctctgatcagatttgtcgccagagaacctctcagagagaacatacagtgatttgagtgattcacaccacatatcagcatcagtatccacgaaaagtagtcttttaagcttcaatgatgtaagattccagtgccatcaacgcaagctacgcggcaatgtttgggatgcataacacgactcgatactctcctcagagagctccaaccaagggttatccaatggattgatgatgtcatccaatggattgatggcggcacttagtcgtccaaaactttttttttgtgtcaacattttttaaaaaaatcttaaaacggatatctgatctaagagcatgttcataggtgatacttacaaaatatcattaagaaattttttagtattatttataatgtttgtttaataaatatatataatattttttacttttgtcaaatgtgaccaatcagaaaaagccacgtcagatgatactgatattacaaatatcagtaaactgatactgataaacatattctaattgctttactaatataaaaataatttttggacttgtgatactttaaaaatatcacccatatacatggtctaatatatggatcgtaaaaaactcatatataatattaataagtagtagaagagcgtagaccatgtcctggatcgtcgtccaaatgaccacaagaagatttcaaaacagaggaaaatatttctcattaaataagttttcctgacgcataagataacattattacaagattcagaaaaagaaaggtgaaaggataaaggttctcctactatataagatgggtgccatctgaaaaaaatatgaatatattttgtaacggtttgactggttattacatggatttaata

SEQ ID NO: 16506 - DNA, 2473 bp, Arabidopsis thaliana landsberg
tgcttccaatcttttgaatgttaacatgttaaatgtgacgaagcttaccgctacgaacttcttggtgtggtatcgccaagtccatgctctgttgaatgggtatgatctcgccggctacctcgatggtaagacaccgccaccaccacccacactcaccgtcgatggcgttgtctctgcaaatccagcatctaagcactggatacgacaagatcaattgatctactcaggtcttattggaaccatctcgggttccgttcagcctctcttgtcaaaggcaaacacctctactcagatttggtccactctcttcgagacttacgcaaatcccagccgtatccacatcaaagtgttacgagagcagctcaagctttggaagaaagagactaaatctattgatgaatactttgaaggttttaccactcgttttgatcacttggcattgcttgaaagtgagattaaacatgaggaccagattgattatattcttgctggacttcctgatgattacaggcaagtcattgatcaaatagaaaatcgtgaaaccattccttcgctgacagtgatccacgagaagcttatcaactatgagctgaagcttcaaacttctgctgctgcttccttatctaccccagtcaccgtcaatgctgctacctacaagaattccagcaacaacaacaattcacgcaaccagaatcgttcgggttaccgcgacaatcaatcatggtcgcagactggtaacaaaaatgattctcgtggctctggtcgtggctatcaaggaaaatgtcaattgtgtggtgtttatggccatagtgctcgacgttgttcgcaattacaaacgtccaatggtggttatcaacccacacatggtggctatccgtcgccacacatgagttacccgcagacttccatgcagccatggcaaccacgcgccaatgttgcaatggctccaccgccatataatccttggattcttgactcgggtgctacacatcacttaacatcagacttggctaatctctccatgcaccaaccttataatggaggagaagaggttactatcgcagatggcaccgggctcccaatctcccacacgggttcagctttactccctaccccatctcgctctcttgcacttcacgatattttatatgttcctaatgttagcaagaacttgatttcggtctatcgtatgtgcaatgctaataaagtttcggtggaattctttcctgctcattttcaggtgaaggatctcagcacgggggtcaaattactccaagggtaaactaagaatgagctatatgagtggccggttgagtatcagtccattactggtttttctgcatcatcaactcaaaaaaccgacctctcgtcttggcattctcgacttgggcatccttatttacatattctaaaagctgttgtttctcaattttcattacctatttcccattccttacaaaaacagttttcatgttcagactgttttattaataaaagccataaattgccatttttcacaaacactattgtctctcatcaacctcttgaatatgtctattctgacgtttggacgtctccaatggtatcagttgataatttcaaatactatcttgttcttgttgaccacttcacaagatacacatggctatatcctctaaagcaaaagtcccaagtcaaagaggtttttgtagctttcaaagctgttgttgaaaatcggtttcaaagacgcatacgtaggttgtattccgataatggtggtgaatttattgcactacggcagttcttgtctacccacggcatatctcacatgactactccaccacacacccagaacacaatggcctgtccgagaggaaacatcgccacattgtggaaacaggtttatcgctgctcacccatgcatcaattccaaaatcatattggacatatgcatttgccactgccgtatacttgatcaatcggatgcctacttcagttttaagtggtgaatcgccttactcaaagctcttcaaacaataaccaaattatctcaagcttcgtgtatttggttgcctctgttatccctggcttcgtccatacacgacagacaaattggagaacagatcagctccttgtgtgttccttggatattcactaacacagagtgcatatttttgcctagaaaaacaatccggtcgcatttagacatcaaggcatgttcaatttgtggagacaagcttcccttttggcaccgaacccgtgttgaaggtaccaaatacagaatcatcacctccttcagacacatttaattttcaaccaattgaagtttctgtccagccaaggccacttgaacaagcgccactatcggcccctagccctaatcctcccccgctccagcaggaaatagctcctacaatgcgtgtctacacaagacgaggtccacgaccaacaaacgcacctgttttagtcctcgagacagctccgtcgtgcaata

SEQ ID NO: 16507 - DNA, 1587 bp, Arabidopsis thaliana landsberg
  unsure (1)..(1587): unsure at all n locations
ctgtataatcagacaaggtttttttggtaagaaactctattttcatgacatttgacacttttttttacgacatgtggcatatacaatacctaaatatttattatctacaaaacttcattaatatgacatttaatatatacattaatatcttaatgtttaaccaaaaagaaatatttttaaaaaagtgctattgaattttttattttttattaaattcccactataaaaatcatcattcttaatgtcttagagtaaaatgtttgttcagttttgaataaacattaattgaatattattattatttgtgactctttatattctgcaaattgtttcatcattttattgaattatatttaaattcctacattaattacgagtcaattgaaaactaaattcaattgatttagcaattactgtaaataaatgacaaagaaaaaaacagtccaaaaaacataaattttgttcatagaaaaaaagaaattgggattaaacatcaaataattttattattacctagggttgtgtttggtcccagttccatgtgaaacggtttccctacttcaacatgaatgttagcaattatgagttttctcccgtaacgcttttttatatgtagtatatatatactttattttattagagttaatgtgtcgatgtcagctttcactaaccttaatctctcttcctccatgagataaacaaactcggtggaatgactctgttttctattttttttttccgtttgtattaatggtttttggtttatattgtaggcactaggcaggatatgggctgattatggattttattgtcgaatgtcacaagaatcatagtcttgacgtacgagacatgattgattagtatatattgtacatgtcttagatcagttctctgtcccacttaaaactcttttggtccaaaaaaagctacatggttgctagagagaaagggggtgtccaactccaatcaatgtttcctccctccaaaagtaacttcgtgccggagttcaactatcttacatcacacgtaagtttttatatatgtttgatatgtttgattatacaactctgtgatcacttaattattgttagagtgctatgtcgatatatttaaaattctttgaaacgttataaaatattctatttgggatataatattttaagagactttctcttaagtcgtctttagtgggaatctaaagctagctcaagaaatatgaaatgagcaaggaagcttggcatcaatggcccggggtgtagtagacatggagttgcatgagtgaatgtataagccagtctttgtgaagcttggagccttggacaattcttacaaattaatagtatagccggtcannnnnnnnnnnnnnnnnnnnnnnnnnnnnnnnnnnnnnnnnnnnnnnnnnnnnncaacaggtctaacacagccgaagatgatttgccttcatgaagttggaaaaaacaaaacaccagaaggtaatctctaagaaaaagcagatttcgatgggttatgaatggtttgtaacatttacgggttttccataacaggaaaaaagaagacctgatgttgcttctgacgctgtgggcaacg

SEQ ID NO: 16508 - DNA, 1551 bp, Arabidopsis thaliana landsberg
ctccctgcaaatacaagtttcaacaattctaactttctctcttgcataaacaacaaagaaacaaaagagtgttaactcacagttcccttttgcgcaagcaacttccggcttgaaggagctctcgctattgatgaagcagccgctgctgctgctactcgaatcctgcaaacgcggaaattctcagtgatgatatgacgatatgatatgtgatgccatagagagtatttagccgaaccttttatgtacgtcaacatattcatcagtttcatccacaatctcttcttgcaaaagttcttcaaagacatcttctaaagtgatgataccaattacctcaccatcctcgatagcctctgaagtatgtgaaaacccgtgaggtccactctcgttgttttgaaagaacgattgtccattagccttgtcgattgtgacaatgacattgtcatggtttccctctcgttttagtaacaaaggtgcagtcaagtcggagtcattgctttcatcagtgtgttcttcaagcaaagttgaaggtgggactttgcttttccccttaaccttcacaactgcagccatgtgactgcttcccttttgaaactcattcagtatatcatagagaggcatatcagctggaaccctattcaaacattataacatcaataatacgaaacttcattctacataatagtaaagactggaggttaaaatggtaatggcagaaccttggaatccggcgtatacaaactgcgctgacaagggtctctgtttcagggcgaactgtaagaagactcttcacctagaaaacagaacaatttcttgattagagtttgcagaaacatgataagccaccattgaaacatgcaaaataagagtcagcaacattaccaagagaagtccgataacgtttttcggattcccagagtagacaggaacgcggctatggcctcgtgccagaatcttccccatagcttccctaagagattaattacacagacagcagtataagatacatgtcagaaaatagttgccgaaacaactgccatgcaggacttttcagaattattgagacaacagataaaatattttataccactgacagttgataactaaactcaccaatccaattttgaatttacatccaaggagaaggtagactcaattggtgtcatggcttcttgtgcagtctgtcaaaccaaataccacttttgcataaataactttcaccatatttctacacagatcaagccatggttcaggaattctagaaagtcaagcacacaccttctcagtcaaatcaagagctccactaatgattgtcgtctcatcatgtgtaagctcacctcccttaccagcctaaaaccattgtcagagcaacaaggtaaccaaattagtaatctaaatttccaaaaggttgtgacttgtgaggaagtaaacaaagtagttaacaatttcaaagtctctaataatacctcttggctgtgaatggatacaagagctttcaactgagcccgcctaaataaagcatcattgtgtcccagcaccaaatctaaaatctat

SEQ ID NO: 16509 - DNA, 642 bp, Arabidopsis thaliana landsberg
tgtgagagatagattgtcacagctagaggcggaacttctgctgtgtctgatggcacttcacgacctcgggagctgacaaatgaggagtgcacaaccatcattctcgagataaaatgctgcagtctaaacctcttgactttgagtttatggttattctgtcactaatctcttctttatttcttttcagtccaccgaaagggattccagaggcaatctttatagacttggcagtctcaaagatacattaggctgttccaaccgcaatctccctggagaatcatcatcatccttcctagatttagaagaacggctgaaggaagcgcaacgcaagattgaggagcaggctgcctacaatgagaagcgagattctgagattgctgcgcgtgaagctgagacagcccgaatcacggttgagcaaaaggacaagctcgaacacttgtccttagtggagaagtatctccgacaaacagatccgcaattccttgacttcatggcctctcaatcttcgacaaccacagagcctctaccagctactccacagaatgatcaataggtttagatttcagtcccttttcccttgaactttgaacaataatgtgtgtgtgtgtgtttagacatttgacatagtggtagtgtgtttat

SEQ ID NO: 16510 - DNA, 1527 bp, Arabidopsis thaliana landsberg
  unsure (1)..(1527): unsure at all n locations
tttaagcaacagtaagagcactcgaccgttttgcactgaatgtggtcaacgttgtccaagttccgtctactacaaacttggttggttgggaactagaactttttgttcgttgaattgcttaacgtcaaaagaaaaattgatggtgttgtcaacatgatgagtttttttttaatgtgttattggattttttttttttttaataatgtttttcagagatttgtgtagttattatttagatccagagatttttttcagagattattggattttaatgtgttattggattttttgtttttaatgatgtgcaacaaagagagttttttcttggcacatcagaaactgggagactatactcaccgtcaccggatgtgaataatatatataattaacattcaatggacataaacgtctgggtggtgagtcggttatcacgctagtctcacacactagaggtccccggttcgaacccgggctcagacatttttttttccttcatatttacgtttctgccacgtcatcattcgatacacggaccctaggttctgatttcactttttctttcgtcttcggaaaaaagcaaacacaaaacctgagaacaaaaacatccgcagaatccaaatccccagaaacactactctacaaattcgaatccaaagttcaaaccctattcttcaatccttcttcttcgattttcgtagagcagattattgtttccgtttggtgtctccatagtttctgaagagagagaaggatggattgggacagcgttgctgctgaggatgtgattgaggcgttaagagaggttgaatggtcggcgagtcctcgttccttggccgagttcttctccagattcgcttttcctcgctctttctctaaatggatgagccgtctcaaatgcaatctctactagtattatcaccctctctctctatatatatatattcgtatttgcaaatcggggtgttgatttttgttttgattcctcttgttgcagctataggacgaattacttcatcctcttcgttttcgttctgggtatgttgaccttcttgtgtttcaagctgtgattgagaaatctggttttttaattttagatcctcttgagctgtgtttgatacttagtaggggttttttctaactctttttcctccgttgtggtggactcaggtcttgcacttatcactcgacctctggcaattcttggtgctgctcttacagctttaagcttagctttcctaaacgacaggtatttcttgtgatttcgcgttagtttctactttctatcgatacttaaagatgcatttgttattccggttgttgttggttcgcatctatagaatgtttaggaggaggttctctatctatattcagtgattccttaaagtggctgtgcttagcgtttagattcaataaggctctcttgatggtatataaaactcgagtgttgcaaagttctctattttcaatgattagcccttaanatgtctgtgcgtcagactaaattcaataggttatggcgttaattct

SEQ ID NO: 16511 - DNA, 1183 bp, Arabidopsis thaliana landsberg
caaaaattctgcaaaaattacagtggcttgttactggtgtatgattctctgtctcaaaatttggggttcagaaagtgaatggttttctctggacaaaattgccaaatcctaaggcagaaggggtactttgaactacaactattatttaacagtgggtaattctttaaaacttatttttgctggcttttaggtgtcataacatgacttgatacaaatttctagtcattaataccttttaattcttttcctatggttttcttaaggtttctagccaaaggggtgctttctactaccactatgtttgaaaaacatcaaacaacagagttcttatttttcttagctagtattttgtgcaagagcaatcattctggagtttggtttctttttgcttaagggaaggggtggtttgcattatttaagtcaaatggcctctctcacaaattgctagcaaaaggcatgggttcacttctttttcatgggtttgtatttttctctggtggtttatctcatcatggacttagctaatttttggttgcccattatctcattatttgaggttgtttatgatttattgggaaaatgccttattaccactttgtatttatttccttacttaaaaagttaggctggggtgctctgtatttttgtagtggggctctggtggttataagtcactggatttttgttaccactttggttatggttatcaattttaataattgattttcagttcacataaggctgattaaagcatcttaattagaaactggtcttaattaatggtctctgcatttttcctaggttcttggttgcataagtaaactaggaaaaatattactaatcattgttcaacattttctaatgcttttctgattttctctaagttgtggacaaaatggctttaaatgaataactacatcataatctctaatgctggggattctactatttttaaacaatgcctaattagggtataagcatctacaaattttcttaagctcagtacagaagaaaaacaaattttccttaattaaacaaggtttagggggtttctgtttttaattttaagctctaaaatttagaacagaaagcatatggttcaataattttaaatgatagatcataatattccagagctagcccaactctggtttgacagcttttcattaagattatcaacaaa

SEQ ID NO: 16512 - DNA, 732 bp, Arabidopsis thaliana landsberg
ttttaatttacctatgcatggataaatgatattagggaacagtattgggtaaaaagtggtcaagggcacaacttgccttcaatgagctcctgctcagctacttcaacctgctgctcaccaggatcctcggtcacgggctcttctactcgccacaatacaaacaagcacaatgcatatagagagattaacattacaccaaacatataaacaaaatacacagtaataatctacatgttaaaataaaattctaggaacaggaatcataatttttggagttatagaatttaagttatgcattttcaaaggttttatgtgttttaaataggattaagtgggaaattaattttcttactgttttcatgacaaaacagagactctaagtgatagagaattaaattacaaaattattgcaattggaataactcaatttggagttaaaatgaatttactatgaattaaacatattctagcatttattttctcattaaaaatcattttctaattatgtttactggattttctaactctctggaccgggtgcataacaatcagaaattacaggggctatcttccaaacgatcataagactcaggattcccccgcaatggatggcgggttaattcttatatttctaagggtataatgtgtaaaaagcaaaaggagaaggggtatggttaattataacacgccccatcagatatcgacggtccagattaaaaatgagatgatcgt

SEQ ID NO: 16513 - DNA, 2637 bp, Arabidopsis thaliana landsberg
tctaaatacaacaccagtactaaaccactgtagatgagactgtgtcttgccggtgcctcgttgctacacgcccaatcaaaagagtcagacgtgatttcaggaaccaccacggacaaaatgggtatccctggtctatacttaaccaccaacctcgccgtgctgcctcctctggtcaagaccatcataagagtggctcttgaggaagtagcggttctgaccgcagatgaaacaagtgactccatcgggctcataaggaccgcagcgtgaagcattatcctcttgaagatgtctccatagtcaagtgtgctctctgcttccacacatatcttggccattgtacgaacagcaagctctgggtatgctccagctgcggtttcaccactaagcatgacacagtctgtgccatcgaggacagcatttgcaacatcagtagcttctgctcttgttggtcgtggggatttgatcatagactcaagcatctgagtcgctgtaaccactggcttccccatgaaattgcacttgtagatcatcactttctgagctaagaatatcttctcaattggaatctccattccaaggtcacctcttgcgatcataaacgcatccgagtttatcaagatatcatcaaaattcgctacaccttcttggttttcaacctgacaatatcaaaagtaacatatcataagaatctgagtatggatatgtgatttatattagtttgagtgatgtatgtatatatgtacctttgacatgagaagtatggttttagcatgttttccaagtagcttcctaacttgtaccaagtccgaaccttttctgacaaaagacagagcaatcatgtcgatttgattgggaactccccattcaagaatgtcttgcttgtctttttcagttagagttgggagatcaaccacaacaccagggagattaacgttctttctttcaccaagcattgaagtgttctcacaacgacaacggacagtgcccttttctttgtcacaagaaaggacctttaacgagatggtaccatcggcacagagtatgaccatgcctggattcacatcttgcgccaacttcttgtagctcatgcaaatagttttctcatcacccttcaagtcatagtcagttgaaatggtgatttcttggccttgtttgagctggataggtttcccatcctttaagaacccggttcgaatctctggtccctgccagacaaatacaaaaatcattcccataattattcagaaaccaaaagggtcccccaaaacatataaatctatcacgttcatgagattattagcaataagaccactaagaagagtgtctcagctaactttaagccacattatacattccacatttttattaactttcattaccagaaagccaagtaacagaccagagagtgagaatttgaagcaaatactttaatgagattgtaatcttcattttcaagacgacaaaggtaagagtctaatcatccatgatgcatcaactttgtattaatattctggtctaacaaacaacatcagttctccatttggtttctgtaaccaggcaaccatgtaccacagatattgtctaattcatgctcgaactggaaacaacgtaccatgccacaaattataccaaagttcacaggacttaaacatagccaaaacgagtgtcctcagatcagcaggggaataaccaatcagataagacatgaatcacttgtaaaatgatagagaaacgatcagaatcatgcgtgaacagagcccaaatcaaaagaaaacgcctcgatggcattgttatacagacataaaaatgcacatatgacaagttttataagattgaccttggtgtcgagcatgacagcacatagcatgccagtgttaagcatggcctgacgaagattgtcgagagtctcctggtgatattcgtaagatccatgagaaaagttgaagcgagccacgctcatccccgccataagaagcttctcgaccattgggacagatctggacgccggcccgagtgtgcacacgatcttcgtcttaggcctctgttccatagccatcgcagtagactaacagatctcgatacacaaaatgataacaaaagacgatcacggagtgtgatcagatactgcgtcagagagatctggttaagaggacaaggcagagacaaatctcttcgtaacgtttgatgtggaaatgcaaggcctttggttggtggtggtggtgcagatgcaaaacctaaacgcaggttgctgcaacaaattacttggggactaaaatgaagaattgtgttaagtaattaattaattctgtgagttgagataaccaataatgaaaataaatacacattaacatacaaaaataaatgtagagtaaatcattaagattttattaggaaaataaatacttttatactatgaacgacaattattttcgtttttattatttgtggaagaaggaaaatatcaatgtagtattttgtaagattttgtagaataaaaagaaaacaaaatatgaatcgaataaacccaaaaaaaaaatctgagaattttctggacacttgatattgtcaacaattgaaaaaatgctccttgccaatttgtagcacttgatacttacttgtcgggaaaggggactgtaa

SEQ ID NO: 16514 - DNA, 554 bp, Arabidopsis thaliana landsberg
cctgagcttttttggaggtggatgatttatgtgaggtgcatttggttgacttgacaatagttcttagactgatagtagtgatcctagcttgaaaagtagctatcgaagatgatttttcttcaactagtgatgtgtgtcgatcgacgcgagtggtggtgtcgatcgacactcatgctacaactcgactttccttaggatgttgacaattcagcgatgcagtctgcgtccagtgtcgatcgacactaggtgagtgtcagttgacactactatctcgtattgatcctcctttgtcaatcttgctcgattctgctccgtcaaacgtcaacacttcctcaagttggtactggtgtcgatcgacacccaggtggggtcggttgacactatcaatgtgtgtcgaacgattctggagatcaatgtcgagcctggtcgattttgcttcgtcacaacccgatgtctcgtatatatgcgatggtgtcgatcgacaccaagggttggtgtcgttcaacactgcctatgcaactgcaaaatcctcactaactcatactcactttcca

SEQ ID NO: 16515 - DNA, 1438 bp, Arabidopsis thaliana landsberg
  unsure (1)..(1438): unsure at all n locations
ctttctaaaatttctacaagaatcgttttcacgttcctaagcatctgcatcgcttccgcatacacacttctgattccatgcaacgtaggtaagaagactaaccgtataaactccagcctttcctgcacatttatagtaagaatgttaaaacagtttgtgtctttacctaaaggtttttcttaacttttttttttgttgttgttcctccctaagatttgtatacctgacacaaaaagaaaaaagagagtcggttagagatttgtgtaaaccttgattggtagtggatgtatgtttgtgggagaatggccatgcaagaaaaaactaattcgttaaattttggttttctatatgctttagcttttataaaatttgttatttactcgtgacttgagatcgagttgggactgaatcggtgtcactgattcacaacaatgtgaatctctaaaagtagaaagtgatttgggactcaagtttatccagaatgtcttagtaaaagaataaaagattcttccgaatcttaaatgttctgttactcagtcaagagagagggactacacctggaatcagtgttttcgaattagtagtccttcataaatctttaaaaagaaacatatattcaaataaaaaattataaatgattaaaaaatattactaagttattggtaaaaaaacattattttgtctttttttattgagtatatatacaaactaacctttgacgattttagcctttcattgtgaagacaactttcctaagcttttcttcttcgtaaacaacatcatctatcttaaacccattcactttccaccaccatccgcaacatcaatcagaccacaaccgtcactagtcaactaccatcaaaccacaaccgttatctctcccacaactccaatcagatctaatcttccatcttgattctctctttttctgattgagtggattctctctcttccatcttcatggaagcgttgcatctgcaaatttccagaagggtggcttagccccttcaatggccgaatcttaaattcatttgtatcatctccctctcgcatcttacttctcatctgctgaatttctggatatttctccgttttatcgaaacttccaccgcatctctctttcatctgctggacttttctttaaattccatgttatttgttatgtaacacacttctttctccaaattctatgtttttttttttttatataacgcattttttttagaacaaattacttgttattttgttatgtaacacactctttttagaaaaaataccatgttacattattacatattttttcttcaaattcatgttattttgttatgtaccgcatccaattttctctaaatntcatgttattttgttatataacatactctttntaaaacacataatacatgttattttgttatgtaacacgttcatttntagatga

SEQ ID NO: 16516 - DNA, 692 bp, Arabidopsis thaliana landsberg
gccgctgctttatgcaaagatcatcatgagcttcctttgcctgttttaccaaatttcccaatctatctttagccaagtgggtaatcaccggttttagtgcctttagctttttcgcgaaccgaaataatgtcgagggagacatatgaattggctccgtttctccccagaaattcgccactaaaggtttgaactcctccatcattgtaatggcattgaaaaatttaaaaggtcaacgctcatgacccctttcttcactcactgttgtcagatttatcctacatcttaaatgatctgaacatcctcctgcttcaaatacattatacgacataggataattctgcaaccagacttcattcaccaagacgcgatcaagtttcttcataatcaacccatgatccctcttattactccaagtaaaaagcggaccgtgagaaaccatgtccgaaagagtgcagtaatgaactgcttcttggaagtcccgcattctagaagtaacaacaggctggttctccaattgcgagtgctcctctatatttaggatttcattaaaatctccaaaaatgatccacgctttattactaataattggagagtcgatatgatctcgtaacgcactccataaattctttctctcttctgcaaaaatgaggcatacacaaaggaacataaaaactcattctcttgatcctcta

SEQ ID NO: 16517 - DNA, 638 bp, Arabidopsis thaliana landsberg
aaacaactgtatacccattctctatcacacaataagaagatcctggccaaccccaaccattcgccgacatgtctgctgcactccatctaccttcatgtagcttgtaagtcacatcctttttctcagaccaaacatagacggttccttcataccttacgctttcgtacgcagagcctccaaatatctcctcgctagggatctgtaaaaactcccaagtttgagttttcgtatcaaaaacctccatccaattcgttgaatctagattatcacagcctcccattacatatattttcccatcaagggtgcaaactgatgggaacatgcggggcacccgcatgcttggagcttcacgccacgtgtgagaacgagagtccatgaccataacgctagacaaagtattactctttattcctccgccaatggcatcgatattaggaccaaccactgcaatacccgcagaggtagaattgggagataaaatttggaccaaaatctttctggaactatattgtctctggccaagaatgaaccaatgtagttgtttagaatcagtacggagtcgtaagcacacgtagaaacacctctcggtgcggcctaagagggttcgggttaggtaaagctctactgaagcaagggga

SEQ ID NO: 16518 - DNA, 778 bp, Arabidopsis thaliana landsberg
  unsure (1)..(778): unsure at all n locations
gatgaagtccaaaccattcgacgcttgtaaatcgggggaagatcttctcgctgattggtatcgctcgagtcggcgagcctacttgaaaccgagggagaaacgtgtttcgtggaaaactcatcttcggctcggaatcaactgacgaaacgaggatttggaaaatttctagccgaaaaaatcaaaatactgacaaacaacggcggaagactaccggaaaaagaaaaacgatgcaaagaaatcaagataagagaaaaagaagcaaacctcaaattttttcttcggcaacttcagataaataaatcctgaggcgcagctcaatatatatagaggcataaaggcgcgtcgggtccgaaggagaaattaaaacacttcaacagcgcgtgagctcggtaagagaaaacacgcacgcaaacctctggaataagcaagacgcttccagttctcaagaaagaaggcggccacgcataaatggaagtttgaccgtccgggaaatcgaagcgccagagatcataaattgataagacataccgccggctcggttatctaaccgcatgaaactcgtcgctcataaacaaagacaacgagctggggggcaaactgttggggtcggatttggcctcgtaggaaccgagccaactaaacaagctccgagaacgcctcagaaacatctgtcgggtatatttggctcgggaatcgttccaagacgcacactccgggctgatgacaagtacctcgganatcgcagcaaggaatcatcctgagccagcttagaaaacac

SEQ ID NO: 16519 - DNA, 1813 bp, Arabidopsis thaliana landsberg
  unsure (1)..(1813): unsure at all n locations
gagcgtaagggcatctacctttgattggtcttatactctggttgattgcggatttttgaatgttttcatttctgcagaaaggtttattgtgcaagaaccgggtggttagcaatttcgcttttacctacccccttcgcccttttcttgcttgcatcatcaggaaatgcatcagcattacaagctggaacagcgctgatgggtttaagctccgggtttatatttgcagcagcggtttccatcacatcagagctttttggaccaaacagtgttggagttaaccacaatatcttgatcacaaacataccgataggatcattgatctatggattcttggctgcattggtctatgactcacatggtttcaccgggaccaaatcaatgacctcggagtcggtggtgtgtatgggacgagattgctattacttgacctttgtgtggtggggttgcttgtctcttcttgggctaggttcgagtcttgtgttgtttattagaactagacgagcttatcaacggtttgaacaagctcgtataagttcgaacatcaacgactcttagaaatttgcatcaaccccaacggtttgtgtatatgtaggatctaagttataacagacggattaatggtattttagtggattttggctaaggttgattttttggtttggattttggttattcaactaaaacacaagagccgacacaatcatattttgaaaaagcanagattacattatgtattgaagtattgaactattgatagtaaacaaatttatggaatagagattaaactctggaaatataaaacaggaaatccgatggattcagcagtgaaagtaacatcatatgatttggtttcaagatcgtgtgtatttagtgtttgacttaacacacgaccacaaaacatcaacttcttcttcttcttcttcttcttcttcccatcaaaaagtgctagtggcaagaccgcgcatattccagtaacaaagtttaaatccaaaactatggaaaacaatttgtcccatgttttgttgcctgagttaaacgaccatatcacttggttcggccacttcatctcggatacgcacaagcggttgtcaaggttgtaaaagacgattttgtaaggatctacattggcaaagggagctttacagacgacttgaaaagtttcggtgtgaagattgaaaggtaaaactttggtttctttgcactcggtgaaccaataaagcgacccatctagatacacaggtgcggggtaagcagcaatccgataaggagcagcgggagtgacatacctccaagcgttggtactaaagtcgaaaacttcgcatgtagtagcgttttttaggcctatttctgcagagttgtataaccaaacgggcttgtatgtgcccctgaatttgtctttaccgaatccaagcataaagaatttgcgtttaagcttgtagtaaccatctcgtaagtcgatcatgagtttttgataatcgcaaagaggaagaggccgataccatctagtggtcgggttgaccacataaccggatttgtcgtgattgtaaagacaaacgagaccgtcacaactactatgtgaaactaagtacagtacgttatccttctcccaaggagtagggatcttgaacgttgatgatgaacccaactgcaatgttcttaaagattctatggtcgggtttataacatggtgaggaaatacagacaccatcagaacatctggatctcctgattgcgtggcgatgtttcaactaaaatgtgtatacatttttaatttattaaacagataaacatcattttgttggaattggaaaac

SEQ ID NO: 16520 - DNA, 1080 bp, Arabidopsis thaliana landsberg
gtttgctcaaatcattttttttgttgcaggttctgatggtgtgttcaccaactcgctatcaggctcaatcctcttcttgtggactatttctcacgtttggttcgtgttcgtgattggcaaaatttggtgcctctgcaagttggatgttcttcatctatagacttccaacgtgaggggggggaagatagccagtcgttgtcgggttcaactggttgttgcgctcagatgttcgagttcgtggttggttggggcttcgcaaacagattgctgctccgtttggttcgtttgagagtacctgagaggactctatttctggtgtttccacaactcgtcctgagttgtccggattttggtgttacaaagtttcgactctgaaacagcaagctgatgttgaaagcaaccagctgatttcaacgagagtctgtatttgtagcaggagtttgcgacgtgctatcaaagcgagtagctgacgaggcgcgttgttgcagtagtcgtgggaggctatcggtcgtgtggtcaacgtttcaactattgtgtggttagtcatcggcgaagcagcggaatgcacttcaaagaagacatcatatgggttgtcatatgaggttcgtttgtttccctcagcaagttgggtgtgcttaatttacacacttccaacttgagggggggtaatagggccggatcagacgtgtgacagatcaggcctgtgttgtgggccggatcaaacgtgtgacggatcaggcctgtgttgtgggctttgttatgggctttattagttttactttatgtgattagggttaatgttccctaactaagtatatatatgtatgtagccgtttcgaatgaataacacataatttcaagtatctaaacctaaattctgacaataaccgttaatgtgttttgaaataaaataaccatgttatatgaaaaatcaggcaaaaattaaatggaacgaaatatggaactaacactttttgatgtgaatgattttcaagaattatgacacatcgatatcaagaacgtaaatacttgttaaattatcacatttggcaatctcttaccgaaaaagttatgaggttc

SEQ ID NO: 16521 - DNA, 381 bp, Arabidopsis thaliana landsberg
acaaatcgcactcaaactgtcacaatacattgtagcctgatcttgatgcaaacggatatcactgaccaatcctttcagccaaataccctctttagcagcttctgttgaagccatatactctgcttctgtggttgacagcgtcacagttggctgtagagttgctttccagctaattacagaattacccaaggcaaacacataaccagtcattgatcttctgctgtctatatctcctgcataatccgaattagaatagcctacaatcaggctcggagcctcacctctgtataggagtccaacatcagacgtacctttcaggtacttgaaaatccttttcacagccagccaatgttcttttcatgattgtcccatgaacctatt

SEQ ID NO: 16522 - DNA, 2283 bp, Arabidopsis thaliana landsberg
aaatgataaagattaaaaggttcaagttcaaatatttaatttagacgaacattttcattctcattttcatttgtttttatcaatgataataaaaacctctcttcaaatcgggtttatcaagaaaaatatcttaaaactcagagtcttccaaaattagttatatgtattaatcttaatatttccaattttagttattaaattttcaaagtcaataaaaaggatttgtcgtatgtctatttcagaaacgtaagtttttattttggaaatgtgagtttccatcatgtttccaaacatagatatttaggaaatgcgtttccataacgattttcgtgtttccaaaaaatttccgtttccaattggaaacgggaaacggacctcggagcgactttccatgcaacctagctactcaataacaaaaaccttcatttctctctcattacaaccaaaccccactcctctttttacaaccaaaccccactccgaattccagtgtccatccacaaccatcatatcttaattttaagtttgcatcgtacggtccacaatttaacatattattttgctttctaactatttaagagtttgtaactagatggaaggtaaaatggtattgatttgcttaaaaatcttaaaaagtgcctactactctcaaagtgtttcaattgctagaagaatcttgaaaagtgccccaagtggtgagaaactcttatatatatgaaccgtaaacctctgttttatatgtttgttgatccaatttatcttctatattcattataagaagttcaagacttttatgtaaatttaaacttaatttatgcaaacccaaacggccaaaccatagatatgtctagaagtgaattgagtagatatacgaattttatttgtaaatgttcatagagtcttgattaagtcatcaagtgaactgtgtgaagaaccttccgggagaatagaggctcttagctcctccttcaaagtgacggctctcttcctcatttcctctccttcttcgaaaaccattaacctcttcacagctctctcgaccgctcctctgtctagatcaccctccacttgaatcccaattttccaaacacactccaagtaccttgcgttcacccgaaaatggcctgcaaatcaccggaactccttcgctgatcatgttttctagtatcgagttgcatccactatggctccaaaacgcccctattgcaggatgagcaagtacttccttctgtggagcccatttcacaatgtagttgatacatatgttttctacttgtttatagggcggaagctactgttactaagaaacctgcttttcctccatttccaaaacctacaagaaaactaataagtagctctctaagctccgggcttatagattactctgcttctcatcttctttgaatgttttatatatagaaatatcagattctcgcttgtggacactaattcatccgtataatgttttgttagctctctttgcgcacatgtgaagcatgtggtcgatggtgtacgcaagtagttacatctctttattttgttagagagagtagtaatcaaagacaaaagaaaagatgtttattgtgatgcaacaattctatattgagcaaaatgccaagagtgatacaaaagaaaccacactttgcaaatcttgcaacaattcaactaatattacatgaagttcaacatctttgctttgccttcaagtaactgacaatatcttccaatgcgttgtatgaggtgcctccactactgacagaggctttgatcttctctttttgaacaagggatctgtctcgcatccccgcaccttcgtcatccacgatcaacttcttgacagctctgtgaacctttcctctatccactttaccatccacctgaaaccctattctccaaacactttctatatacattgcgtacaacttttgctcgccatgaaagggcctgcaaatcattggaactccttgtccaatgctctcgagtattgagttccatccacaatggctccagaagcctcccattgcaggatgtccaagtacttctatctggggtgctcgttgtcacaatgtgtcctctgagagaccattttattgacatcctctggcaatgactctattccgttagtgccaaggatagaacccgctcggataacccataggaatggttggttgctattacacaacccccaagccatctccaaaacttccttggttttcaattgaccaagtgtccctatgcttatgtatatgactgaccttggtttctgcttgttcagccattcaa

SEQ ID NO: 16523 - DNA, 1962 bp, Arabidopsis thaliana landsberg
  unsure (1)..(1962): unsure at all n locations
atggaattgaatacttgagattgacattaaattattctagatatcgtaatataaaagcggatttcggtcttgtgacatttttctctagcactctgtatatatcttattgttattgattacatggcggaaacatctattatcaataaacgaagtgccatttgaaaatttaaaattttaacatttatccaaaaataaacttatagttttagtagtaatgtaaaaatagaattttaaaaacatttgttaaaaaaaaaaacaagtgttaaaagtttaaatagtgtgtaaaccattttaaatctaggacactttttaggggtttgcatgttgtgtccaaatatatatacaaaatttaaaaatttaacacttataaaaaacaaacccttatagttttagtagtaatataaaaatacaagtttaaaaacatttgtaaataaaagaaaaaaaatgttaaaaatttaaatagtgtgtaaccatattgaacctatgacacctcttaagggtttggatgttgtgtccaaatagttacacaaaatttaaaaattcaacacttgtaaaaaataaaccttatagttttaatagtaatataaaaatataattttaaaaacatttttaaataaaataaaaataagtgttaaaatagtaatgttttagtgaaggttttgtactaattagttttggttttacttaaaataagttataaagaaaagaaaacaattcttagcaaaaaaaaaaaaagaagcaaaagaaaagaatgaagaaagtaataccttgttggatttggtagcaaagaaagcccattggaagcccaccgtgagcccacttggaaaatttgagaagcttctttcttcttcctttcatcaaaagcccattggaagcccattgttgcttgcgtctttgttggaaactcgtctgaaattggtcgtcttcttcattcattgtcgacactgcgttcgacttgtcgtctcctatcaatatcatcacagttcatcttcagtctagtgtgatnnnnnnnnnnnnnnnnncgattttgttctcgtttcagagatctgagaagcttgtttttttgtcattggtcaaaagtttcgtcttcttgacgacttggatcattagagaggttttatttctctcataaggaaagcacttagaagaagcgagagagagagtaactatttataagcttgttttttttttccacataaacggtcacataaagatctcctttttttttatttctgtaatgtgtttaattgcctgtgtcgatgatgttgatgatccgatcctcaaaactcgtaagtataccaaccacaacagtgtctactttcatgttagtatcatgattcatgagagttttaaaatggactacttcaaagtccaatgtacgttgggactggcggccgagagaaacagagagcattattgctggtttggaacaagaaaggtcgagactatctctaagaaaaccaaaagctagctatgatgaagaaagatgacatctcttctctcaaacagatttggttgctcaaatagtctcgttttccggtagctgatagtctagtacagcttgtggtccggctctttcattactttttattcaatctttcattatatgctgtaaggaaatccaaatttttcactgtaaagtctaagcccagggttgttttacttgtctgtgtcagttgtttccatttttatcggttataagttggatcagtgactgtaatacaactatcaaacaacaaccttacaacctcatcaagaagccgatacatataggttcttccaaccggtttttggccggttacagcggaataacacaagagttacaaatcttagaatacacccaaacaaaaatgccccacgatacagtaggagcctataataataatgaaaacccnatcccatctatgagtgtatttatattatataaattaaatcatctaaacagcctctcgctctctggat

SEQ ID NO: 16524 - DNA, 1087 bp, Arabidopsis thaliana landsberg
tggaactactgctgctgaggtggacgctggtcctgcctaaactgctgaggtggattgcctgagaaacgaggacgattgctgcttccaggctggggtccactgatcttgcgcttgcgatcctccatctctttacgcttcctctctgtcatgattgctctgtcaatcaggtgctggaatgtcgggaaggtatgattcatcagctgatactgcagagggtcgaccaagcctctcaagaaacgatactgtctcttggcgtcggtgttgacatcttcagaagcatagcgagacagttgcagaaacctgtctcgatactcactaactgacgatgacccttgcttgagtgccaggaactcctctttcttcattgtcatcagacctgcaggaacatgatactgatggaagctatctctgaattctccccaggtgatggcgtcggggttggcatgggtggcgagataagactcccaccaagactgagctgctcctctcaacagacgggtgaccatacagaactttctccctgtcatcgcactgagcggtatgcaactcccgctccacagtgcgcagccaatcttcagcatccatggggtcagaagagtgagcgaacgttggtgatgacctctcatgaattcagcacgcttgtctctaggcatctgaggcatctgaggctggggtggtgcttgctgctgttgctgctgctgctgctgctgaatggcggccagagtctgaccgatggcttgaactgcctgagtctgcatcagaaacatctgctcaatcgacatcgggggcgggggcggcaggtgctgctgctggggcacctcatctctgcggagcggctcgctcctgctgagcacgccttcctcctctacgcctgttctctgacatctgcagaacgcaaccacacatcagaactgatctggcaagtcttgcagcataaggaaagagaatagaattcttcaacagcactgaacagatgagcatcttcactgatctccaacacagaccacacagcttctcagataaagaggaaagtagaataaagggtttcccaactatataactaactttattaacataataggtaaac

SEQ ID NO: 16525 - DNA, 1482 bp, Arabidopsis thaliana landsberg
cgataaatgcaactggatcaaagacttataacgctttgtctagcgttatggttatggactctcgttctcacacatggcgtgaagctccaagcatgcgggtggcccgtgtgtttccatctgcttgtaccctcgatgggagaatatatgttacgggaggctgcgaaaatctcaattcaatgaattggatggagatttttgatacgaagactcaaacttgggagtttttacagatccctagcgaggaggtatgcaaaggctctgagtacttaagcataagttatcaaagaaccgtctatgtagggtctagggaaaaagatgtcacctacaagatgcataaaggtaaatggagaggggcagacatatgcctgaatcatggatggagtctggatccatcatcttgttgtgtgatagagaacgtgttctaccgttgcagtcttggggatgtacgttggtatgacctcaagaaaagagaatgggcagctttgaagggtttggaaggactgcctacttttactaattattatagaaattttaaatcggcggatcattgtggaaaattggcgatttcttgggaggagtatgtgttagttgatgacgaaacaaagatttggtgtgcggaaattgcgattcaaaaacgccaaaatggagaaatttggggaacgcttgagtggtttgacaatgtgtttatatccagtggaccaaaccgtcatgtggatttattagtgaatgctcttactgcaacagtttggtgaattgaatcaatcacccatgcatttttttaaataagttgatcgtttgtcttcgaggcatttggacatgtctcatagtatgattatgtcttgcgctttttgttttaagctttttacttcagtttgggttttaacattccaatgtaatatttagtgactttgaccagacaaatgaaatattcacacgaatcttttcaagaagccttttttgctttcattattaactttgtttacatcagagagcaaacaaggaaaaatacacatgagagaaaaacaaatcagctaaacaaaatgtcgtttacttcaaaaaaaactctacttaaatctcactctattatctgaacttgtacaacatcaagatgacttacccttcttctcttcaaaaccttcttccattgaaacttggaccatcccagtaacttttttcaacagcgcaaaccaaaccagaaaactcaaatgctatgtatctaacctatgatgtttgttctttacttatctgaagcacgggagcagatcttctccatatgcataggccaatcttttccaagtatctcagtattcaactccataccagcacgaaaatctgacatcgatacatatgaaagccttctgctttgctgtgtatactggtaattcatctctctaacccgatcagtcccacatcgagtattagccaaactcaaacaaggctcaatcagccttctcataaacacatccaatccgctattaagaa

SEQ ID NO: 16526 - DNA, 145 bp, Arabidopsis thaliana landsberg
acggaacacggaaagaagcttctcatcatacctggacttctcactggtgatgacatcagcatcctcgtcgatgatggagtgtatgatgccattgaagccctattagcacatgccaggggggatccctccccttgactcaaaaaaa

SEQ ID NO: 16527 - DNA, 886 bp, Arabidopsis thaliana landsberg
tgtacacataccaacattgcatttcatgattaaaataaatacgaatactaattcatattaccattagattactaaaatttcacatacgtatacacacaacagaagctatacgtttcataaaaaaaaattaaaattcgacaacccttcaaaatcatatgcttacaaaaatatacacattatatcgcctaatttcaaaaatccgtagaataacccttcaaaatcatatgcttaccttaattacgtgttctttaattatacacacaaccaaatatataattgagcagtaataaaaaatacaacaaccatactaaacataaactacattgtcaaaacacaaaatctcaacaatttaaaaagaaatataatttcgcggtgtaccgcgggtcatatcctagtattatagaaaatcacaacaaaaagatcaatttcattacgaggtttatcgtcattggtaaatttcttggattaataagatgaattctagaatatttatgagatacataggtaaaatcaatgatttgaaaaaagaagatgacaaatttagaaccatggcagtaacgaaccaccacaatgctagaggaagaagagtaattagaaagaaggtgacgatggattgagatttaagttaatcttgtttacttcctttttttttcttttttttttttctaaaaagagtattttagtggagataattttttctacttaataatttataattaatatttttgagtaaaaggcagaaaaaacaatgacatcgaaaataaagaagcgctatcattagcttaccaaaccattacataattttgaagccaaaaacggtttatatacactatcgtttgcaagcatggacatgggcttgcccagcttgtatttgtggccagccggt

SEQ ID NO: 16528 - DNA, 1329 bp, Arabidopsis thaliana landsberg
  unsure (1)..(1329): unsure at all n locations
tatgttttccaaacggaatagcaattcgagcatacgatttttgcgcggtgagaatcaacagggctccttaaggtttcgaatatcttcagcaaaacatcgggacaaagcttggaccaatcgactttttgtctcatattcttattcatcttcttctttctcatcaaaccgttacacgtctccatgtcttcagacaactttaccaatcatgcgagggtttgtctgttctttatatatagtagggttttgtatcaagtacactagggtttttgcgttttagttttccttttttttttgtttgtaaatgatatgtttttattttactatatattatgatcgtagcatccaatatacaaaagctcttgatggaaattaccgaggcatttatttaactatatataataaattataatatcaaatatatatacaaaagctcttggtcgtttttttttcttcttttttggtcaacattcagaagctacaaactcaaatacggagttggcgtaacatggccaaggatccaatagaaacatgtatagtattnttgagaaatacaatgtgaatagcaataattatttttaaataaattactgaaattgacagtgaaaaaaaaaaataaatactgaacagtaattgaataccctcatcaaagggtgaaattgttagaaacataattaagaatcgtgaagagatcacatggttatgatttgatctttaatacaacttggtgttaatgctttgattttcaatatagaaaagattattgtngctattgaaccacaattaacaaattacgttactattgaatatacataaatctaaaatcatcaaatagaagatgtagttagttaaaattgtcaaatagaagatgtagttagttactaaattctaatctggacaaaaataaagatgtggttcatacgtgtgagaagagacactaccattcctttttttttttcttttttttttttttacacttaaatttaccttcaataaaacgaaacaaggttacatagtgcctccaaactgagttacacctaataagaactgaaacagaagacaacaacaacaataatagagcacattatcaatcaaagagaccaaaccaagtggcgaggaagaaaactccattaggacctaatctttgagctcttgaaagcggatccaagtgacaccgaataactgacttaatctccaaaatcagagcagctgcaggtcttgaagccgaagcgtgaagtcgagcatttcgttctttccagatcgtgtacaccgatgcatgatgggcaagcctaagaatcgtcgtcacattcttgtcctgacaaggattacttt

SEQ ID NO: 16529 - DNA, 809 bp, Arabidopsis thaliana landsberg
taaaaagattgaatataatcaatctttttccaaatgactttatcaacccatcaatttattcatatcaacacaatattatcatcatcattaccctctcataatatcatattatcatcaccatcatcatcatactatcttcatcatcatcatatcaacatactatagtcatgatagctatcattatgatgataacattatgatatattgtgcaaatgaagtagatggaggaggagtttcttgatcttgttgttggacacgtcgtttttataaaatccgtgcttgttccgtctcaaaatatgctcaaacatttgggttttgaaaggaattcaaatcacaaaatattttttttctttttctttagctcattcaaagcataattttatatgtatatatacataatgagtgtaatgtaaataatattatattttatggaaactttgcaaaactataatatgtggggtcaaattgtaaattagataaataaaatgtattagtatataaaatagaaatagaatattttttaagaatattctttttagagtagaaaatagagggataaattgtatagagtaactctattttcgagtaagatatagagctatacattggagatggtctaataaaactcatatcttggaggcatcagctgtgatacgacggttgagggcaacggcagccttcgaaccattgggacgaccgagatgcttgctgatgaaatctccagcagctataagctttcccaagtcgacattggtgtggacgcctaaaccgttcaacatgtaaaccacatcttctgtggctacatttcc

SEQ ID NO: 16530 - DNA, 612 bp, Arabidopsis thaliana landsberg
tgcttccacataccaatttgtttcctcatactcaattctctggctgtacatcgaaatgatcttgatttctctcggacaagaccctgaaatttcaagaatcgctggctcctacgccttttggcttataccggctttatttggccaagcgattgtcataccactgtcccggtttgtgctaacacaagggttggttattcctctgctcttcactgccgtgaccacccttttgttccacgttttggtttgttggactttggttttcttgtttggtctgggatgtaatggacctgccatggctacaagtgtgtctttctggttttacgctgtgatactctcatgttatgtgagattctccagctcttgcgagaagactcgcggatttgtatcccgagattttgtgtcttctatcaagcagttcttccaatacggaatcccatcagctgcaatgatttggtaagtcattttaagttgtttgtccgtcaagttacataccctaatgctcttcttcttatcccgcttgcattttctcggtcttctttaatagtctagaatggtggctatttgagatactcatactctgctcaggtcttctccctaacccgaaactcgaga

SEQ ID NO: 16531 - DNA, 845 bp, Arabidopsis thaliana landsberg
ctttggtttgggtctttgctacctcggtttttagacttaaaaacccaagaagaagaagaaatttacatgacatgccgccgagaaaaaaaagagatgtgagtctaagtatatttaaggtatccgatgaacctgaataccacataattagacattactaatcactaagcattaatgaatcaaatggtttacataccatattcgatcataatatacacaagcatcatagattaaacacaaaaatcaagtacagaacaattctaaggttcaatcacgtgcacttagtagttcagtacaagcttagcatgaaatcactcaaagggtaacatcaattcgtcctcaaatcatcatgttaacttacttcaataatcccatttataatttcatgcatgcatgataacaccgaattttaagcgttttaagcccttgttttccatgcatttagctaagtttcatgcctcttttcatgcattcatagtccattttccttccttttcatgttttgcattgcatagcatattttcatttggagtattttacaggtaaaacatgtacttttggaactgttttggacatttctagcacaaggagtggacttgttcgagttcgtgcatcaagagaaggacaaggagctatgctcgggatatgtgatcggttagaggtcgagtgggacacttaggagtagaactgaagctgatcgagctatccgcttgagaggaagttgaatactatccactctggatttctactcgccccaaggtcgagtggtgttgcgccgtctttgctattttatcgttttcccatttaaggtttcttaggatttgctatagatagggcctcatgtgctt

SEQ ID NO: 16532 - DNA, 265 bp, Arabidopsis thaliana landsberg
cccccaaaaccgaagtctaacaatgaccttaagaacctaattcctcaacagctggcaatcacccattcgttgcgccaattttcccacctcgcgccgccgaagtggggatgtagacgacggaagtagtaggcaccaatgttgtccctagtcttcccggactagaccagcacgaagaagtagcggaagagagaagtgcagggggcacacctacgaacatctcgcagaggtggacgaagatggccacctggaggacggagtggggcat

SEQ ID NO: 16533 - DNA, 1206 bp, Arabidopsis thaliana landsberg
agctatagcagaattcacagagaagaggttgatgtctcttagagttaatgggtgtctagttctatccgaacagaaactgcgagcaattgtagagaacgcgaaatcggttcttaaggtaggcactgtgtgttttgctatgaaattttggatactatgtgtttactgaatagctttggttgtaaactgaaaacaggtcaagcaagaatttggatctttcagtaattattgttggagatttgtgaaccacaagccattaagaaatggctatcgatatggtcgtcaagtaccggttaagtccccaaaggcagagtacattagcaaagatatgatgcagagagggtttcgctgcgttggtcctactgttatgtattccttcttgcaggcctctggcattgttaatgatcatctcacagcttgtttcagataccaagaatgtaatgttgagactgagagagaaacaaaaagccatgagactgaaaccaaactggatctgcattctccattacttgtttgatcagcaacagggattggactattaagaagatgagtgaccagtgtttgtattcgttatggaatgtaccatttgtagctagctgtgttcattgattatgctactatcctagctagctttgtctaactagatatttgatgatgtgtcagtgattgaccaaaagattgattgcagggaaataaagaatttaacatttagtaaaaagcaaatgtttttgcaaattttggatcttgatgctaagagacagaatcggctcaacaaatgatatatgactaaccaatttgacaagacacaagacagtttcaagccactccattaatgtaacatatgtaaggaaacagaatcatacatcttaagatttttttatcttcaaataatgcttttgaaaccaaattcatgaattgaataaccactctaacaccccaatgcttccatggagaaggctttgggcagcatatttggataataagtgaagaacatatgagattccataaagatccaaatacctggacgaagaagaaaatactcaagaggattagtttctcatattccaatgacatgccatatgagtttgcctagttgtttatgtcaaccacgagctttcccatttccaagtgtaagctcaagatcctccatacccacatcatgtatcctctctccttcccagggcttaacttggctattctcaaatttaa

SEQ ID NO: 16534 - DNA, 1541 bp, Arabidopsis thaliana landsberg
gtcttgttgcctgttgtgacccaaatgcctttattctctaagtatcagagagtctctcgaagaaacagaaggttcaagtcttcgtgttaattgtcacatgtgtggttaacacgtgagaagtcaacgcaggagtattagcgttatatctttagctcattctgtttcatcgttcatagagttgttgtaataagataagagagagagagagagagagagagatcctttgtagagagagaacattatcggcgatctagtggattccggagaatctccggcgagacgtagactaaccacatcggttagttgaactcgttaaagcttggtgtggtttcttcattcttaaacaaaaacacgagagtcgagagtgtttagtgagctaaacttgaagacgattcatcttgaatcatacaaattggtatcagagctctggttcataaagaatttgaagatcggttataagaatgacggattcgaaagtaaagattgctcaattcgatggatatggtgacttctccctctggagaactcggatgttcgctcacctcagagtgttggggctaaagactgctctggtggagcaaccaccacataaacctctcacggaagaagaagaaggagatcctgcaaagaagaagaagtggatcgaggaggaagaggctagaatagagcgagatgagaaggcgatggacattatgttcatcaatgtcgcagataagattctaagatcaagaaaacattcaaaatctgcagcggaagcttggggaacgcttgagagattgtatttggtaaagattttaccaaatcgtgtatatcttcaactaaaggtttacaactacatgatgcaagaatcgaagactcttgaggaaaactttgatgagttcttaaagatgattttagatctgaataatcttcagattcaagtcccaaatgaagttcaagcaatcttgatcctgagtgctcttcgagagaagtatgatatgttgaaaaaaacattgaaatatggtagagaaggtataaggctggatgatgtaataagtgttgctaagtcaaaggagctggagctgagggatagcttaggtgattcaagaccggttggtgaaggcttgtatgtgtgaggaagaccacatgcaaagggtaatgatcaaaagtttgggaaagagggcaagaaaatctgttggatctgcggtaaagaggagggacattttaaaagacagtgctataagtggattgagaggaacaaggctaattctcaacaaggagaatcagctctggttaaagatgatgcacaagatctggttggactagtcgcatctgaagtgaatctcagtgagaatgcagatcaagatgagtggataatggacacaagttgctcgtttcacatgactccaagaagagatgtgcttattgagtttcaggaaattggaactgggatggttagaatggcaaacaactcagtcacagagatcaatggtattggcaaagtgaggtttgtgaactcggatggtaccacctttatgcttcacgatgtcagatatatgcca

SEQ ID NO: 16535 - DNA, 1856 bp, Arabidopsis thaliana landsberg
agcgaatggcacaggtgatcttctcactacctcagagcgaatgtggtataagttgttggttggtgctgtgcaagagaaaaaatctatagaagccaaatcagaactccagagtccatgttgtgttacttgtgttaaagaagaaaaaaatgttctcgctgccgaaaaggtgttgcaggggttgttttgtcatgaaaaccttgttgtttcagcatctaaaatggatcttgagaggaataaaaatgcctggcatgtcttgaacttatcagagaactattgtctaccctctctaaatgataagagtttgttgagtgctgtttttgagggatctggcgttgcaccaaaatttgtcggaacaaactacaatatggattccaattcggtagatctgaatatctttcttctcaggatgacaccaaaattctagaaacgttatttccttttcctacattgctgccgtcattccaggtacttagatactgatcattttatgtccatttcttcacttttatcccatgtgcaatagtttatgatagcggagtttgaaatctttgtgatcaacaaaaaagtcgaagctccatatgtcagaattcctaccttaccaaaagaatagtacacttccttcaagagttctcagctggatacttaggacagagccaaggaatactctacttcctgttgtaataatgcaagaatgcttcacaatcaacatcaggaggcaggtacggtgatgtaagctgtacattgccacttgttgctacggtatgcatacttttgttacgttctgatagctgtgcgtgttgtaggtggacaacattagcaaagtgattttttcaaaactaatgaatgaatggaaattgatgcacgaacttgcggtgttgcgtgccatttatttgttaggttcaggtatgttttatgtgctttaacctttttggcaataggattgtaactggaatcttaacaaatcctataaatttttcaggggaccttctgcagcattttttgactgtcatatttgataggctgggcaagggagagtcatcaaatgatgattttgagttgaacataatgcttcaggtaaccaggtttggtgtatttttaagagacactgctctcatctttatagttgttatcacttctaaaatgattccgcttgttaattgtttgcttatgtatccgagttctgttgccgtatatgtgttcatacaccaaacttatttctaaagtgtaatggtcttctacaggaatcaattagaaattcagctgatgccatgctgttaagcagtcctgattcattggtggtatctatttccagagaagacagagacaaagatgataagggtgacataatacccctttcttcaactcgtaaaagccgcgttaacagctttggaatagattgtctcgagtctctcaaattcacatacaaggtctagagaaacaacttagtcttccatccaattcgtactggtatatctcataggccacatctatgtgtatttgaagagctgaactgttttcttttttaaggtgccatggccacttgagcttattgccaatagtgaggccattaagaagtataaccaggtaaccctttctcatccagctatttttgtggtaaacagtttgttgttcctctatgtggtaattatttaattgaaaacaggtgatgggatttttgttgaaggtcaagcgagcaaaatatgtgcttgataaagcacgaaggtggatgtggaaggtctttgatatctctcaaactcatttctttcttcttagactgtatcccgtgacttccaaatccagtttgaaagagcctaatcagtcttttgatctatacatataaatataaaagggatcat

SEQ ID NO: 16536 - DNA, 642 bp, Arabidopsis thaliana landsberg
aacaatgaattgacaacgacacaaaattgatagttaggtttttgtggcctaactattgtgtgttcaattttcctttaaacactaacatgtcgatgcagcaatagggggtgtcaatccatttcattctgattgctaggtggtcaagatgtgtacaaaagcaactaattcaagccaaaatacaatgatggtgggtttctagtaacagtcttaactcaagtttcaaacaataaaaaatacaaactaaagtgccctactcgatcacagggttgagtagaaccatgaaggcaacatattcaagtactaaaatgcaataacagataaatgaacaagttaaaggaaaatacacaaataaattaaagaagaatagaagtcctaaggacggattcatggataagggcaaactgtgagatctataaggtggctacaggcgaaagacaaataccctaaagaaaatgttttaaaacaaatcaaagcactctcgtatcattgaccctcaaactaagctaggtccagactcgggttttgtcgacataatctaattcaataggcactaaacaccaacagagtaaagccaaaagagccctcaaagggccatctctcggatagatgaactaatctctagaattagtagatcaggcatac

SEQ ID NO: 16537 - DNA, 584 bp, Arabidopsis thaliana landsberg
  unsure (1)..(584): unsure at all n locations
ctgcagttctctttttcacctgaaacaatcaaatcattttgatgcatgctcacacaacaatctcaatgaactaacagttcgaaagttccagagcaaaacttggaatggtatatatacaacacttgaagcttaccaattcatattgctcgtgcaaagtctctgtttgtaaattgtgtttttcactatcttctatccaagcaacactgtataagtcacccaaacaggtctcatactcagaaggaggactaggatcctctccaggacagtaagtaccccagctactttcttctgcattcgatgcagttgtcgcgtaaatatttaaaccctctggtaaaagaccttcaaaaatacttccagattcacaagcctccaaataaaacacctgcattcactaaaaatggtcaagcaaaatcacatgtagctgacaaagaaagcattttcaaaagagcattgtaccaagctcttatatgttcctgaagcatattttttcttcaagacatanttgagatcatttgatataggttggagaaagttggcatccctgaaaataaacatggagattcaaatcatcaaaactttagtaa

SEQ ID NO: 16538 - DNA, 1122 bp, Arabidopsis thaliana landsberg
aaatacatgttttttaatgaaaataagtttcaatcaatatttaacgtaattattttataaaaatttaattttataaattagcctcgagattttttcatctaatagataaccctaacaattatcatctcaatttttcaatgaagtactataaatcattgccttgagcatttttgtatctcctcacatcgaggacaagtacgtcgacgtaatttataaatttgtatcgaagtgaataatacatcatttgtgctccaaccaaggcaaatagaatatttatcatttatttttcagtaatcaaatatgatttttttttcttggatatttatagaattcctatttctttcaaaatttaatcacatatttaattaaaaaaaacttgttgatcttcttttaaaggcgtccattttgataaagttggtttatttggagatttggaccaaattcacgtaacatcacaattgtcttcattatgggctccgcagccagtcccttttcggccgttagtctattttgaatttgttcatcgtcggtttgattccaggaaagtcacaaagtttaatttagcaaaattttagtaattatcaatttcagtagactcacatatattataattatttaatactatccttgctactcttattaaaaatagttcttaataattagtatacatccaaaagagacttatcttcctggttaattactgtattaattcgcttacacgacgagtgacgtttttttcacttaaccaaaatccaaatgttactctatgcagtcgccgagaaatcttgtgtatgtaatgagtaggtctaagtcaagaacggttaatatatagtccttgtctgaccattataaacaatatatattatcttattgaaccttttaccaaaaaaaaaaatatatatatattatctttatgaaatacgactatataatatatatatttctaaaactaaaattaagagtttatatgtgtaaagagtttacaaaactttaattgaactagatcaaagggtttgtttggatcgagtaaccaacattaaattggtcagtttaagtgactttttaggtactttgctgtctaaaatttacaagaattttgtctttaacaaccacaaaaccata

SEQ ID NO: 16539 - DNA, 557 bp, Arabidopsis thaliana landsberg
tgactagcatttttttacctatatcgtcaaggaacccattgattattttatatgattctggcacatttctttctcgggatttatgacacatttcataatgttgagatgagataactgcagaatgttgagaatttagagattacaaagctgttttacttagctagattggtaacttggagtggagctactttagttactgacttcgataatgccaaacaaaatttgtatgctgtgttccccttttcttttatgatgatatttgagatgaatgtatggatatgttctgtttttatgcatagctattaagttgtcattaccaagcacaaggatggtgtgtttagaatcagttagcatcataattttctagtttgggattcaaaatgatgttgaaaggtctttttgttgacagataattgcgtccggaccattcaccacatcagacaacttgctgttggagccactgaatgagctactagcctatgcaaaaagaaagccaccacagttactcgtgcgtgttggtaactagaatgcattcacacattctgtagatatttgtc

SEQ ID NO: 16540 - DNA, 721 bp, Arabidopsis thaliana landsberg
tttcgagttttcccgcttcacttggatgttctttgggcaggataaatcagaaacctaagggaccctaaagcgctttctaaggagagctcaaaacgaatttgagcttcaggtgaaaaagataagaagtgacagcgggtccgagttcaagaacttacaagtggaggagtaccttgaggaggaaggaatcaagaacgagttctacgctccctacacaccacagcaaaacggtctggtagagaggaagaacaggatgcttatcgacatgtcaaggacgatgcttggagaattcaagacgcccgagtggttttggtcggaagctgtgaacacagatcgccacgccataaaccgagtctaccttcatcgcctcctcaagaagacttcatatgagcttctaactggtaacaaacccaatgtttcttactttcgtgtatttgggagcaaatgttacattctagtgaagaaaggtaggaattctaagtttgctcccaaagctgtagaagggtttttgttaggttatgactcaaatacaaagatgtatagggtcttcaacaaatcatcgggtttggttgaagtctctagcgacgttgtatttgatgagactaatggctctccaagagagcaagttgttgatcttgatgatgtagatgaagaagacgttccaacggccgcaatgcgcaccatggcgattggagatgtgaggccactggaacaaaaggagcaa

SEQ ID NO: 16541 - DNA, 922 bp, Arabidopsis thaliana landsberg
tcaaagatttggagccaatccacgcttgaacatgacctctctctgcgctgcctcgtgctcgacgcggtgccgagacactagagcgcgcactggcctcgcccgcgcacgccctgagcgcttgtcagagcctcccctcgtccgtgctcgcccacgcctttaaaaccacccctgggcgcgcctcacctcactccgtgctcaccctcgccggccagacacccctcccttaggtccggcgagctctcctccgcccgccatcactgcccgagcctcggccaccgcggctagctcactccagccacgtccaagccgcgcttgtcgctcggatagcttcgccagtggcccgtgaagctttccaagccctcgaacccgacagaacctcaacggagacccaggatcgccttctccggacttcggtcgcccgtggattcgcgtagaccgagcaatccggtgagccattcttcaattcctcgcgcacaccccttccttgatctctggtgaagctctatgacccgtttgattggtcaatttcgccctggataggccggactcctcgccgccgacgagctcccctcgcctgcgcacgcggaccggccaactccgaccatccccgacgcgactcgcacatcgtcgtgaccgttaggacctcccctacaccctcggccacctcaccagagcaatctcgccgccggtaagcccctccgccctttcttccgtcgctggtactgtttagtttggggaaaggacctcgggttaggattagaagaacacagggggttttctgagatgtcagtgactcatttgaatagtagctcagggattagtctgcaaggaaaacttaaaacacccgccagggaccccgttgcaaagtagttttccatttaatcatttctgtttaacctttttaataaacagagaacttaga

SEQ ID NO: 16542 - DNA, 3172 bp, Arabidopsis thaliana landsberg
  unsure (1)..(3172): unsure at all n locations
ggcctatttactgatttatagcgtgagtgtttcaaaaacacaaaatggttttatccgtgaatcattttgagcaattatttgccaaattcctgagttatatggtcaatagaattctcaacaattggagaggagcgtgttgcttctcttgatgcacatgttggtaagattaattggtgactttatgatcaaacgtttagagcagtctattgctaacaatgatataagagtgttaagaacttattttcttcttgtcttcattctccttttacaagtgttaagagtgttaatacaattatattaaagacaaatatacgaacaaattactactgtagatgtggagaaaagagtgatagagattgcttgttaaataaataaaaagacacagaaattggtaaccgagttcacggcctcaaccggtacgtctagggggagatctcttgctcccaaagcttcactatatcaaaggaattacaaacacaccactaacttgtgatgttgtcttttggtttttacagatttgcactcaagaaaaacaaagatttaagaacaacaaatagaaagaagaaagcttgcttaggaagctcttttttatctctcttctctagaacactctttagattcttttctcacctacctccaccatacgtcgtacgttgtaatgcatatataggtgacgtaaatgggctacaaactttttgcccacacttttgttcttcttcaccttgccaattttgttggcccattaaagcccaatgcttgtgttatgtcaaacccaaataacaataggaaaaatatgattggtgaacagtagtaattctaccaatttcacaactaatatcaaaataaaatattctgacatattttttcaaaacgctggacacattatacaaattgtggggaaaaatcaatattaattacgagtttgatatatctacaccaaaaaaacaaaaattcacaattaattaaatatataagttctgcgaagtccagaattgtacgcataatgatatacaattacgtaaaatatattacaattatgcaagggagtaaaaagacacaaaaatattaataagtatcagcatatagacccaacggctataatgctacacattacacataaatccaacaaataataatgacaattaaaagctcttcaattatataatcaaataacagtaatgttaaaccttaacaatgtcactatataaataacaaaaacacacatgcagaaaaccataattacatcaacaaaaatatcaaaatggaatatatacaatacgcaatgcgctatgaagcaagtgcaacatcaacccatccacccaacgagctccatctggatttatgaagaccccatcgacaagaaaacaacatcagctacagaatctcattctcccacgaccaattactgtaaccgaatcataacatttgagagaacttacagactcttatcttaccttccatgacattgacgaagcaacatcatggactctgatcaacaatcagacaaattttatagaagctactattctctcatttggaacggacaacccacaaccactcaaagtcatctttgaaatcgaagataacagtccaaattcaacaacaagacttgatgtggaagtcactatacaacacctatcaattctacaaaggcaagccacaaaagatgaaggaggtgaatgctcaatgtttcttgaggagctacatggtgttcaaaacattaacaatctatcttgaaatcacaaatttcaccatgaatgtatttcaacttggttacatcatagaacaacatgttctaattgtagaacccaaatagtgtaaccttcaatttagtttcttattattcatgattaataaaataataatactcaagtgaacttgatctacgatatactctcgaaactattaaactaagaacttacttttaaaaagcaaaagagaatcgagacttcagaacttaaagtgttttgtgttttagagcttggaaaataatgagagggtgggtctctttatatagtagagacaggtaggattatgtgagaatattctcaggatattgcatatttttagaatacggcatatattgagaatatgacatatttcaataagattcaatttagtaagcttaataactaacaaacaagacggtccacaagcccgacagccctcgagccgacaactcgacaacccgcagccgggctcaacccggttggttcggttcggtccggtttggcccaaatttcccattttaccctcttatttttcattcaatacaactttgttttctacgtatgaatataccaacttgtagtaatatttaccagttttccaatgcgtactaacgacccaacaattccgttcagccgtttggcccgaatttggtcggaaagtcaccaaaaaatattatgtcaaaaaagttccaagaatcttaactgttttcaagtatattatcaccaattgtggtttcaaagctctctccctaggttaattgaacaaaaaaaaacgtagaacaacgcataacaaaacttatatacgtcacaagtatgttatcagatgaaacactttccacgaatagatcttcttcactttaggacacgaaatagatgggtattntaggtgtcattccaaaaatgttgaagaagtatcggatagtgcaattacaagatacaaggacttctgtaaagtccgcgtggcaaccaaatgaaataagcaaggataccaagggaggatcaaccgaacagaataatttacactgatctcaagaagagctcgatctcctcctaccaatatattttagaatattcatgggatattaccgactcgatgccgattcatctctatctcgtttaagccgacctaaagattctaatataatgacttaatgagagcctcgcccaggccagaagttcaacacacctcttgcatctcccttttcttcttataaaagttaatctcacatacgagagagcaataagcctttagaattgcactaggtactttttatgctttttcatttggttctatacactcttcttaatcatgttaactcaattattcatttacttattcatttcttattcatcactatgacccatggtccgaaggagttctaatgaactgaaatatgataaatatgatttttctatatttttttctctttttttttcggatt

SEQ ID NO: 16543 - DNA, 1274 bp, Arabidopsis thaliana landsberg
aagaactctacggagttgaattcagaggaggatgaaatgagagtggatgatggtgcactcatcgtcttattagaagaggaacaaggaactcaacatcaacttgaggcaatagtggaggatcacgggactcaacattaacttgaggcaatagtggaggatcacggaactcaacatcaacttgaggcaatagtggaggaggatcacgagactcaagaagatgaaacacgctatgatgagtctatggataattctgataggggggaacagtatgttgagtcgccacctgctgtagaaccgggtatgtttaaaaaaaaatgggaagacggaattgggttgaccttacgtcaagaatttccaaacaaggcagcattgcacgaggtggtggatagagctgcatttgctaacagttttggttatgtgattaagaagtcggataaggagcgctatgtcctaaagtgtgccaaagagagctgttcttggcgtttacgagcgtccaatatcagtaatactgatatattctcgattagaaggtacaataagatgcatagttgcactcggctaagaaaaggtagtagtaggctcaggaaaagaaaaggcaacccacaattagtcgcagctctccttcatgatcattttccgggacagttggaaactccggttccaagaattatcatggagctagttcagacgaaattaggtgtgaaactatcatacttgacagcgctaagggggaaatatcatgcgatttatgatttaaaaggtagcccggaagaaagctacaaggatatcaattgttatttatacatgttgaagaaggtaaatgatggtacagttacttatctgaaattggatgagaatgataaatttcagtacgtattcgtagctttgggagctagcattgaaggttttagagtgatgaggaaagttttaattgtggatgcaacacatttgaagaacggatatggcggagtgctagtgtttgcctcggctcaagatcctaaccgtcaccattacatcatagcgtttgccgtactcgacggtgagaatgatgctagttgggagtggtttttcgagaagctaaaaacggttgtacccgatacttaagaattggttttcatgacgggcataaatgcaagcctcataaaagccatacggaacgtgtataccgcggctcatcacgggtattgtatttggcatttgtcccaaaaagtaaaaggtcatgttactcacaccaaccgagacgtactcgcatggaagtttctggagtttaacgg

SEQ ID NO: 16544 - DNA, 1782 bp, Arabidopsis thaliana landsberg
ccttttaaatgtgaggcatctaatatctcagatcaaacttatacttttttttttgaagatgacatgataaacttaatgactttagtaagacgtaaagaaccaaatatgtatatatattctggtttttagtacaccattttagtaatagctgactgtctagttccaccacaaatcaaaggttacttacaagtcacaacaaatacgaccacagtgaaaaaatggcctctttacatagaaagtggaacaaaggtaatgagcaaagcattcatgttcataaacaaatgatacaacagagaaccaaaaaaggacaacgagggaaactaagttcctgcactcgttcaaactatatttaaccgatctttgtcctaacatgatccatcatcatcttcagacagaaagaaaacaaaaaatctaataaaggaatatgatttaatacaataaaaagacaacgagtttttcttgttctgtattgtgatttttgacaagaaagaaatcaacctatcatggaaaactgaagtttcctccgatctcagtattaccagccggtggattaatggcgacccaaagaagagaaatggtaatggccacaagaccagaccaaacatacacaatcgttggtgttcttcctcttcttcccattagacctttagcaaatggataaagatgtgccaaaacccaaaaactgaagaacactcctccaatcagtttactccactgaggaaccacactgtaaatcgtcctgctgaatccaaccgcaatcgctatcagattcaccataatgatggtaatcggagggatcataagtgaagtccatttcaccatgtacaaatccgcaaactcgtcgtctatatcatctcctccggatttactcgtgagcgtgaaggagatttcgactcctgctacaactttgagcaaaccttgaagcacagctgcgagatgagcacttgttcctccaatgagccaaaactgttcgtttctccaccattcctcgagtgagattcctgaccatttgatctcgaggagggccagtaagcagagagtgatggagatgatgagaaggtagactaggaaagtgacgttgagcgtctggacgatgaactgaccagagaagagggagagcgctggtaggaaacagtatacgatgaggaagatcgatgtgaacgggtagataccgacgtttaagtaggcaattctctggagtattttcattttcgagcttgcgagaagagcgttgttacgggagaaaaagatctccaccgagccagtagcccaacggagaacctggtgaagcctatccgtcaagttaataggagctgtgccacggaaagcatcccgtttcgtcacacagtaaaccgatttccagcctcggttatgcattctataacctgtgacaacatcttcagtgactgaaccgtaaatccatccgatacgtgatccccactcagttttatcctcgtaccagcaagagataacagcaatggcttctgctacagtcgatgcatcaagaagttctcgaggaatggtgagtgcacccggtggacgcccgtttttaaccgcagggtggtccgcgagaggccggccttggaactcagcaacgggaattgaatcaatgaggaatgttgagttaccgaacttcttcgggactagagagagattcatctcttcgtcatcataatcactcatacgcagagctcggttttcttcaggaatattcttcttcttgctacgagggaaacaacaactccagcaacttggggaaaagccttgcttcgaggcggattg

SEQ ID NO: 16545 - DNA, 509 bp, Arabidopsis thaliana landsberg
cctccttgcggcaaaacttggctttcggtaaatatccttttgaaattttggtataatttgcaaaataatattcagaagattgtttaaatattggttgaatgtttgtagatacttggtgtctttgattggtcaggaagcaaccccatgcctccagagttttggatcctaccttcctttcttccaatacatccaggtttcttttcttcacgtcttgaatatcttcatctttgcttcaataaactaagtagtgactagggtgtaacaatcaattaagacttgagctcttcgaattgcgtcgtcacttctaaattttagtctgaaaccatttaacgaaaatctgcagcgaaaatgtggtgttactgccggttggtttacatgccaatgtcttatctttaccggaagagattcgttggtccaataagtcctcttattttgcaactacccgaagaatattacttgcagccttatgcgaaaataaactggaatagagctcgccatctatgtgcaaa

SEQ ID NO: 16546 - DNA, 1161 bp, Arabidopsis thaliana landsberg
cacttgatgaactcagccagaacaaaacagagtacgcgaattcaccattctcacttaagcttaaatccgccatggtcaattccagaaagttcacaagcaacagcttagcgatcatcgcgaagtttccaatacacgaaagacacggagttcagtccccgcggcttcgaaagtcacctcatccaacaccgagttcagtcctcagaactgtgtgtaatgtaactaattaccctgcttcttgtatctcaagcatctcgaagcttccattatccaaaacgacgacagatccgaaggttttattcaggctttcgttacaagttacattcgacgaactcaattccatcgttggtttaccgaagaagctcgctgaagagacggacgatgagggactcaaatcggcgcttagtgtttgcgaacatctgttagacctcgctattgatcgtgttaacgaaactgtttccgccatggaagttgttgacgggaagaagattttgaatgctgcgaccattgacgatctccttacttggctcagcgccggtgtgacataccacggaacgtgtctcgacgcgcttgatgaaatcagccacacgaattcagcaatcccactgaagcttaaatctggcatggttaactcgaccgagttcacaagtaacagcttagcgatcgttgcgaagattctctctacaataagcgattttgggatcccgattcacgggagacggcttctaaactcatcaccacatgcaacaccaatttcagtccccaagttgactcccgccgcttcactcagaaatgtatgcagcgtaactcgttaccctgcttcttgtgtctcaagcatctcaaagcttccatcgtctaacacgacggatccggaggctttattcaggctttcgttacaagttgtcatcaacgaactcaattcgatcgccggtttaccgaagaagctcgccgaagagacggacgatgagagactcaaatcgtctcttagtgtttgtggagatgtgttcaacgacgcgattgatatagtcaacgatactatttccaccatggaagaagttggtgacgggaagaagattttgaagtcgtcgaccatcgacgagattcaaacttggcttagcgccgccgtaacagatcacgacacgtgtctcgacgcacttgatgaac

SEQ ID NO: 16547 - DNA, 1661 bp, Arabidopsis thaliana landsberg
ctcccatcgaatgaaacagcttggcctcaaaataatacctccttgtctcccacggcaacatgacctatactcaaccacgttttgttgtagacacttggtgcagttttgaagagataagtctctactgcattgcacaaaaccgtaaatgcgtgagatagacgtctcaagctttcgtatcccggctgcatagtacaaatatgaagcttggtctatcatacgaatcatcaaagcctcccatgtaatttccaaatccgtcaagttagcttgaaaatctctggtatagttatcactcctcagaatctccataccaagggaactataaaacgagcggtttgagtaacgtacaagacaaactgttctatcaattctccagactatagcttctgtctgattagtaaaattctgcaacaatctagcatttgaaggatgatacaatcagaacaagagtgtgcatcagtacctgggacacacatccctagaccatatgctctgtttggatgttccccgatccatgtcgtgtaaaagccgtcgatagctgtgacattagaggaagagaagaaagcaggactcggcggtttaagtcgtaagtactattgggtgtgaagaaaccagatctttcaaggcatacctgtgcagagacatgactaaagcttatgaccacaaaccagaagattactaaaaacttgaccattttatttactctttccttttttgttttgatgtctgaaattaaaacctcaaatcttggaagatgtaatatttatacaggcgtttcaatttcaacctcttgtgctgtacaaaatttgactaatcgtcattgaattttctaacgtagacttttgatgatgagtcaatgtctagtttaggtgacttatgtcttatacgagcctgattcacattttttaccactttgtaccatatgaattggtatttttcctccaatgtggtaacaaatcttgttgaagcttcatcaaagcaaaacagcaaatgcatgattcttgaaagggtattaaattgaaacttttaaaatgtttaagcatattatgaaaagttaaaatattagtggggtggatttgtagttttttaaaacttggagaacagatacatcttactgtcattactgaggcaacatcgagtacattcaccggaaaatggatgccggagctgaaattgatgtggttcggccggtggaggcagattcggcggcggaaattagtccggaacaagaccacgaaggaagatcggagccttcgtcgttgaaccaaggggagattttaaaaacacttgctacggtggagaaggattcgcaggcaatcgcggagagcttttcgtctctctttgtttccctccgatcaactctttctgaggttagaagacgcttctgtgaatcgatttttgtttcttcggttacattgcctagaaaatttgacatttggggaaaactaaagtctagggttcaaaatccatcaattttgtgaatttctcttttcatgtcataaattaagaaactttaggagctagcagagctcaaattatgagatttcatcaataaatggaaaaccaatttcaatgtttatgttttgagctgtggaatgatcataatcttttgctgcattgaaaccaatgctaagtttgttcaatgtcctatgactgtttgtttt

SEQ ID NO: 16548 - DNA, 921 bp, Arabidopsis thaliana landsberg
gatatgaaagaaaaagctagtatactatggttagtattttcaattgcaagagaaagcaagaatcaaagttgggatcaggcataaaatacaaaaattgaggcaagtgttttagttagtctcaaaaaatgatggagccgatataacagggtatgaccacaataattatataactatttatttgtctttccaaattaaatattttgaattatattaataatttttaaaaaattaaatttatatagaaattaacgtctttcaatacatttaacaaattttatatgacttattttttttaactgacatctgagatctttagtcaagttggagggtttttcattgaaagttatcttaaatcataagctttaaatttttaaatgtgaagaaggttcatctattgttttgactttcaaaacaattggtaatacatgcatttgcattttcacaaaaaaaaaaaaaactgaataatttatgtttattttttaatatatagtaaaacatactgttttcacaaaaaaaaataaaaaaaaaattgaatgcaaacttttaattaactaaaatgtctttgtaaaaaacatcataatttgtaaacataaaagttactattattaattattttgatcgatatattaacaattataaataaattttatatataatttaatataaatattattctatatttaaaactaaaaccgaatataaaatccacgcatcgcgtggacaatttctagttttatataagttaagtatttgtacgttagaatcaaagaaaatgtgacaaatgggcctaattgataaattaacaattaaacccaataaaggccattaaacttcaaatccagatcatattagtgttatcatcataacttctagttgacgactggcgtctttagagttttgaacaattccatcgcaaataag

SEQ ID NO: 16549 - DNA, 1641 bp, Arabidopsis thaliana landsberg
ctctagaggatcccccctttttttggaagaggtgatgcgaagagttatatttaatcaagtgtcgttagctcaattgataaatactttaagcgaaacttagaggtcgccggttcgagtgacaacgaaactaatattacatgttgtggtttcgggtctgggggattacgggctccggcccagaacctcctgatattcaaaaaaaaagaaaaaaaacaaaaaatgtggctggtggttctagtttggacctatttcttacatcacattctaaactcttgatatttttatttttatctgaaccgttataatattttcaatcgagtaaatttttaaaagtggttatatatattttttatatagttttcttataccattttttttacagctttgcattgtttcctgacagctaaaaaatttgtacaacttttggttgctaatcagatttagtatttttatactcataaacgcaattatttttcattaataaatttaatgctgaagtcaattttttcgatttaatgcagaagtcaatttttttatttcaaaataatatttactagaaatgattgagtttatcataaaagttatggaaaatattactatatacgtaacaaaatttgcgtttaaatagtattcataatcatatgcgtaagcataattaacccataacttatttagaacatacctgacagagaagcatcagaataccgccagcaatgaacaaaaaccgtctaccaaaccggtcaataaccattgttgagagaagaagcgaaccaagattaaccaacccgagtatgaacgtcgcaataagagccggaccagaaccaaacccaaccgatcgaaacagaaccggcgcatagaacgcgttcaccgttattccagttaactgttgaaaacatggtatcaccacagcaaccacaagatgaggcctataccgtctctgcaatatcgtcttcataaacagttcggctctagcctcaatggctagctggcttgacctaaccaactctgctagctcggtttccacgtcagctatgttttcgacgccacgtagcttaagcagcgacgtgtgagcttcatcgtgtttcccacgcgccaagaggctagaaggtgtgtcggaaatgaatagacatcccacggtcatgatcgcggctggtacagcagctagacctagcgagatacgccagccgttacggtgactatcggtaccgtaatttattagattggctgctactactcccatactgatgaagcatgaaaagccgatgttgaatgctccacgccatcgcggtggtgctacttccgatagatataccggagccgcctagagtgttcacattttttttttaaaaaagagtatagtttcatccgtatttatatttattaaatgtgatagatatgctaacacattaaataaaattgtttaaaccaaaaccgttcaaaccgaactagattttgtttaaaaaccgacaaaaacaaacttaaacctgatctaaaattgttttagactttattttttggtgaaaattaaaaactgttttagacttttgtgtaactaaaattttacaaagtaggatacataaatatatatataaagtcgaatctaaaaccgtaattttatcaaacctaacgagttgtaaatta

SEQ ID NO: 16550 - DNA, 602 bp, Arabidopsis thaliana landsberg
  unsure (1)..(602): unsure at all n locations
ccccattgaaatccgatacaggtccaaggtcgcctttttctctcttgtcaggccgatactgaaaatagggtggnnnnnnnnnnnnnnnnnnnnccaagatcaatatttctttaaccaaaaagataatgcaggttacaaatattacccatcgagatactctcttgacgcattcccatcccatatatggatacctttttcctgaaggacctgcccatgtataaagtctatcatagatataaccaattcatttgcatagttttagagcatagcagagacactctggcttaatttacttttgcattggttgaaccgcttatgaaccatagaagttcctcaacaacacctcttcagaaaactctctacaaaaaaaaaagcaaacagattgcgtgagtttgattatgagctagtgttgatatgcaactgccactaaatacaacagaagacaaagcattctccttttgcgagtaaacgtgggaagttaaggaaaaagtgagcatacctttgttgtcagaagtggaaaacttctgcgtaaattgaatttcatctgtgttccaaggaaatgtgagatcatttaaccaactagagataaacagaatacataa

SEQ ID NO: 16551 - DNA, 860 bp, Arabidopsis thaliana landsberg
aggcgtatgacacgcctacaccaagattgtagagaagctctttgaaattgatcctgataccacagtcgtgggatttgctgacatgatgaggaaaaagatctcgatgcctgctcatttgatgtatgatggtcgtgatgataatctatttgatcacttctcgtccgtggcccagaggcttggtgtctacactgccaaggactatgctgatatactgcaacatcttgtggaaaggtggaatgtggagaagttgtcagacctttctagtgaagggaacagggcccaggtaacaacattagaaccatgaaaccgtttttgacttgacatgaaacctccaacttctattaagtttgtttactttgttaaaaaatctcaccttgcattaaggaacttacagaacctatcatatctataattgcattgtaacttctcctgtgcacttggagattcatcaaattggaatcggagttctttacactctactctgacttttggctttgttttaatggcttcgaacaggactacctctgtggattacctgctagaatccgcaaacttgaagagagggctcaagggagaaccaaagaagcagcaaaaaacataccattcagctggatttttggtcgagaagtcagggcttaaaagaagtaatgctaagcaattcattcttccatattataatcccaagcaagctataaaagatcttcaccaacaccatgatgaagaagccagaagtatgttatgttggaaagtgtgtacataacgtatgtgctagactttgctttgtttgcatcacttaaatgactgcctccaaagaatttgctttgctttgacgattttattatttatttctgcacctccat

SEQ ID NO: 16552 - DNA, 849 bp, Arabidopsis thaliana landsberg
agattggatgcacttctattatttttttgaacttttttttacctatgtttgaatttcccaaaatattttgatatatgatgtaaattggcatttattttgtcacagcatagcaggaccataattaggccataatgctagttttctatatgaaagtcattattatagttcttaatctttgtagcaatttccagacgaataaaaagtctcgaccactaactttacgaccgttaccaaaatcacaaagattacaacttcctttttggtttctgacctctcacacaaaaccaagattttgataaccacaattagaaacatacctaaactttccagtttcatgtagattctactttaatagcacaataaaaacctcacataatcaaaggaaaacaaagtaacaaaatcttcatcaaaatatttacaattaactaaaaaagcattaacctcacgaccttgttaaaaaaatcctccatttcttccactactctcatttaccctccctctcttaaaactcttacgtttcgttaccatctaatcaaaatcagaaactgtaataatgggaactcatcgaattttcataggtctcatcgctctttgttgtttttgtctacctcacctcattgaagctaagccattcggagtataccaacaacaagtatttgttgatcaatccggccatggaaatttcacgacaatacaaaaagctattgattctgttccaatcaacaatcgtcattggttcttcatcaacgttaaagccggtctttacaggttagtctagcaatattttgattgagtaattatcatgaagttctatatgtcttgtaatgaagttatatatgcgaaagtgct

SEQ ID NO: 16553 - DNA, 1726 bp, Arabidopsis thaliana landsberg
tgttaacactgccagcaggaatcgatctttcaagtcctatacaatcatatcgaaagcatttaacatatgatgttgatctaccttaagatgcaaatgattctcagtatccgtttggtaagtcatggtttacaacttggtaagtctcatgttgtttaatactatctaacgttttgttatattcagaaaatcataaaccaaattccaacctaagttcttcagtcacaacaactaatttggaacaaggagagacatcaaacccgtttaaagataaaagattgtttagaaactttaccaatgacattcctcttcagatgaatggcgtcacacattgtggacggggagacagaaccgatgatctcattcttcctgaatttctgcaatcaggaaatcaaaagaatttaggagaatgtgaccttaatggagaatcagatggtaaatattaaacataactaaattatttacatattcttcactgttcaaaaaactataatatgtgatgtataacaaaattctcttcttattttttaggttcagagtatgatatatatgatgatcttgaaaatggttttcaagatgaagttgattatgattcatataccaactacaaacaaaaggtgtcaaggttactgaactggttaaaaacaaaattataagtttttggatgatcttaagaagagtttgctcgccacttttggcttgagatgtcctacctctaatgaaaatatagagaaacattcttacggtgtgttatattcaataaactttgtaaatgaattataataaacttttttaaatgttcaatcaatggtgatcctataataaacagttttgagcgtcaatttaatatgcattcaagaaaaaacaaaacatgtatgattatatattagtactctgtgtatcctctatatttaacattttatgattttaaatgcagtatacattgatcatggtgatcctatttactcatgtgaatattgtggagctataatgtggcatggtgagcgtattaaaaagacagtcaagaataagaagcccaagtttacatcatgttgtttgcaaggtcaagtgaagttgccttttcttaaaaattcaccagaattactttatgcattgctaaccaatgacgatgaaatcagtagacatttcagagaaaatatcagggcttacaatatgatattttcttttacatcacttggtggtgatacaaaaaatagtgttagagccagtggtggtcctcaaatgttccagattcgcggagagaattaccataggatagggagtttgaaaccagacaatgatatacctccaaagttcatgcagttatatagttatatattgtagtcaaagagaatgaagttgataacagatcggaagccttcaggtgagtccattctttatagtgttactaatatttttgtatataacatttatgttgttttaatatttgttactgttctaaatttgacttatttgattcttaatagtaatggtgttaatgctgacaagtataaaaagaaagagttgagaaaggaaattattgatgttgtgatcaaattgctaaatagtatcaacccttatgtatgacacttacggattgctagtgactttgcatatgagaatagttagtaaacgggaaaaggatggcagtgtgtataatgtaccaaaggcatcagaggtagccatgttgattccaggagatttcactatagatatgccaagcagagat

SEQ ID NO: 16554 - DNA, 2571 bp, Arabidopsis thaliana landsberg
cgtcacgacgccgagagcagattcactgaagctatgtcgtgtgacttcgttactagtaactttagagcgtctcttaggaggaccaccaaacacgtcaccaaaatcgatgtccacgtcatcgccaccgggactacgcaacacaggtggtgctgagttggagcctaaaagaacggtttctgagcttggtaatgtctgcatagcacaaagacacagaatttgcaattgctccggagagggagatacatacagaggctgaaacaaaaggctttaagaaaaagacaaagacagaggtaagagtggggttccatttgatttgaaaccacaaaaaaatgggattttccggtcattacagagagaagaatcttaaagagtcttgtttgtggataaaacccacatacatccaaaactcttacactctctttgtcttccttgttcttccatatctctctttcttgcctaatctctcgtttgttgtctctctcataatttttttttgtggtcaggaaataatgcatagttaaaaaaagagagacttttctgactaaataagaaactgtggtcaacaatacagtattgttaataagactcttgagtttttcagctataggctacacaagattcttagtagagaagaagaactaggaacctaaaaggataactgattataacaacagatgtgggaagatgaaacttagcctaccttttttcttaactcgaggaagaagaagatgattgggtttttcgatatcttgcttaacaagcatccatctcttttatcaatctgaaccatcgggaaagctatccaacgcatcttgtttgccattaacgtagaactctaccacagcgtgcattcgttcgagtttatctggatggtaattgagatgcacaatcactggcttcaacttcttcagttcttgattctttctcactgttttgaagagtaccttactgttcatgaactcgtacatatccatgactctcttggaagcgtgtaagccagtgtaccctggatgcgaagggtaaaagagttgctcgttgaaaaccgcttggtcccatgcctctgacttagagagtgtatctgccacacgaccgagtaggtctattgaaggaagagatggtcttagatagaaaaaccctgaattgaaaacccatatcctcattgtgtgtgcatacctagcccatcccattgatggttcatcaaacacatcgttgaagccataagccgtgttattgtcgtgaccatcactcattgactcaacatcagagtctctgtgtaaatgactaaaaggattctgcaagaagacaatgtccacatccgatagaagaacactgtaaccaagctgcaagaactctcttaagacgcggaacttcagtccggaaacagcgtgattacctccgctttttccaaccatgtccactgctttatctggatctcgcttgtaaaacacaacctccttcgattcgcagaaactttccatggaatcatccaacgcgacaatgaggtagttttgaataccaactctctttacactagcaatctgcaactccaacattggtttcacatttgaatttgcaagaaccacaatgatctctttattgacagctactttctctaaaagcttagctaatctcgggttaacagactcgtcaggaacaacagttggattagttctcagactcttgacagtaccaaaaggccctgcctttatctctgatcccaaaactaagacttgtttccttgcattctctgtttcctgttccgccaaccgtaccttctccgttagttctcttacctgcttccttaactctgcgttctttaccgagataattgaaaagtctgatttgagcattttgactcgttcagatgattcacatgaagccaatccatcctgaacaattcaaaaaacagagaaaaaaaatgaaacttcaccagttaaactcaaatgttcaagacatgcaatttgtagttctactcaaaaatccatgaagattttgaatcttcataacaaacgaaagagactcaaattctcaaattccaacaaacactaattctaatcacaaatcgagagctcgagattacagaaaaatttctaaaaaaaggaatttgtagatgtttaaagcataagatctctctcagtaccgtagaggttgatttcgaaatgcgttcttcgttagcaatcaaggatgatcccgagttaaagaagccgttcgggaacaagacggaacagacacagccgataagaattccgacaaagatggcaatcgcaattcgagatccacggagctgttggatcctgtctctgcgacccgccattgccgaaatgacgcagaagccaaattgataaaccctctcttattctgtgatcaaactgtatttctgcaagttcattttatatgagccatttgtatttttttctttaagtttcatttactgtctgttgatctgttctatagttcattctattaacataccatcctgatagagaaatagataagtgggttagtaatttttaaaatcatgttacaaggttaacaaaattataataatttcgatacgacagtcgataaaga

SEQ ID NO: 16555 - DNA, 1200 bp, Arabidopsis thaliana landsberg
gtgacacgtggactgctccaacggtcggctggtgcaccggactgtccggtgagcaccggatagtgtccggtcgccaatcagcccagaggagcaacggtcggatatgccaaatctgacaggagatcgcgcgccggactttccggtgcccactcggcagaaggcatggatggccttccaagtttgtctccaacggctcctagctgccttggggctataaaagggacctctaggcacatggaggagttaccaaagcactcactaagcatcctaagactccaagactccaacttgacgcatttgattctttttgttagtgatttgagctccatttgagttgtgaactctgtgtgttgtgtttcgagatcaagtcgtgactcttgtgcgtggttgtgctgtgtatttgagtcttgtgtgtgttgctcttccaaccttactcttgtgcgttctttgtgatcaatattgtaagggtgagaggctccaagttgtggagattcctcgcgaacgggaatagtgaaagaaaggaaaacaccatggtattcaagttgatcattggatcacttgaaaggggttgagtgcaaccctcgtccattgggacgccacatcgtggagtaggcaagtgttacttggccgaaccacgggataaatcatcgtgtctcttgtgcctgttttcatcgtgactattgtgtttcacaagagcttggtccttagccacttgtttctattgagctaacacttaaccaagtttttgtggctataagtggttgatttttacaggatcacctattcacccccctctaggtgctatcagttctctctctgatcgctgcctttgttattatctctatggtttcacctatcaaatttattatgtaattggtatttagtcagcctagttgtctatcatgtcatagaactcagaaattgtctttagcttatttctgatgaaatcctagcagtggaacttgtcccttaggctatcgccgaagtagttgatcacatctcgatcaaaaacgtccactagtgtagagtgaattttagcaaagcgcttgtagtagtcgtgtatgctttcaccatccaaaataaaaggtttgtgctccatctattccatctgaccatgtacaaactagaactatcaactagacaagagaaggaaatgtctgtgacaatgtgcatttgatgagatacatttaaatgctaaca

SEQ ID NO: 16556 - DNA, 1814 bp, Arabidopsis thaliana landsberg
gttattgcgccggtcttggctcacaaaccaaaaagacgtcgctctcgctctaccaagcgttcgagaagtactccctcgaaattgaatgaaattcttgtggaggagaactcttacaatctcacggctatacctctggtcaaagtcaaaagcaaagagaaacaaaaaatcatagaaaaacgttcttatgctgggaagccacttttctcccctgctgcatccaagtacctcatcaacccgccttctcatgacaaggaggttgttactatacctattctggtagatggagcttattcagcggtttctcaaggcttggatcacaacttccccattccacttggctggggtgctatgtcaaacaagaaaaggaagaatcacaagaaaatgtggcataaccggcaagttctgcggttccgggagtctttgttccaatacgagctcatccctcttgcggagcatctcttcattgaaagctaagctttcgacccctctacaagtttttcaatgaaggttttttgttggaaaactgaccatcatgctccgtcaaacactttctcagcagttaagacttggagagctatctatcctcctggagttttggcataaatcagttggtttcaaggtaatatcccgaagcatgctttcatatcttgggtcattgtgtggaacaggcaacacaccatggaaaggttaaagagttggggactcatgatttctcctacatgcatgttgtgtaatgtgcacgatgaaactagggaccatatgttcttcacttgtgattacagcaagagcatctggactcacttcacctccaaggctaatcttagtccgttgagtcaatacatggcttgcctcctttggacacatagcgccaccccaaacaagcagttcactcttatcttcaagctcattcaccaagccattatctatcttttatagcgtgagaggaatcaacggcttcattccgacgctcaccgcagtgctccatctatcataaaaaaaatcaagcaactcatcaaagcctcccttgaccctctttctagggtgcaactttgtttacctccaaatttatctctcatggcaacatggttcttcttcttcgaaggtatagtttgtgttcgtcttttcttgagttctctttggcgccattggttcttgttgggttgttgttcttaacagatacaaggcttttgcaagatttgggtctcccttttcggctgttccattgttccttgggactttccttcttctttttgggccatcggtcatcctttggctttggcattataatttagccatgtgggcttgtttggtttttgccatgtatgttgggcatgtggcctgtttcggcttttgtcatgtaatctgtttaagttctaataaaaatttaaagtaaaaaaaaaaagtagaacaaaaactgatttttcatacaataaacgatattataatctagaacaaaaacacaagataattttgtcaatgtcaccaaaaatatgatcttgtaaagatagttcacacatatatgccttcacaatcactccgagcattctgagactcatcactcggatcttcaataaccatataaacagtcgatggcaaacgtctgtaagatcttaagctttgtcagtgtattttctcgagagacctctcatatcaacaaaccaatcagatgaatcatctgtccgtgaataaaatacttgctttgttttagaagctaatatgtatgagtcgctacaagaatatgcagcattcatagcaatagaagatagcaattaccatagtatttccacccattgccccttttcctttatatatgt

SEQ ID NO: 16557 - DNA, 1039 bp, Arabidopsis thaliana landsberg
acccttcatttagtatttatagcagtactcgaagcggttcctattccaatttcgttttgaaatcaaaatggctgccattattcgttcttaaacgcaatttcgaaaacgcaattcttaaaaatatattatcttcttttttttcaaaataaaaaacaaatattatctacctactcaatatttttgaagtacattttaaaaaatccaattggatcagactttttatttaatttttgacccgaaaatcttcaatcgaatttttcataattggtttttattactcttttctataaaaatttaattaaaacgaaattaatttaattaccaaatttaatatatttaatatttctaaactaaccatatttgttatttatcttaactaattttctaaaacatctttacctactataaacataaatatatgattcttttttcaaatttatttaatcttatatttaaattattttgaatttatataaaatataaatagttaataaaatattttgttttttctgtatatgatgtaattcaaatttttaaaatcgacatgtattattcaatcgatgaagaaataatatgtgtacaatgtcccacatcgcttaaaaaattggacaatggttcagagccatactataaaaataaccaaaatgatttagattaggaatgagcatgaaacttgatttatgaggtgtccaaaattaaaatagtttgtttactagggttatttattttaaagaattgaaactttaaaaagtttcaaaaaattataaattaaattttacaagaaatttaaacaatataaaatatattaatatgggacgatatactgcgagagaaatcttagatataacactcaaaattcaatgatgaagtttgggtcaatattaatcttttttaaagtttctaattttataaatatttgaaatttataataaaatgacaaatttgtgtttaatttcacgggacggggaaataaggtgtgacgggtttgagtggattataacatgggatggtatgctacggaaaaaaacctataattaac

SEQ ID NO: 16558 - DNA, 791 bp, Arabidopsis thaliana landsberg
gcaggtagaaacccgacgcatataagactaacttactaagtttatcagaatgcttctacggtgactaagtgatctgtgcatcattgttcttgttttgtagattcaagcatctatagctcaagtatcgcaacgacaatctaaggcccttgtaaaaagaaagtctgttggtaaaggcacagcgatcttatcgagatcacgacgtagtggtggcggctccagaagaagaaggaactgcagaaacattgaacaggatacatcagaagccaatgatgatgatgatcaaaacaaaagaggcaaagattcttcttcagatgagccttgtgagaggcaacgaaaaaagcgttcagcaactcagccttcttcttcaaatgcaaacaacaacgataactgcgcaggtaatggcacagagcagacgcatcagagggacagcagagtaatatcacctgtgcttgtgtggaactcggaactaattgcatggggaagaggcggtacaaggagtaacacaaggcaaggaaataataaccaaggagctattagtaagagaaatgctcgcttgaaaagacttgtggaatatctcgggagcttagagggtaatagtgtcgaggtaacaaaagaaaatgatctttgttgaccattatttatgatttacaattttggttttaagaaacataaatctattctgcagttggatattcatcttaagcttgtctcgctggatacagaaggtttactaaacttacatgagccaaatctttgtttccggcccactttgctagttaaacaactgcgcg

SEQ ID NO: 16559 - DNA, 1173 bp, Arabidopsis thaliana landsberg
tctattcgaagttcttttacattttcattttactgcattattctgctgtacctgactaataactctttatgggattgatttcctggcatctattcaggtatactttctgaaacctggaagttcggcacatgagcagttagagaaattggtcaatctcttagaacagtttgtttacttacacctttgacacccttttgtgtattgattacataaaccgcaaagttacaagtgttctacttactgtttctgtattgtttaaatgtaggtattatcatccttctaatggtggccgttggacttattccttggaacggtttttgcttcacctggtgatagctttccaaaagcgtttacagcgtgagcagcagtaagaaaagagcaatatcaccattattttaatgcattcaatcaaattggcggtctcttgattagatcctattgctacagagatccagatagtctgccagcaacctgtttaggaaagccggaaagggtagcttttgttggcgtggtgttgaagttgattgatcgtggtcaatatagcaagaacgaacatctttccgaaacagttgctgcagcgacatccatgttgtcttatgtggagccttctttggtccttccttttgtggcttctcggttccatttggctttggaaacggtttgtaatttgtgttcccttctttatcatacaaacttttgtatccttttactttatctgtttccattaagatgaaagttctcatctatatttgtttatgtatagtcagacaactgccacccaccagttgaaaactgctatgatgtccgtagcatttgctggccggtcaatcctgcagtcttccatgtcaactgctaaatcacaagatcttggtggtgatgtggacgataggatgtttcttgatcttattgggatttctctatcaaatgcattgcttggtatggatgccaatgacccccctaaaaccttggccactatgcaactaattggctccatattttccaatgtaagctcttttaccttgaaagtttttaaacattcactgttcaaaagacttctttctttatcggtgggttttgtccctgcatgttgcagatggctagttttggacgatagttctgatgacttatcattcatgacaatggcttccttctcggagtggctggatgaatttt

SEQ ID NO: 16560 - DNA, 823 bp, Arabidopsis thaliana landsberg
  unsure (1)..(823): unsure at all n locations
gacttaacaaacaatgagtgcgcgaagacaagaaagaaagaaggtgcttactggctcggcttttaacaattttgatcatatcactgaaatgctccaccagcaattcttcctgcgaaattacaagaaattaaacaaaacaataatggaaacataatacaccaaatcttactatctttttatgctctttgtagcttgtatacttgatcaaacagaaatcagcaaattataaaggcaatcaaactgaaacattgtcccttaccgcaaataaggaagtgttgctctttagtaattcctcaaaatgcatttgaattttcccaccctctggttcagcttcctagaatagatgaagattgatcaaaacattaatatatttctggtaaggaaagaaacccaataaacaatagatatgagttaagatttgtagataattcgcataggctgacttcttagtggtctacatgggtgcacttaaacatgagagagccaagggttcttnnnnnnnnnnnnnnnnnnnnnnnnnnnnnnnnnnnnnngttaatgagaaacaccatctgttgctttggccttgggaacaactttgcaagcttaagaatcaagctgtctactgccattcttaaacgctccaaatttatatcaagctgcaaagtttcatagacaaatgtcaagagctttgggtgagaagctccaaataacacatatcgttagggacagagagaatacttataacgaacctgcccatctccatataaaacattcaggtgaataaacgaagccgtgaattcagcataacgtctcatgatatagtgaggatgcacatcatcgt

SEQ ID NO: 16561 - DNA, 643 bp, Arabidopsis thaliana landsberg
ttaaaaaacacaaaaacaaaagggacctaagaatcgataataaataaatggtgtccctaatatttatttttataagcgtaccattggcgtaagcaaataaactggtgtacctaatattagatggtgtgtaagataaactgaaatttagtgtatacatgctggtcataatagaataacacatgcatacataaaccttaatacttttttttttctaatgcatatgacatgtgatttgtatttacaacttgcctttgcacatcggtttcgggtaagtctccaattgattttggtgtaaggctctggataaagctcttcttggagctggaggatgagaggtgttggagttgcaacaaattttttaccatacaagtatgacaaccccatgaaaatatcccgtaaataaatccatagagttcctgcgcatacacaaatatatttacagctataagcaaaattatttaaaatcaaagattttgaagatacggcaacataaagctaatgttgaagacacccatttgatgtcaacaggagtttgcttcaaaatttgtacatcaggagtctgcggagtgcacataacgtctgaaactgacatggcactcttgactaactgatttgacgagacaagtaagcgagtagctaacgt

SEQ ID NO: 16562 - DNA, 2853 bp, Arabidopsis thaliana landsberg
tgctctacagctttcagaattagcagaatccataacaagttcacactcttccatcacagccgcttctttaatctcttgcaacattttcaacacttgccacatcgtcggtctctgttccggcgatgttaagctacaagctaccgcaacttcagtcaacattccgaatttatccctatcttctctccaattcccattcttcttctcaccttcctctctcactttcctcacccattcaatcatctcatccaacggcaaaaccggaatcttcgaaggttgcttccctgtcaaaagctccaagagaagaataccaaaggagtatacatcagctttaaccgattgataatttaaactcttgtgtcgagcttcaggggctttataagctgctgcatccgcctcttcttgaccgtcattggatgttagaggagggtttgttgcaagagcaacgagacagtaatcagcaatacaagcttcaaagtcttgtccaagaaggacattagaggatttgagattgccgtgaacgagctgccatgcttggtggatgtaagagagaccctgagcgacgtcttctgctatcttcaaacaagatgtccaatgcaatggcgttgccctcgacgattttgtacctaaacaaataccataccaacttgtaacataagcttttgagacctcaaaaaaaataaaaaatatagtaaagttaactgtatagaaattccatctgaccactagagctaactgtacagtaaagttttaaaaaattgagtaaaaaacctcgtaagtcgtaactagtaaatttattacaagcattaatcacgcaaaccaaacaaatgcttgatgtcttcaatgataaatctactaatcatgtaataaaattcaatgctcaaaaagaataaaaattatataatcgcatgagatatggtttacgaagcttaccgtggacaagagacgagagactgccatttggcaaataatcataaatcaataacctctcttccttggcctgaaaataagctctgagtggaaccaaattcggatgccctaaagcaccaactgattccatgtgatgctcaaatttgtctctccctacacccgctaatctaatggcatctaatctcttcaccgtgacgatcaaacggctatcaagcaacgctttataagtggtccccactgttccacgcccccataactcagctgatgctgtcattagttggtccatcgtataaacgtgtgcctcacccgcacagaatactaaactcccactttttgtcgcttgtagcttcttcactttctcttctatctcactctcttgttctatcgccgccgctacttccgccgtctccgccgcgtcaaatgtcacaaccgccgttgattctttccccttttgtttctcggttttgcttcttcgtctcttcactgcgccgataaggcatgcgacggagatgaagaggataaaagcgccggagataaaaccgagaatcacaaaaaatcgtgaatgtttgttttgacttggccgggataatcttgcgccgcctatttgcgctatttgaccgagaaccatcttcggtgacggcgccgccgttaccggagtgaagaatttggctctcggattgcattctttgtgaacaatctcaccgcagagattagggtttttgagaaatgaagaaataccgaatcgtaacagaacggttgtcaccggtacagcaccggttaagttgttaaccgaaacattgaatgtatgaagcgtggattggtttaaaggcgggacgggaccgttgaaccgattcgaatcaagtcggagataaatcaaccggtcggagagaactaaaccggatgggattggaccggtgaggttattgaaggagaaatcgagagttcttaaccggtgaaaagcgagaaccgagagaggaaacgaaccggaaaaagagttgtgatcgaggaataatgatttgagattaaccaaaccggagaaatctggtaacggtccggttaaggaagtgttcttgagactcagaactcgaagctggtcgagtttattaactgagtcaggaatgagtcgccctccaagataaagatcttcaataaccaaacgaacaactctgtttccataacacgtaacaccccaccattgacaaaaatgagagctcgtgtttatcttgttccataaatcagctttggatttaaaacgtaacaaagcagaaacgtcacggtgataatgaaacacgcgctttgtgtggttggaggaagaagaagaagaagaagcaacaatggtaaagaggaaacagaagagaagaaacccagaaatgggtaagttacaacgaaaaagcatagcttgtaagaagaatgtgttaaagaagcatgtaaatgtctgtctgattattattacatatctttagagagttgaagagagcaggaggtacgtgacaaaaggatgtaagaaacaatagagaagtagctgtcggggactggaaagttttcagagtcacgtgaagactgataaagtaaagaagttgtgtaattattatagtgtatttatgatacttgtagaactgttgaacgaagtaaaagcatagtatggatcagattcaaatatattaatgccgattatgtaggaagagatctaactcttgttttctttctatcagaaacggatctaactactgtaacgaagacaaaatattattatgttttaggttagatttaagatctaatgaaggaccatatggtggttgagacataaagctagttagttaacaatgtgacaaagattatttttctactaataaatcattttgttttggtaaatggtaagttcgtttttttttttgcttccaattgaagtttcaactataaacttga

SEQ ID NO: 16563 - DNA, 847 bp, Arabidopsis thaliana landsberg
cttgttaggcagaaaaacaagtaagcaaagaatcggacatagaatcaaggaagcaaagaagtaaacaacgaatcaaagaaacagagaagcaataatgaatgtgtacaaggaaggaagcaaacacacaatgaagtaaaaagataaaccaaggacactggaaataaagcaagcaattcatgaaggcagaaaaacaagtaagcaaagaatcggacaaagaatcaaggaagcaaagaagtaaacaacgaatcaaagaaacagagaagcaataatgaatgtgtacaaggaagtatgcaagaatacatatgtgtgtatgcatagatgaatatatgtatatatgcatgtatgaatgtatgcatatatgaatgcatacaagtacataagcaaagaattacagaagaaaaataaggagacaagtaagcacacgtaagggactgacgaagtaaatgactaaccaaggaatggagtaagaaaatgaggaagcaagcaaataagtaacaaagaatcatgtatgtaatgtatgttatgtatgtgtgcatgtatatcaatgcgttcgttaagtgattgtgaacaacccatatagaattctctgaaatttgctgctgcaaaaagaaaactgaaagagcatcaaatccaagaaaaaatcaaaagaaccagcataagaaagagattgaagagaacatacttgaaaaaatactaaaccaaaagattagaacactgaaccggaggcacagcgatgcacaaaaccagtttatctccgattgccactttaccagtcactaccaccgctcctcacagcggcctccggtatatgcctgtccatatcaaccaccgcctcctctaccgccgc

SEQ ID NO: 16564 - DNA, 2411 bp, Arabidopsis thaliana landsberg
ttttcttactaatcactccaataacaagggacatgactccaagaacgatagagttaagcatcaaccccaacgaaccaacttggattccgtggttgtatagtttcttcattttgtcatctcctgctgagtctccaccatacacttcacgacccatccaatcggtatcgtataaaagaaaaggaaaccatgcgatccagttcaaggccgtgacggctagaagcatccacattggacgtttcatcaccttgaaagctccaaagatctcgccaaagaagggagttttctcattgtcggaatctgcattaggcgaccattgcttgtcttccacgtaccaaagagctatgattgtgaggactatgaggagagtgatggaaataatgaaacagctcttgagatttgcacaatagatgtcgcatgctttagtcactgtgaaagggaaaatcttgtggaggttagtgtacgatcccgcagcgtatcccaaaacgtttccaacggccatgaagaaagagaaaatcgcgttggcagttcgagttttcttagcatctccggctgctaaatcaccaagaaaagcacggcaaggtccttgaagagtgttgttagccacgtcaaggatccagaaaccgacaacgaagaaaccaacggctcttatcttgacagcttcgtcgagtttatctcccatggtgtggccgaagtcagccgcaaatccaattagtataacagcaagggcaacaagcaaggcaccagtggcgatgaaaggtcgacgacgtccgaatcttgacgtgcatcggtcgctgaagtaaccgactgatggctggacaagcaagccggagacaggaccgcaaagccaaatgaaagatgaccatttgtgtgtgggactccaagaagctgcacgtatggagtaagcagagacagttgaagagcccaaccaaactgaataccggcagcaatagaagccaccgatatcatctttctcagcggagatggcccatcaagatccaccgacgaggaagactgtctatccacagtcgtctcatctttgtttgcttggaggtcactcatcttcttcacccttgtcttagaggttgtgtttgttgttggcgctgaggagatgaaagaaagtgggcttgtctcttaaagacaaggtggagaagagaaatgagacttatatttctatagattttttgattctgtgtttcaatagtttggaaaagtaaatcttttatagtaatgctataacgcatatatccttataggattgttgtaataatgacaagactaacgttaataaaaccgtaatcagtttatcatcttatctttatatcatttattttgagattgtgacagatttttcaatttcttgtttctgtagtatgacttttataaatgattaactgaataacaagagattataaatggttttgaatgattttatatgtatttcatgtttaataacataggatatagaaagatatttaattagaaattattagttgaataacaggagatctaaaaaaacaaaagggatgattggttgttgctgtaaagtctttccacagcccaaaatatgtctacaacattaagactcatccagtgttgctttagacagtattacaaaagctaccggctatatcccaaatatagcaaaatcaaatgtcttggctgtacgttatcaaaatttccacatttgtattgtacatcacgtaaagaagcctgtgaactttctttctctctctattttttcacaagtgttttgctctttgcactaaagaaaagaatatctaatgacaagaattaacatgtctataatataaagataagtaaatacttttacactaaaattttgtagcactaacaagtgttttatgattttaaatgaatatcgtattcgttttattaaataaaaactttaattcagtttgtaaataatattatatttattaaatccaaaaaaatattatttaaatccatatacagtgatgatgatgctatcacgacaaattagtccaaaatgggcagcgtatcttttcttatatggggcctaaacaaaggaaactaactaattataatcaacttatgatcatcagtcaattatgaaaaggttatatttgacaggagattgtgtgtttaaaaccattttgagtatatctgttttgaatcatttgagacaattgtgatttttgcttgttctgatcccattcttttagtctcgtgcatatgtgatcttgtattgtctaataaggattatgatctgtcccctaaacttcaaaatttggaggccatgatctgatttttgaatgtggttcttgtagttttttgcttgatattttgcagaccaacaaataatgatggtgactttccatctaaggcaaatacagatttcatttctcgtttatacattcagataataaaac

SEQ ID NO: 16565 - DNA, 1239 bp, Arabidopsis thaliana landsberg
tgttaatctataattcgtcatcggattcaattagtccgtgaaacccttcaattcgtttatctcaaatcgatttgggttaggttttgatttcgacacttatgttaaaatcatccaaagcttttatcttcgattttggacaactttgtgtatattatatgctttcatggagagatagatgtttttgaatggtatctgttatgataattggatgaaccatatttcctatatctctcctgacatcgaataattcagatattaatgcttgtgttcctctctatatggaacttcaagtttggctattctgttacattcttacttttgcacaactctctctggctataagatttaagaatcatctctagctatctgggttctaaactattgtttcttttgtgtattgttgtagtatggcaggatccgcaccggaaggaacacaatttgatacgcgtcagtttgaccagaggctgaatgaagtgtaagtcctaagatctttagtttcattactcgtttttgatgagattttttttgtatttgctaatcttattgtttgtttgggtgcagtctcgatggacaggatgagttcttcacctcatatgatgaggtccatgagagctttgatgccatgggtttgcaagagaatcttcttaggggtatctatgcttacggtaagtgaagaaggtttaaagaaacaaccttttgtttgttatgttgggattcctattaactttatcgtatgtgctctttcctgtgattgattggttgatttttttctaggtttcgaaaagccttctgctattcagcaaagaggaattgtacccttttgcaagggtcttgatgtgatccagcaggcacagtctggtactggaaaaaccgccactttctgctctggtgtcttgcagcagcttgactatgcccttctccagtgccaggctctcgttttggctcccaccagagagcttgctcagcagattgagaaggtcatgcgtgcccttggtgactaccaaggtgtcaaggttcatgcctgtgttggtggatccagtgtccgtgagtatcagcgcattctccaggctggtgttcatgtagtcgttggcactcccggtgtgtgtttttgacatgtttagtagacaatctatctgccttgactgcatccatatgtttgtcactgatgatgccgatctaatgctctcccgtggtatataggaacaggtgatgttctgttgtgcatagtatgaatatgcc

SEQ ID NO: 16566 - DNA, 3077 bp, Arabidopsis thaliana landsberg
aatttcacatctttaaacgaaagataaagcctctttcggtttggaacaactgttaggtaacacatataatggaattacaaatcataaatcctccatgaccataagctaaaaagttggattaattaataaatgacatgggaatgggaggtaacattaactggtccaaaataaataattaatgtaatgacacattcacataataatatctcgaattgaaatcccaccgagagtgccctgcttttccactgagtttcttcatatatatctctttctctctcatttgtaattgtatctctcacttttgtttcaatggcttcagctacttccgtcatagcctggtcatttctctttctattctacctctttgtttttctccattactgtttctgacttgtgctagtgctccttcgtttgattttttggcacaggggttctggagaagatgggcaactaggacttggaaccgatgaagaaaaggaattggcttccgtcgtcgacgctcttgagcctttcaacgttcgctccgtcgtcggtggtagccgcaattccctcgccatttgcgatgatggcaaggttacttatccaatttcctttatgtgtccttgttgtgtcttctttggttggtttcgcttagaactaactaaagtacaatgctttgctttgattttgcgatttgattctaagccatgtctttaagattttcttagttcgctttacatagggtttttgagatctgtaggaccaattaaaaagggtttaaagctcgtattttttttcttgtcctgaagtccaactaaaatgcaaccaatatgtttgtctgaggttactctcgaatagatcatcagactctggttcttgtctccatggtgtagtttatgattgatgtgtcaccaacatatagaaataatatggtctcttaaatggtttctcagctgtttacatggggttggaatcaaaggggtacattaggacacccacctgagacaaaaacagaaagcaccccaagtctagttaagtctcttgccaacgtcaagattgttcaggtaaaacttcttacaattatttaagtatttttggctctaatgctgtttcctcgttgtgatttactctgaattgccgtttctgtaattgatcataggcagctattggtggctggcattgtttagctgtcgatgatcaaggccgagcatatgcttggggtatgcattttctctctcagcttctttctaatgattgtgacctcaatgatcttaatgatcttaagttgttcacctttttgttatataatctacttaggtggaaatgaatatggacagtgtggtgaagagccttccaaggatgagacaggtaggcctgtgcggagggatattgtaatacctaagcgttgtgcccagcaacttacagtccgacaggttacttatgctgctaacctctcttcatttacctcaatttttagttctctttttttcctgtctaaaccatctgttctcgggtttgtatgattaaaataacaggtagctgcagggggtactcactctgtggttctaacccgtgaaggttatgtatggacttggggtcaaccgtggcctcccggtgacatgtattaaccaaatttcctttcatttatggatacgacatttgcattttcttgtcttctgttggtttatatggtgtttcctgtatatcgcagaaaacaaatttctgttcctgtaagagttcagggtcttgaaaacgttcgtctgattgctgttggagcatttcataacttggctctgaaagaagatgggactttgtgggcttggggtaataatgaatatggacaacttggaactggagacacacaaccgagatcgtatcctattcctgtccaaggccttgacgatctcactttggtatgtagtctaaaacttctggtttaagcactcattattataactgatcccttcagatatgtgaactataaaggcctatgttaaagcttaattcctcctctgaattcatgttaggttgatatcgctgcgggtggatggcattcaacagctttaaccaatgaaggagaggtattagaactcatacattctcttactaatctagagtctcactttttattccatctggctcttgatcgagtcattactgggttgtttctgagcttgatgtagatctttactctaaaaatgttgtaacttggctatgtccaatattaggtgtatggttggggaagaggagagcatggaaggctcgggtttggtgacaatgataagagcagtaaaatgcttccgcagaaagttaatctcttagctggagaagacatcattcaggtaaaaagtacaaaccaccagttcttgactcttctcatagctttgaaagctcttatcgtttttttcctctcaggtctcttgtggcggaactcattcagtcgctttgacaagagacggtaggatcttctcggtaagtcctcttagagagtataaaacattgttggttagaaacccaaagtcaatctctaaacccctcctttatattgattcctgtgatcagtttggtcggggagaccatggtagactcgggtatggaagaaaagtaactacgggacaaccattggagcttcctatacacattccaccaccagaaggacggttcaaccacaccgatgaagaagacgatggaaaatggatagctaaacatgtagcttgtggtggccgacacactctagcaattgtggaatggaagtatgatcaggaggaaacagaataaccatgaagaagatagagcgagcaaaaaaacaaaaacacaagagggactctagagataagcatttgttatagagaaaaggggagcaaaagcatatggttaagcttttgacactcccatgaatgatgaatctatatgaaagaggaagaactaaatataatatcatcatgattttgtttttgataatataaaatagattgaaaaagagaaacaaatgagaggaacctttgaaaggatggtttaaacctttaaaccattattgattctctcggtttaaaggtttttcaacaaccttgacaagatgaggaaccagatagggaaga

SEQ ID NO: 16567 - DNA, 5982 bp, Arabidopsis thaliana landsberg
taagatccagatcaacttttcttaaaactactaccaaataattgcttttaaacactctgctttattactttgtttcatctcttgttatctgagtctgatcttatcttctttctaagacttgttttggctttgatatattcaccagtgatgggttttcttatgaacgtactccaatgtagagtctgacaagttcaatgcaaggaaaatggtgacgaattataatagccttcaggattttcttttacaaaaccataaaaactgcccaaggaaaatgcatttcagttttttaaccaaagaagctactctgttttgggtcaactatggaaacatgccttcgacaccttttagtttgcacaagtaaatcaaaggaaacatggcattagaaaaatcatgaacacgttttcatactcgtagacttcattgtgcagtccatttcctacgcatgtaaccccacaccaggaagtaaacatcacaattcgatatctcattgtagagcttcaatatcttctcaacatactcaaacgctccaggattttcaaagtttgtaggaccctcttcttcaggaaatatccccatctcctttaaacacttaaaagacctcaagaagtgccctatcatgtttatctctctcatcgttcctctaaacccttgaatctctaccttcttcacgggacaagaagcaagcgatcgacctttgtcttcccgagaaatgcagtcacaagcatccccgcatttatctgtcacattgtgtaagagaccctgaaatcataaagaatacgataagattaccgagtatattgagtctgaccaacatctttaacaaatgttttgtcaagtagttccatggtttgtaattaacctcaatgattagatattctagatgcggacagtttctcagaagagctggcactgcttgccaaccgcgaccctcttcactcttaatacctaaggttttgaggttgttgaacaccggcattgattcacagcatagagaaagtacctgaaaacaagaattaaaaaccaactacatactttgcaactaatctttctcaaatagaccagagagaacgaaatagagaactgacctcaagagtatcagcagttaagtaaagtatctgaatattttggatgccgttcatgagcttcaccacattgccaaattggagaacaacattacccgcatcatcctgtaacaagtcattatttggctctcttacccgcttgatctgatcatcttttactataaggttgattcgagcctcaagtaactttcccatattaactaatggataatcctcggcaactaaatcagagtagtttaagtaaagaagacttggagtatcaaaagaaatgctctttggattcacatagtcttcacaaccggtgccaaggatacttagcttcctgaggcttgcacttgacacggtttcgtgtgattccttccactccatactagccattcgtaattcctcaagcacagggaaagaagaaagaaaccttttcatcttaccccaaagaatcaagtccgagtcaatataaagacttttaagcattggtaaggaagtgcctccctttccacaccaccaatccacacaacgatcatttcttattttcagcttgaccaatgtcttactgacgaacatctcttgaggtagcatatcctcatcctcttgggtatcctcataggaaaaatcaatgaaaagatcaagatcggaaacaccacgctgcagcacattacatatccaacgattcacatgatctggatgaataccagttatacacttgagagagaatctatcaatgggagaatcatcctgcaaagccaaaactctgtccacgaaatcaacgaagctctgtcgaatttcaagcctttccgctttaccctcttccgggtgaagaaattcagagtcatcaatgtcgagaatagggataagtttccagagattgagccagctctttgagagaaccgaagtcaaagcaatgtgcttggcgggaaggaaggacaagatatgaccacgaaccccgtctggtagattgctgacacgatccatcttgcgtacacgagattaagagtacgttattacggctacaggtaaaacatgaaagttgacaacttttccccaaaagatgagagagtagaaacgggaacagagaaaaccctaattcacaattcacacgaaaatatgaattcacacaaagaaaactttgaatcaagaaacagaatcagtggaagcagaggagataggtaaaacttgagcatttacctcgctacgaatggcttaatcgaagatcaaaattttggagaatgcgtccagtgataagagtgagagttgggagtgctaggtcactggtttctatcgtagaggagaagaaaagtcacagactttcagttcgacaatacatgcaaatgcatcggagtagccgaaacatccaactttaagaagaagaagacagcagacaaacgaaattgagggtttttaaaaccaagtgtgaatgttgttggttctactttaatcaccggtttaattcggtaaacaaaccggaactgtttgactttgggttacggaagtgaggcccaacgcccagttgcaaaattgattaggattataaacagagaagcatcgtgatgagctgatgatgctattgaattttggatgtctcagcttcttaaactgaaagtttgctttttatcgggaagaaaaaagaactgaaagcttaagttggtttggttaatgcgaaccggacaattcaaatcaaataactttatatgcagtcgaacataattacttgtacccgcaaaaatgatataagataccttcaaaggagtataaaatcagcagagacagaagagaacagttagcttccgcacctaccgtgtacagatgcaacgtcgagagagtagggaagatatgaagatccaaatttacaagctgcttcgcttcaggattttgaactggaattccaactaaataaacacaaaccgaaccaaattggaaagcattaagaaaacaatcacaaatctattctccttctcgtggcggaaaatctgttgccgtagcttggccgagctcggttatctcctgatccctgtatgtctcagcacgctctgagtcggttacacgcagagctctaactgccgatgctagcattgggttctgctcgacaatgatatcgaacagagcatcatagtcccgctccttctcggtcatctcctgaccactcgacgccttttctcgctctgagttagttgcctctctagccctcaacgctgaggctataattgggttctggtcgacaatcatatctaacatagcctgtagcctctccttaagatccgcatgcttggcttcctggtctcgttgcctctccttaagatccgcaacttcaagttgcatctgaaggtagtcttgagacatctcttgtggcggaggaggaggtaccgtggaagaagctctacgcatgaagaagaacatatcgtagatacgctctttattgcggggagccaactgtaaaagaaaagaaaagacagttagtttattcaaagctgtcatgaatttatgtgattgaaaacggtgatcaaatagtatacctcatagtacatctcatccatctgggtctgggaccaacccccagattgtgctgaactctgccaatgtccaactatctctgtcgagaccacatcgtggagcctatacgcgacaacttttaaaattctaggcacttcaaagtttgtagaatcattctcttcggcatctatctccatctcattcaaacacgggaaatactccaagaaatgccttatcatctctttctctcgaattgttccacgaaaccctctaacctctaacttcttcactggacaagatatgagcgaactacctttgtcttcccgcgaaatgcagtcacaagcatccccgcatttatctgtcacagagtgtaagagaccctgaaagcataaagaagacaataagacgattgagtctaaccaacaactttaacaaatgtgttgtccgagtagttttatggtctgtaattgacctcaatgattagaaattctagatgtggacagtttctcagaagagctggcactgcctgccaaccgcgaccctcatcacttttaagtcctaaggttttgaggttgttgaacacaggcattgattcacagcacatagtaagaacctgaaaacaagaaaaaaaaacgaacgaggtactttgcaattgatctttcaaaaatagaccagagagaacaaaatagaaaactgacctcaagagtatcttcagttaagtaaagtgtctgaatattttggatgccgttcatgagcttcaccacattgccaaattggagaacaacatcaccctcatcatcctctaacaaatcattatttggttctcttatccgcttgatctgatctccattttttactataagatggattcgagcctcaagtaactttcccattttaactaatggataatcctccgcaactaaatcagaatagtttaagtaaagcagatttggagtatcaatagaaatgctctttggatgttcaaactcttcaacaccggtgccgtggatacttaacttcgtgaggcttgcacttgacatggtttcatctaattctctccactccatattagccatgtgtacttcctcaagaacagggaaagaagaaagaaaattctccatctcaccaaagaaaatcaagtccgagtcaatattaagacttttaagatttggtaaggaagcgccaatatcccaatgccaccaattaacacagtgttcacttcttaatttcagcttaaccagtgttctactgacgaacatctcttgaggtagcctataaccaccatcctcttcggtatcctcatcagaaaaatcagtgaaaagataaagatccgaaacaccacgctgcagcacattacatatccaacgattcacatgatctggatgaataccagttatacacttgagggagaatttctcaatgggagaatcaccctgcaaagccagtactccgtccacgaattccacgaagctctgtcgaatttcatccctttccgctttgccctcttccggatgaagaaaatcagagtcatcaatgtcaagattagtttcaaatttccacagattgagccagctcttggagagaaccgaagtcaaagcagcgtgcttggtgggaaggaaggacaagatatgacaacgaacctcctctggtagattgctgacacgatccatcttctgtacacgagattaaaagtacattacttcatctacaactagagacagctttaacagtaaggtaacattaagcaatcaggaatctaaaacatgaaatcaaacagctttcccccaaaagaggagaagtgggaacagagataaacccagttcacagaatcagtagaaacagagaagatgattaaacttcagcatttacctcgttacaaacgcttaatctagtatccaaatgttggggatttcagtgaatgcgtccagtgggaagagagagagcgagaatagattgcttaatcgctagttcatatggccgtagacgcaaagatatgaagtcaacgcaaatatttagcggaaggtagaggggaaagtcccagactttcagttcgacaagacatgctaatgcatcggagaagccgaaaccaaattgaggattttgcattgaaagcggacaccactagtccactccattacaccagtgaggtgacccagtcgagtttaggctccggtttcggtttattgggtaaacgggtaaacaaaccggggcagtttgaatttgggctacgaaacggcgaaagtatggtggaacaagtcaagcccaagtaaaagcccagtagcaaactggtaaaacctggcctgtggctggttgttgcaagtggtggtatttaaaacaaagtctccttcctcttcttcttaaacgttgggtttaaaattgcagagaagtctatctatataaagagcgcatagagggc

SEQ ID NO: 16568 - DNA, 3014 bp, Arabidopsis thaliana landsberg
taaaaacacaattacgtaatcattcagatttagacataattgtacccatattataactcactaataccatttgtaccacctgtcctattgtatctcaataaaacacttgtaccgcttatactattatatctcagttttaccatttgtcccagttcgtcaattctgggtttcacaaatcgtaaatttcgattgaacactcactaaactctctgattcaaaacgatacaacagcccagaatgaacaatacaacaattttatgttattaacaactaactccaacaagaaattcacattaatctacaaatcaaaacgagatcggatttacttttgtcgttgaagaggaagctcactttaggagcagattatcggcttggaagctacggcgatctcggaagctaactcgccggtgaaattagagctcaaatcgccggcgaaatcggagctcaagtcgccggcggcgaagtcggagaaaatcacgtccgaagtcgtcggagaaaatcgcgatttgggagcagcaacgtgaagaatttcttttttttttactaaatgatttactctttattgtgaattctccctcagttatttattaaggagagagatgtaattacacatggtcgagtggtactcagaataaatggatggtactcagaatagattttctaaaatgatggcataatagaacgtggctctgtagattttatcaaagtacatatatatgtgggaaaaagacgtaagtggtctaatacaaaaaatgtaaaaaatgaatgggtgcagtgggtgttacacgattggggagacaaagattgcataaagatattgaagaattgcaaagaagcggtccctccaaatatcggaaaagtgttgatagtggaatcggtgatcggagagaataaaaagacgatgatagtggacgaacgagatgaaaagttagagcacgtgagattgatgcttgatatggtgatgatggctcacacaagcacaggcaaagaacggactttgaaagaatgggactttgttcttaaagaagctggctttgctcgatatgaggttagggacattgatgatgttcagagtcttataatcgcgtatcggtcttaaaaggatcatatatacgaaaaatgaatcatagccgaggaagagctaaaccaaattttcctttgagaaaaacctcaataagtttgtgattcttggtttaatggtacgtgataaattaaatcaaggcttgtttatttgaattttcacatttcttttgataaattcccatttttacttcatgaacttttagcccattatggtgatgatgattcataagaagcccaaaaagcccaatgctaattagatgttaacacgcgtcgtcaccttttaaatgggccaaacaatcttctctctcccggcgatgggcttacgcagttacgcattacaaatacacactacgcttcttcgtcttctctctgtgggacttctgaagtagtaatttcacggcgagatacagagcaattagagaatcttctctctggtctattaccgtgaaaaactttctcctattataaattttatttcataggaagatgagtgagaaagcgaggagaggtcgatcaaactttaatggactacatcaccctgttgttgatttttggcgacgagaggtcggtggaatctcctctcgtaatttctccaatcgcttctccgcctccgaggtttgtgttttctctattggattcgaaagttttgaaatttgtggttcttctatgagtctcattggtggatttagtcgtatcgttcaattgactaattattgttatgattcacaattcttatattggttctcgtatatgtagaatttggttctgcgtttagagatatacaagaagctagagaagcacaaagggtgtgtaaacaccgtgagtttcaatgccgaaggagatgttctgatatctggttccgatgatcggcgtgtcgttctttgggattggcaacttgggaatgtgaagctttccttccattcaggacacgctaataacgtttttcaagcaaagtttatgcctttctctgatgatcgaacgatagtaacctgtgctgctgatggaatggtaaaatcctttgagttgctttaagaaactctctgttgttttctgttagtgtcacactttacttagattaaatctccaaacatctttaggttcggcgtgcaagtattcttgagggtgataaagtggagacgtctttcttgggattgcatcaaggacgagctcataaactatgtatagagccaggaaacccacatatattttacacatgtggtgaagatggattagctcaacgtgtgagtagtaagctgcatcactgttttgatatctactttagtatccttataatttgattaaagacattggattgttgcccattttcagtttgatctgaggactgaagcccctacagaacttttcacttgccgatcagttgatcctaggaggaggaacatggacgccatccagctaaatgcgattgcgatcgacccgagaaattctaacctctttgctgttgggggaatggaagagtacgctcgtctttatgatatccgtagatttcagggtgagggtttaaatggttttacccgagctgcagatcacttttgtcctccacatcttattggcaatgaagatgttggaataacggggttggctttctcagagcaaagcgagcttcttgtttcatacaatgatgagttcatctatctcttcactcccggtatgggattagggtctaaccctatcccatcctccccgatatccaagagtcctgtatcaaaatcagaatcatcttcttccccaaaagatgagaacgaacactcagtttctttggtttataaggggcacaagaactgtgagacagttaagggtgtgaacttttttggacctcggtctgaatatgtggttagtgggtcagactgtgggaggatatttatttggaggaaaaagggtggggagcccatgcgagcaccagtcggctataa

SEQ ID NO: 16569 - DNA, 2041 bp, Arabidopsis thaliana landsberg
aaagtttgtaaatactctccttcccaagtgtttgaacccctacataaaataaattcctttactgtatgtgcaaatgtctctctagctagtagtcggaaaagaaaaagaaaaaaaagaactagatagtaatttgacagtgtaaaactctagagagaaataaaaaataaaaaaattaggaagatcaacggaaattgcgttgactatgattattgatgtcaatcgcgtaccctgaatttataaattaaattaaaattttcattttatctatatatatatatatatataggaaaactggtataatctttagttaaatgggccgaatctgggcttaacagtaacagttttttttttgtgcaacctgacagctaagacaagtcttttaccggctttccgcctaaaatcattttttcctcctttttttgaaaaatcagttaaaagagttccgaggaaaaaaaaaaacgaattatctgacatcactctgatataaattctcccaacagctaagaaaatggtcttaactttgccacgaaggtaaagtaacaactagcaattatttttttttattttttttaatcattttggtcttagggttcttcacgctgaagaaaacagagcttttataaactcaaacaattcctatattcagacaagaacacacagaaaagcacgaaagtaaatactatatcatcctgtctccgaaggtaacaataaaaatcaattactttatttgatgcatctccttggatgacttttccgtagcagggggaagaagagtatgtagctttccttatgaactacaaatcataatttttacaatttttatttttcgaatcagtcgttggtgatgggtggttacttgagaagcaggagagtctccggtggcttgttgtcagagctactttccggtgacattgctcttgcatcctctgcttccacagacttcttcatcttccccatctgtaagaaatttgttatacgtttctttttttcttctataggtgatgattccctattaaatattactaagaagatatgagcatgttttactatccataagagatggtacctttataagctggttagtcaaactctggttctcctctctcagcagcttctcctgtttggacaccatcacaactttattcagtttttctaaaacatcctcatagcattattttcggtgattcagcagagggcaagcgtcgatgacatatatagagatcttaacttggtctagtgatctccaaactcggagtttcagaggattcaagaatcagcatagctagggatggcgaataaaaaccagaaatactaaccttctcttgatgggtcttcacaagctccatcattagttctgtctgtcgcaagacattaagagttaggtcaaatcggggaaatgatctgaagtgcgaaacccaaacactgctcttggaccaaatattttatggactaggtgactgaatatcttagtagtagcatatataccttcctagctctagttacagacagagcagtcttgagctgctcttccagggactttagacaatctatacttacattatcgcttttcgcttcttcaatcttgctgcatatatattcatagataaacaacagaaaaggaaaacaacttctataatcagaggaaaagggggaaaaaggagtcttagtgctaaccattggattgtttctagcaactccttgtgcgaaagataattaagagttttttcttctagatcctgccatgaaagaaagattttaaatttcttttgtttccaggagacaaatgattcttaagtttggtacacgacaagtttaaaaccttgccgtagactttctagtgcatcaccggtagtgaagaacgaagtgcttctatgcctatctctctccacaatgttaagaaactacacaaagcatccacataacaaccatctcaatggactattctacctaagcttctaaatgttcatctcagttgcatatgccttagacaactttgagaattgagaggaatgggtgtatatatgaatgacaagagatgttt

SEQ ID NO: 16570 - DNA, 1036 bp, Arabidopsis thaliana landsberg
tgttactcctaccatgcggaaccggacctcagtgaagacaaggcgcaacatcaatttaatgccatctccctctgccctgaacatcgacataggaggagccagagaagatgaacaagactatactcaagttgactatgagcaacatgagtattatactcaagctgactatgagcagcaagtcgaattccagttacgtagagagcaagaagaagttaagaacaatggagaagtcgccgaagagtatggctgctcaaatcaaggaattccagggcaagccaaggccaccgtctcccacccccgaagtaagaagaagcggttccacgagctcagctgcaaagagggctgaaaggatcgatcaactccgagcttcatcgtttgagcctcgggaagtgatctccgagttgagagagccaaggagtagacagagacgaggttccacacgctcaaccaactactcgaccggacagaacgagcaaaaccctccctcctcaacttcaacccctgcttatactcaagagagtatggacaattacgtctccatctacttcacctgaccgctgaggtaacaccacctcaaccattgtatataccatagcatttctatttttctctgtgtgttgtatgtttttatcttgaattctcattcagatttttattacacaatggactgtgtaatgtacgatttggggagggttcaagacatgtttaacattgtattctgttttcttatttcaaattttgcatcatctaaggcatagaaaaaaccatgaaaatttaaatcaatttcagaaaatgatttctcaaaatagagtgtcatgtagattgcatttcattttagaattgtatatagtgtgtttgcatttaggattgctcatttgcataggagataatgatgatttcaaaccgttaagcatgttttaattcaatgaagtaagttcaatgcccaggttgttagttctatgttgcataactgattgtttctctataataagaaatgaccctgctttgaatttacaacttgactatactgctttga

SEQ ID NO: 16571 - DNA, 798 bp, Arabidopsis thaliana landsberg
ctatcttgggaacccaaaggaataaagttaacacaacagtatatggtaagacattgtcctcaatgcatataattgtttaagtaacgcagaaaactaaaaccctaacggatacaactgtgggaacccaaggggacatagtcaaaaacagcgggatattggcacacatagaacgtgcgaacactttggtaaacttcgtccgaatcagaggccattgctaaatcttcaaaaaactgaaattgcgaaaaagtgcataacataagggatgtgtagtaaccaagttaaacactgtgcagtacaacaaacagctgctgcagtaacgaaagaagatcggtgtaacgcccgtgaaccggaaaatcggttagggtttgtttttaaatcatccggtttaattggttgggttaattggaaaccctagagtgtgcctataaaagaaggaaactcgaaattagggctttagttagccatttttcgttttataaaggagaaaaagagagaaaaggagaatgagcagaatcgttagggtttgggagaaatcagtttcgtcatatcaaatcgtggtaaaaggtaacgaaatttggtagagttattcccaagtcctttatcgttattctccagtttacagaattggatttggattaaaattggttgagttattcgcagtttcgtgagatacgtattctcagacgcgaattaggaccagcggagattaaaactgagatcgtggtctcgtctgttttccgatcggcacgagattttgtgggcagctttgtgacgtctgcgttttgggtgaattgttac

SEQ ID NO: 16572 - DNA, 1517 bp, Arabidopsis thaliana landsberg
ccgccagactcagggttggcgatgtaggggtttgttggagctttgcattgtgccaccttttggtttctattattgatttttgcaccgtgtcttctgcgaagagaatccggtcttcgaaaataacaaagttgcgggccttccacaggaaccacaaaatccaagggtacagaggggtgcttcctaaacctaaaggaggtaaactgagacaagtgcgccccttttccaggatcttcttgacgtagactactgaacctgctcttggtttgggaagaagtgtcgccaagtcccagaccttgactgcaatgggacatctaaaaaagatatgcagagcatcctcgatctccccacatcgtttacaccctgtttccaccactatacctcttgctgaaagtgctgtcccaattgggagcgccttttttgtagctttcgagaggaacattctgatcataggtgacgtatacaccttccagttgttagttttccaattaaatctctcctccaagcaggggacaagattagactttgccattgccatagccagactttgtagaataaactcccgcttttgcagggagccaccaaagtcggtatggtctttttgtagaactcaatatcaagctgagtatatcttcctcatgatgaagtaattccctacgaatatcttcacagtcccattggtgagaaacagggaagatcaagtctttgaccaataaagtagcagagtctttatttggcggatcaaaggggattttgggcttgaggtagagagccagagggagtaccacacacatatgtcttctccggatcccaccgtccatcccaacccttttcttaagatttctctgcccgctagaatccctctccatccatggaatgcattagacaagggggtgacctccataaaaggtgaagagtggcagtatttgccaagtagaacttgagccaagagggattctagattcttcaaaagtttccagccaatttttgccaatagagaatcgttgaaagtagccacctccctaaaacctaatcctccctctgattttaacgcagtgagcttctccaatgctacccaactcatttttcgtttatccggtgtatcatcctaccaaaaacgggtcaacgccgattacatccttttacatagagagagggggagcttgaagcatgtcatagcatacgagggcatagctaaaactgctttgagcaggacttgtttgccagctcttgacaggaaccttgtagaccaagacagagttcgttgtcggattctatccaccagacccgtgaagatgtcaaattaagctaaacaaataggttataaaataagaaacaaagaaaagcaataaaagtcaagatatatatcagatggagaaaagcgtcagagggacattcttaggaaataaatgactaacagatcaagctatgattaggattattagcaaaccgttctagaactcaaatcactaatataaagtcaccggtgatgtgccgtgctactcattatgcctaaagct

SEQ ID NO: 16573 - DNA, 1181 bp, Arabidopsis thaliana landsberg
ccctggcctggtaacaacactagagatcatgctggaatgatacaggtacagtgtggcaatcccttgattgtgacagagaggataacgtaaaggaaacatgtttacatcgttttgtttcaatttcaggtgttcttaggccatagtgggggtctggataccgatggaaatgagctgcctagactcatctatgtttctcgtgaaaagcggcctggatttcaacaccacaaaaaggctggagctatgaatgcattggtttgttaactttcagaatcctattgtgtcctctattttattctcttgttcactgcctaagaaacgttcttcttgtgtagccgttgcttcacattcttttttttctaggctatgtgttctctcctaatttagtatctctttactttgacagatccgtgtatctgctgttcttaccaatggagcatatcttttgaacgtggattgtgatcattactttaataacagtaaggctattaaagaagctatgtgtttcatgatggacccggctattggaaagaagtgctgctatgtccagttccctcaacgttttgacggtattgatttgcacgatcgatatgccaacaggaatatagtctttttcgatgtgagtatcacttccccattgtcttttgtttctcttttgttcatattttggttggatttactcgtttctgctatggcctgactttgatatttgttctcttgggcagattaacatgaaggggttggatggtatccagggtccagtatatgtgggtactggttgttgttttaataggcaggctctatatgggtatgatcctgttttgacggaagaagatttagaaccaaatattattgtcaagagctgttgcgggtcaaggaagaaaggtaaaagtagcaagaagtataactacgaaaagaggagaggcatcaacagaagtgactccaatgctccacttttcaatatggaggacatcgatgagggttttgaaggtttgattgagctgattgtgtaataacatcacttctttatgtaatgatttatgtgatggtgaaatcttacaatccttgtttatgcaggttatgatgatgagaggtctattctaatgtcccagaggagtgtagagaagcgttttggtcagtcgccggtatttattgcggcaaccttcatggaacaaggcggcatt

SEQ ID NO: 16574 - DNA, 2764 bp, Arabidopsis thaliana landsberg
gtatcaggattagattttggaacagaaaacactcgacctgtccattccagcaggcgatatagagagaagtcttcatgatctcagtctgcacaaggtatttttttctcatcaatatgtagttttcagccctagactttgatccttctttgtgagcataagtacgatgttgaaataccaccttcattcgtttttctgaactcctgtgcttatgacttatgacatttgtgatttatttatttttttgtattgcagaaagtaccgtgactacagagaatgctggaacttcagatgtaagtcaattccatcctaataatgaaatcattattttgccctgggttatctatcttttctacttacttaactgatttttaagagtacatgcaacttgacttttagtattctgacatatttttcacctgttggaatgaagatctccataactccaaggactttatcttgcacatctagttatgaaagaggtggtagcaataggcatcgagaagaacataggcgtgacagaagtgaaactccgcggtcaagacagagaaacacttatgatgagatggatcactaccgacggagggaatcttatcgccaatctgaccgagactatcacggagaaaagcgtaggagatacaatagcgattggaggactccaggtatgctaaagattgttgaagctcataaagctatcaatttatgagcttattgacataaatgtcactacatttatctctatacaattttgtctattttcaattttttgttcccataagtgtgatgagagttgcaaacacaacacttatttggcctttttgatggagtgtaggtaggtcagactgggatgatggacaggacgaatgggaacgtagtcctcacggagacagaggctctagttacagcaggcgacctcaaccttctccatcacccatgttagctgcagcttcacctgatgctcgtttagcctccccgtggctggatacaccacgttcaactagtatgttgtgttttaattttaatatttgtaatttggttctattaattgcaacctcgggaaaagattaacaacgggatttatcaccatacccttcttcacatgcagtgtcttctgcttctccatgggatatgggtgcaccttctcctattccaattcgggcttctggatcatctatcagatcctcaagctctaggtatggtggaagatccaatcagcttgcatattctagggaaggtgatctgacaaatgaggtatgcacccatgatcatgccacttcttattagacagaactgaatttccaatttgtttcccatgttttaagaatccatgtcgagcttgcttgataaatgtttatgcggattatagctctcttgcattaggattttttttgtttgttttaatacctatgccacatgttgttatgtcttatataggggcattcagatgaggatagatcgcaaggagctgaagaatttaaacatgagatcacagaaacaatgcgtgtggaaatggaatatcagtcagatcgtgcatggtaagtattactttcctttagaggcaggaaaagattggtgaatcaataatgttttatgaactgagagcatagtctcactcttcacgttcattgttgaaccatttatagattttataaagcctgtatgaatagttgttgttgcaatttcccaggtatgatacagacgaagggaactcactgtttgatgcggacagtgcatccttttttcttggagatgatgcttctctacagaagaaggaaactgaactggcaaagagactggtatttatctataccaataacgcactctttctttacaagtttttatatggcactgcttatatctgatctattatctatggctaggcttttccgctttgcataaatcatctaatttgatttgattctgactgaagcatcaatcgcttatctctttttactactcttgattaagtatacttagctaaattatgttgttttgatatgtaagttcagattattataagtgtaggttagaagagacatttgtaagttcaaattatgttctcgattgaatgctttgtaatatttgtaatgcaggttagaagagacggtagcaaaatgtcactcgctcagagtaaaaaatattctcagctcaatgcggataatgctcaatgggaagaccgccagcttctcagatctggagctgttagaggcacagaagtgcagactgagtttgatagcgaagaagaacggaaagcaattcttcttgtacatggtatatagactactagaatagctcaaagttaaccaataaatgtcaaggttaaatgagtagtatttgtaacatgccaggtaatattctattttttgggtaattgcagatacgaagcctcctttccttgatggaagagtcgtttacacaaagcaagcagagccagtaatgcctgtaaaggatcccacatcagacatggctataatttcacgaaaaggctcaggtcttgtcaaagaaattcgggagaaacaaagtgcgaataagtcacgacagcgattctgggagcttgcaggttctaatcttggtaatatccttggtattgaaaaatcagccgagcaggtaactacctaattggttgttggttctctatcgatattgtggttgttggacatagtgtgacttggtaatgatcatcttgcagattgatgccgatactgctgtagttggtgacgacggtgaagtagaatttaaaggtgaggctaaatttgcacaacatatg

SEQ ID NO: 16575 - DNA, 1383 bp, Arabidopsis thaliana landsberg
attgaaaggatcctcctctaggggtaacttagaatcgcaatactcgcgtaatatgaaatccaactccataccggcgtcgaggatatcatcagtaagtttgatgtttttcttggtttcccctatacaaagattaactagatcataacccgtgctatacagcacgggcattaatattttttataaattaaattgtatactttgtttgaattacacaagaaatagtatagtataaaaatgatgccataatatttttcaatgtttgtactatttgcatataatgctgcattagattgactttgtttaaaaatgttatttttataataaatacaacatatgtagttttaagtaaatgtgtaaaatttgtatacaagttgttttggtaaaaaacatgttttctttgtattagaggatctaatttttggcctaacttagaattagtctttttatagtattttggttatatttttggacctaattggggcttatattagattatctttaatagttctgacgaaagaacggatccgataaccaacctaatacccgaaccaaaaaaccgggttaaggcgggttaaaattttaggaaatttccttattgggtagagttttagtaaacccgtggatatccgattggtccgtaaattacccgttacccaaaaatagtattcaaaaacctcaacattaatttaatatccaaaatgttaattatatttaatcttaatataatctaattatctaagattataattataaatctaaatatgtaaattaattttagacctaaatatccctaacaactaaactatttaaaaattatttgttatgtttgtcaaaatttagtaaaatatattcaaatatgattaactttattaaaaataacaaattttaatgggttttttttgtttgggtacccactatctacatagaatatacttgtttctatttattttggatatttttaggacctgaaactttttacccaagccaacccaaacccgattggatccgatccggatcagaaccgaatatttagaattacccttattgggtaattagtgtgtgctaccacattatattacattgaactcactgccttttttagtatatttttttctcttgaaaacaataagacaatttgttcagttgttgttctgatcaccagaagaatcacaaatcagttcttttacttcaagaactcggttcaagttatatggaacagatgaagccaaattatatttaaacaaagactatttaagaaaaagaaaaaaaatgcattatacttatttctacttttttgtataaatataattttttttcacaaaaaacggtttttccaaaaatgcaacacaaagcggagtgtacaccaatgggattggatttctt

SEQ ID NO: 16576 - DNA, 768 bp, Arabidopsis thaliana landsberg
agactatgttatttctcacaatatctatagtgttggctaattttgtttgccttttccaatagatttttagaaataactatcatcttagtagtcctattatccgttgtcaagttgtttataaactctttgttatctaagtattacaggaaataagaatttgctcattgtgaataataaactagaagttgtgttaaattaaaaatttattatatactttttatgtttctttttaattgattttgtagaaaaaacacacagattaagaaaatatattaaaactaattataaatgtattaatttttgtaatttatatttttctttaattataaattaacgatattcaattaattgttctaaattttaaaattcattaataataactaataaatagtgcatagaaaacaaaaaaaaaatcaatcattttgaaacaatagtttttctaaaaaatcaataaatgatcaaaataataaaaatgcaatgaacgcgacaaagcaaagtttgaataaaagcaattaatgaacctttactcaagagtacattaactggaaatatttgatgaaacaattaataaagttttacatcggtttggaaagccgcaccatccaaaatttgagatgaaagaaaaaaattacctaaactatggattttatagtttttgcgatcaagataccacaaacttaccgatcgggtatgccatgaaaaagcttaaagcaaacattcaagatgtccttgaaacctataacgatgattattttgttataggtttaa

SEQ ID NO: 16577 - DNA, 799 bp, Arabidopsis thaliana landsberg
attatgaatttaataaataatcaagggatgcatcatttgctttcaatacttatcaatgtatatatacatacacacactcacatataattgaattgtatagcttcgctaaaatgaaaactacttaattcttattttatagagataaaaaaagaaaaaaaaagaaatattggttcttatttcactatatcatatcattgtatcgtataaatatttaataaagtatgtattagaccataaatatctagcaaactatagtagctagcttctttttttttgttggacaaaaaactatagtagcgaatttaattattatttttgtaattcgtaaattatcacttaaaataatcaagatcatgttcttatttcaaaaggaaaaatgacaatatttcagagaacaaagaaagtatatctcaattttgatattttgtgagatatatttttaaggaaatgactaaacaatacttcttggtgcaaagtgtcttcggtggtcacaaatagagcgacggagatgagacaaactgagagacggagacgacaccagctcagcgataaagtgatgatttcttttttgaaaggagagggaactcgaggcgacggaggttgaggaatgaccaaaaatcgagggaatcgatgcgacaaaagttgaggaatgaccactaaattaatgctataatatagttgacatccgattttatcacttttagtagcagctagtgaattagtgctacaatcatctgctaccaatggccaaatttctgttactataatgtttagcttacttgattaatttctttcgaat

SEQ ID NO: 16578 - DNA, 538 bp, Arabidopsis thaliana landsberg
aacacaaatcatagtttagggtcggccctatcgttacatactattttcccacattgcaaacaacaaataaaactgtctaaaaggcagctttagagagagtgacaatgagatgcaatatttttcatgcaaaaaaaccttttagaaacggaaggaacaatataacaaccaaaatacacccacaagcctctgccaaattgacccgaaccacctcctccgtgactacaactcggccgttttagagccaccaaatatccagctagaacgacaagattcacctgaagagattctaggaggggaaaagagaaggagaaagaaaaagaaaatgagatggtgaatctgattttgagttctaaaaaatgaagagagaaagagagtttcatggctgaaatctcgtaaagaaaaaaacaagaaaaaagaaaaataaagtaaaaggataatggtgttgattggttgggcttgaagtggttcttacagccacaatattaaagtaaagactaaatttcaataatcatgttgtacggctttattttaacttaca

SEQ ID NO: 16579 - DNA, 437 bp, Arabidopsis thaliana landsberg
cttaaatttttgtttttttttcaaatctattttaaaatgtttgaaaaatgaaaacaatgtatatttaatattttatgatttgcaataattattaagttttagtaaataaaataattttaaaagaatagtttttttcagaaaaccccattagagagagtctgccattggaatatgaaaaactaaaaaaaaataagcaaaagttctcttgtaatttttgttgaaatttaatcaaaaaaaattgagaaaacctctccatgagctctctccattggagatgctctaaaagcttaataggagccttgccagttgccacaacttatacgactaattcagactctctcgtttcttttaaaaggatgatattgttcctaagcgtagagtagacgttttagtaaatagtaatttgggaagaaaccaaaacccataacgagggtcgc

SEQ ID NO: 16580 - DNA, 1147 bp, Arabidopsis thaliana landsberg
tacgctaacaacaagacaatatattctcaaccttaatctcttgcgtgtgaggacaatacattttagtttacgctaacaacaagacaatatattctcaacattaatctttcttgtgtgaagcaagacatagccattattattctagtactaaagaagacaatgtatgcctaataaatagaaaaccccttggttttttttggagtaaaaaaacattaagggaaatttgtaaaactaaccaaaataaattataattaagaaactaattaagaaacaaaagaggtatgatattctgtgtataaactacaatatagactaaaatacccttatttttcttgtttttttagtcattactctagtacactataattaccatcaccaccatgcgctgcaaccatcaccatcatcgcaattcgcaaccaccatcgccatgtcgtcaccagcactaccactgcaactgtcgccaccataccaacaaccatcacgctgtcactactacaaccatcaccatcatcaccaccgaaactgctacaccaccgcaaccaccttaatcacgatcattattaccatattgctactaccccgaccaccgtaaccatcaccaccgcaatcaccatcaccactatcaaaacaaccagcacgtcgttaccactaccaccaccatcgtcagtccgtcaccaccactatcaccaatttttgaaatagttaataactttttcttttttttatctagaacactttgtcctatactatttattctattctatataccgtttttcatttgaaaatatacatcattttcaatttttgagtttatacaagttttacacatataattatggtttgggtataagttttttggtttagcatttagtatattaaattaaaattgatttatgaatgagttatggaaaatagtacaatatattcttgttctattcctatacatcctaaataatacaacatatttttacttacacatactattcaccatttcacaaatttacatctaattttaaaaatttaaactatgcaatatgtaggaaaatatggtttttgtgcaaaaaaacctacaatacgattttttttttttttttgcaacttaacccttcaattaaaaagaaatgtaggcgcagtataaactgcgtct

SEQ ID NO: 16581 - DNA, 953 bp, Arabidopsis thaliana landsberg
atatatcacgttttttttttaataaatgcaaaattttattcaccaaaaaatttttggttacatcaagtgctttttgtttgagttgttaggttcatactttgtcttagctatgccaattaaaacctagtggaaagccaaaatacaaacaaatcatcatattttgggcttcttgtttctgaagaagagtgattcgattgcaaatgtttttgtcgatgttttttccaatggtcaaaggtgtgatagggttctcctctccgtgtcggcgattattcctttctctctatatggtgtgtaccatgatctgaagtgtatatctcagcagcataagaggtttcctcccaagagaggaacatgtgaggagcgaaacagtgcggtcccaagaagaagtgtaatggccttgaagtaggcctatcgtgagattctcccacacttgtgttgaataagagcactgaaagaataggtgaattcttgtctctatcggttcagcacaaaatttgcaggtaatatccacttgtgtgttccacgttctcattcttgcaccccttgttagtctatcatgcattgcaagccaagtgatgaaggaaaattttggtgttgcttccgagaaccaaaacccctttcccccatgggcagattggttgttcgactcagttttagttttctaatcatttagaaacttagttttctaatcatttagaaacttagtttcttaatattatttttatttctaatttaacatctataagccgaagacacaagatttattaagatagcgagacgtgttatcccttatcatttctaagatgcttttacaacatttggttaaaagaagcaaaaaaaaaaaaaaaacgtaccatcagaacttaaaatccgtttccggttacatttaaaaacggaaaaaacaatgaaacactgatgtatatcacgaactcataagagccattagaaggacc
